United States Patent Application Publication US 2007/0214517 A1 - sequence listing, part 70

SEQ ID NO: 90899 - protein, 317 aa, Arabidopsis thaliana
  peptide (1)..(317): Ceres Seq. ID no. 12725680
  misc_feature (1)..(317): Homolog of NCBI NO: 22330710 NR Description: hypothetical protein; protein id: At1g77855.1
  misc_feature (123)..(317): Homolog of NCBI NO: 6573780 NR Description: F28K19.7 [Arabidopsis thaliana]
  misc_feature (4)..(124): Homolog of NCBI NO: 6573780 NR Description: F28K19.7 [Arabidopsis thaliana]
  misc_feature (1)..(317): Homolog of NCBI NO: 18395063 NR Description: expressed protein; protein id: At1g22030.1, by cDNA: 39052. [Arabidopsis thaliana] >gi|25402951|pir||C86353
  misc_feature (1)..(317): Homolog of NCBI NO: 21593454 NR Description: unknown [Arabidopsis thaliana]
  misc_feature (9)..(316): Homolog of NCBI NO: 34907302 NR Description: hypothetical protein~similar to Arabidopsis
MDQSCSNSVNGFYSFLNRSMEDLERVYISNNFMSLQFLQRVICLLRTSHSHLTLLVQKLNLPVGDKWLDDYMDETSKLWDVCHVIKSAISTIESFCSSAISITSTLDGHYHHRRLLSPQISRQVIRAISGCRREAVGIEEENRALMENRIQRFPFWSEQVTTTGMESSKIQNGFSGFRGVMNTMKNINSLLLVILMQGLVYYIPGDTTVPTGTMMRLKQRVAAEMERIGVRKGMMMYEYRRSKTAMEELKVELERRCCGGGGEEEAVEKGLRERIENLKGSVGSLRNGTESIVAQIDDFFDDIVDGRKMLLDYCSHR

SEQ ID NO: 90900 - protein, 298 aa, Arabidopsis thaliana
  peptide (1)..(298): Ceres Seq. ID no. 12725681
  misc_feature (1)..(298): Homolog of NCBI NO: 22330710 NR Description: hypothetical protein; protein id: At1g77855.1
  misc_feature (104)..(298): Homolog of NCBI NO: 6573780 NR Description: F28K19.7 [Arabidopsis thaliana]
  misc_feature (1)..(105): Homolog of NCBI NO: 6573780 NR Description: F28K19.7 [Arabidopsis thaliana]
  misc_feature (1)..(298): Homolog of NCBI NO: 18395063 NR Description: expressed protein; protein id: At1g22030.1, by cDNA: 39052. [Arabidopsis thaliana] >gi|25402951|pir||C86353
  misc_feature (1)..(298): Homolog of NCBI NO: 21593454 NR Description: unknown [Arabidopsis thaliana]
  misc_feature (1)..(297): Homolog of NCBI NO: 34907302 NR Description: hypothetical protein~similar to Arabidopsis
MEDLERVYISNNFMSLQFLQRVICLLRTSHSHLTLLVQKLNLPVGDKWLDDYMDETSKLWDVCHVIKSAISTIESFCSSAISITSTLDGHYHHRRLLSPQISRQVIRAISGCRREAVGIEEENRALMENRIQRFPFWSEQVTTTGMESSKIQNGFSGFRGVMNTMKNINSLLLVILMQGLVYYIPGDTTVPTGTMMRLKQRVAAEMERIGVRKGMMMYEYRRSKTAMEELKVELERRCCGGGGEEEAVEKGLRERIENLKGSVGSLRNGTESIVAQIDDFFDDIVDGRKMLLDYCSHR

SEQ ID NO: 90901 - protein, 285 aa, Arabidopsis thaliana
  peptide (1)..(285): Ceres Seq. ID no. 12725682
  misc_feature (1)..(285): Homolog of NCBI NO: 22330710 NR Description: hypothetical protein; protein id: At1g77855.1
  misc_feature (91)..(285): Homolog of NCBI NO: 6573780 NR Description: F28K19.7 [Arabidopsis thaliana]
  misc_feature (1)..(92): Homolog of NCBI NO: 6573780 NR Description: F28K19.7 [Arabidopsis thaliana]
  misc_feature (1)..(285): Homolog of NCBI NO: 18395063 NR Description: expressed protein; protein id: At1g22030.1, by cDNA: 39052. [Arabidopsis thaliana] >gi|25402951|pir||C86353
  misc_feature (1)..(285): Homolog of NCBI NO: 21593454 NR Description: unknown [Arabidopsis thaliana]
  misc_feature (1)..(284): Homolog of NCBI NO: 34907302 NR Description: hypothetical protein~similar to Arabidopsis
MSLQFLQRVICLLRTSHSHLTLLVQKLNLPVGDKWLDDYMDETSKLWDVCHVIKSAISTIESFCSSAISITSTLDGHYHHRRLLSPQISRQVIRAISGCRREAVGIEEENRALMENRIQRFPFWSEQVTTTGMESSKIQNGFSGFRGVMNTMKNINSLLLVILMQGLVYYIPGDTTVPTGTMMRLKQRVAAEMERIGVRKGMMMYEYRRSKTAMEELKVELERRCCGGGGEEEAVEKGLRERIENLKGSVGSLRNGTESIVAQIDDFFDDIVDGRKMLLDYCSHR

SEQ ID NO: 90902 - DNA, 2091 bp, Arabidopsis thaliana
  misc_feature (1)..(2091): Ceres Seq. ID no. 12725687
  misc_feature: MA Experiment ID: 20000171 Result: Down-regulated in Transcription
  misc_feature: MA Experiment 20000171 PARAMETER Experiment Name: At_42deg_Heat_P Parameter: Age (day) Value: 14
  misc_feature: MA Experiment 20000171 PARAMETER Experiment Name: At_42deg_Heat_P Parameter: Organism Value: A. thaliana
  misc_feature: MA Experiment 20000171 PARAMETER Experiment Name: At_42deg_Heat_P Parameter: Plant Line Value: WS
  misc_feature: MA Experiment 20000171 PARAMETER Experiment Name: At_42deg_Heat_P Parameter: Temperature (deg C) Value: 42 vs. 22
  misc_feature: MA Experiment 20000171 PARAMETER Experiment Name: At_42deg_Heat_P Parameter: Timepoint (hr) Value: 1
  misc_feature: MA Experiment 20000171 PARAMETER Experiment Name: At_42deg_Heat_P Parameter: Tissue Value: Aerial
  misc_feature: MA Experiment ID: 20000173 Result: Down-regulated in Transcription
  misc_feature: MA Experiment 20000173 PARAMETER Experiment Name: At_42deg_Heat_P Parameter: Age (day) Value: 14
  misc_feature: MA Experiment 20000173 PARAMETER Experiment Name: At_42deg_Heat_P Parameter: Organism Value: A. thaliana
  misc_feature: MA Experiment 20000173 PARAMETER Experiment Name: At_42deg_Heat_P Parameter: Plant Line Value: WS
  misc_feature: MA Experiment 20000173 PARAMETER Experiment Name: At_42deg_Heat_P Parameter: Temperature (deg C) Value: 42 vs. 22
  misc_feature: MA Experiment 20000173 PARAMETER Experiment Name: At_42deg_Heat_P Parameter: Timepoint (hr) Value: 6
  misc_feature: MA Experiment 20000173 PARAMETER Experiment Name: At_42deg_Heat_P Parameter: Tissue Value: Aerial
  misc_feature: MA Experiment ID: 20000184 Result: Down-regulated in Transcription
  misc_feature: MA Experiment 20000184 PARAMETER Experiment Name: At_Shoots__P Parameter: Age (day) Value: 7
  misc_feature: MA Experiment 20000184 PARAMETER Experiment Name: At_Shoots__P Parameter: Tissue Value: Shoots vs. Whole Plant
  misc_feature: MA Experiment ID: 20000452 Result: Down-regulated in Transcription
  misc_feature: MA Experiment 20000452 PARAMETER Experiment Name: At_CS6879_Shoots-Roots_P Parameter: Age (day) Value: 14
  misc_feature: MA Experiment 20000452 PARAMETER Experiment Name: At_CS6879_Shoots-Roots_P Parameter: Organism Value: A. thaliana
  misc_feature: MA Experiment 20000452 PARAMETER Experiment Name: At_CS6879_Shoots-Roots_P Parameter: Plant Line Value: CS6879 vs. WS
  misc_feature: MA Experiment 20000452 PARAMETER Experiment Name: At_CS6879_Shoots-Roots_P Parameter: Tissue Value: Shoots
  misc_feature: MA Experiment ID: 20000496 Result: Up-regulated in Transcription
  misc_feature: MA Experiment 20000496 PARAMETER Experiment Name: At_Guard_Cells_P Parameter: Harvest Date Value: 7/19/2002
  misc_feature: MA Experiment 20000496 PARAMETER Experiment Name: At_Guard_Cells_P Parameter: Organism Value: Canola
  misc_feature: MA Experiment 20000496 PARAMETER Experiment Name: At_Guard_Cells_P Parameter: Tissue Value: Guard Cells vs. Leaves
  misc_feature: MA Experiment ID: 20001459 Result: Up-regulated in Transcription
  misc_feature: MA Experiment 20001459 PARAMETER Experiment Name: At_50mM_NH4NO3_L-to-H_P Parameter: Age (day) Value: Undefined
  misc_feature: MA Experiment 20001459 PARAMETER Experiment Name: At_50mM_NH4NO3_L-to-H_P Parameter: Organism Value: Undefined
  misc_feature: MA Experiment 20001459 PARAMETER Experiment Name: At_50mM_NH4NO3_L-to-H_P Parameter: Plant Line Value: Undefined
  misc_feature: MA Experiment 20001459 PARAMETER Experiment Name: At_50mM_NH4NO3_L-to-H_P Parameter: Timepoint (hr) Value: 4
  misc_feature: MA Experiment 20001459 PARAMETER Experiment Name: At_50mM_NH4NO3_L-to-H_P Parameter: Tissue Value: Siliques
  misc_feature: MA Experiment 20001459 PARAMETER Experiment Name: At_50mM_NH4NO3_L-to-H_P Parameter: Treatment Value: 50mM NH4NO3 vs. 100mM Manitol
  misc_feature: MA Experiment ID: 20001905 Result: Down-regulated in Transcription
  misc_feature: MA Experiment 20001905 PARAMETER Experiment Name: At_Drought_Reproduction_P Parameter: Age (day) Value: 40
  misc_feature: MA Experiment 20001905 PARAMETER Experiment Name: At_Drought_Reproduction_P Parameter: Organism Value: A. thaliana
  misc_feature: MA Experiment 20001905 PARAMETER Experiment Name: At_Drought_Reproduction_P Parameter: Plant Line Value: WS
  misc_feature: MA Experiment 20001905 PARAMETER Experiment Name: At_Drought_Reproduction_P Parameter: Timepoint (day) Value: 10
  misc_feature: MA Experiment 20001905 PARAMETER Experiment Name: At_Drought_Reproduction_P Parameter: Tissue Value: Rosettes
  misc_feature: MA Experiment 20001905 PARAMETER Experiment Name: At_Drought_Reproduction_P Parameter: Treatment Value: Drought vs. No Drought
  misc_feature: MA Experiment ID: 20001911 Result: Down-regulated in Transcription
  misc_feature: MA Experiment 20001911 PARAMETER Experiment Name: At_Drought_Reproduction_P Parameter: Age (day) Value: 40
  misc_feature: MA Experiment 20001911 PARAMETER Experiment Name: At_Drought_Reproduction_P Parameter: Organism Value: A. thaliana
  misc_feature: MA Experiment 20001911 PARAMETER Experiment Name: At_Drought_Reproduction_P Parameter: Plant Line Value: WS
  misc_feature: MA Experiment 20001911 PARAMETER Experiment Name: At_Drought_Reproduction_P Parameter: Timepoint (day) Value: 10
  misc_feature: MA Experiment 20001911 PARAMETER Experiment Name: At_Drought_Reproduction_P Parameter: Tissue Value: Flowers
  misc_feature: MA Experiment 20001911 PARAMETER Experiment Name: At_Drought_Reproduction_P Parameter: Treatment Value: Drought vs. No Drought
agttccctatcacacacttcaataacccacaaagataaaaaaaaaaaaatgggcatagagcttcagaatcaccagagccaccatgaagaagccagtcctgcagaagagcccatgtcacggtggctgataaatacgccggaaccaccaagcatgtggcaagagcttattgggtacataagaacaaatgtcttggccaagaagaaacataagaggaacaagacgaagaactcatcatcaaaccttgtttactcttgtcttaaatcggctttccctatacttagttggggaagacaatacaaactcaacttgttcaagaaagatttgatggcaggtctcactctcgctagtctttgcattcctcagagtataggatatgctaatttggctggacttgatccagagtacggtctatatacaagtgtggtaccacctctgatatattcgacgatgggaacttcgagagagttagccattggtcctgtggctgtagtttcgcttcttctgtcgtcaatggttcgtgaccttcaagatccagtcaccgacccaattgcttaccgaaaaattgtcttcactgtcacgtttttcgctggcgcgtttcaagccatctttggactcttcaggttagggtttttggtggactttttgtcacatgctgcacttgttgggttcatggctggtgctgcaattgtcattggtttacaacaacttaaaggtttatttggtttgactcattttaccaataaaaccgatgtagtttcggttttatcttcggttttccactcgcttcaccatccgtggcaacctctgaactttgtcatcggtagctcattcctcatcttcatcctcctagctagatttatcggaaaaagaaacaataagttgttttggattccagcgatggcaccgctaatatcagttgtattagcaacactaatagtgtatttatccaatgctgagtcacgaggggttaagattgttaaacacattaaaccagggtttaaccagctttcagttaaccaattacaattcaaaagtccacatcttggtcaaatcgccaaaattggtcttatttctgcaatcatcgccctaacggaagcaatcgcagtgggaagatcgtttgcgacgatcaaaggatatcgtttggatgggaacaaagagatgatggctatgggatttatgaatatcgctggttctttatcttcttgctatgtagctaccgggtctttctcaagaacggcggtgaatttcagtgctggttgcgagacggtggtttcaaacattgtaatggcgattacagtgatgatttcactagaagttttgacgaggtttctctacttcacaccaacggcgattcttgcctccataatcctctcggcgcttccaggtctcattgatgtctctggtgctttacacatttggaaactcgataaactcgattttctcgtcctcattgccgccttcttcggcgtcctctttgcctccgtcgagatcggtcttcttctcgccgtggggatatcgtttgcaagaataatgttgagttcgataagaccaagcattgaggccttagggaggttatcaaaaacagatatcttcggtgacataaatcagtatccaatggcaaataagactgcaggattattgactcttcgaatcagttctcctttgctatgctttgctaatgccaattttataagagacagaatattgaattcagttcaagaaatagaaggagaggagaatgaacaagaagttctaaaagaaaatggtcttcaagtagtaattctcgacatgtcttgcgtgatgggcgtagatacatcaggagtatttgcacttgaagaactacatcaagagctagcttctaatgacatccggttagtcatcgctagtcccagatggagggtacttcacaaattgaagcgagcaaaattggacgagaaaataaagacagaaaatatatatatgacagtaggagaagccgtagatatttatgtaagagcaagatctacgtcccacgagttgtgttgatatatatatgtaagaaacagtacaactcaaacatataacctagtgataattttattgttttctcat

SEQ ID NO: 90903 - protein, 674 aa, Arabidopsis thaliana
  peptide (1)..(674): Ceres Seq. ID no. 12725688
  misc_feature (203)..(514): Pfam Name: Sulfate transporter family Pfam Description: Sulfate transporter family
  misc_feature (121)..(674): Homolog of NCBI NO: 6573773 NR Description: F28K19.21 [Arabidopsis thaliana]
  misc_feature (2)..(661): Homolog of NCBI NO: 15238085 NR Description: sulfate transporter; protein id: At5g10180.1, by cDNA: gi_17064939, supported by cDNA: gi_20259973, supported
  misc_feature (39)..(667): Homolog of NCBI NO: 1711618 NR Description: Low affinity sulphate transporter 3
  misc_feature (39)..(664): Homolog of NCBI NO: 24414266 NR Description: Putative sulfate transporter [Oryza sativa
  misc_feature (288)..(619): Homolog of NCBI NO: 24414267 NR Description: Putative sulfate transporter [Oryza sativa
  misc_feature (29)..(263): Homolog of NCBI NO: 24414267 NR Description: Putative sulfate transporter [Oryza sativa
  misc_feature (623)..(661): Homolog of NCBI NO: 24414267 NR Description: Putative sulfate transporter [Oryza sativa
  misc_feature (291)..(674): Homolog of NCBI NO: 4033347 NR Description: sulfate permease [Brassica juncea]
  misc_feature (86)..(662): Homolog of NCBI NO: 11279063 NR Description: sulfate transport protein [imported] - thaliana >gi|3777483|dbj|BAA33932.1| sulfate transporter
  misc_feature (86)..(662): Homolog of NCBI NO: 15236537 NR Description: putative sulfate transporter; protein id: supported by cDNA: gi_14196242 [Arabidopsis thaliana]
SSLSHTSITHKDKKKKMGIELQNHQSHHEEASPAEEPMSRWLINTPEPPSMWQELIGYIRTNVLAKKKHKRNKTKNSSSNLVYSCLKSAFPILSWGRQYKLNLFKKDLMAGLTLASLCIPQSIGYANLAGLDPEYGLYTSVVPPLIYSTMGTSRELAIGPVAVVSLLLSSMVRDLQDPVTDPIAYRKIVFTVTFFAGAFQAIFGLFRLGFLVDFLSHAALVGFMAGAAIVIGLQQLKGLFGLTHFTNKTDVVSVLSSVFHSLHHPWQPLNFVIGSSFLIFILLARFIGKRNNKLFWIPAMAPLISVVLATLIVYLSNAESRGVKIVKHIKPGFNQLSVNQLQFKSPHLGQIAKIGLISAIIALTEAIAVGRSFATIKGYRLDGNKEMMAMGFMNIAGSLSSCYVATGSFSRTAVNFSAGCETVVSNIVMAITVMISLEVLTRFLYFTPTAILASIILSALPGLIDVSGALHIWKLDKLDFLVLIAAFFGVLFASVEIGLLLAVGISFARIMLSSIRPSIEALGRLSKTDIFGDINQYPMANKTAGLLTLRISSPLLCFANANFIRDRILNSVQEIEGEENEQEVLKENGLQVVILDMSCVMGVDTSGVFALEELHQELASNDIRLVIASPRWRVLHKLKRAKLDEKIKTENIYMTVGEAVDIYVRARSTSHELC

SEQ ID NO: 90904 - protein, 658 aa, Arabidopsis thaliana
  peptide (1)..(658): Ceres Seq. ID no. 12725689
  misc_feature (187)..(498): Pfam Name: Sulfate transporter family Pfam Description: Sulfate transporter family
  misc_feature (105)..(658): Homolog of NCBI NO: 6573773 NR Description: F28K19.21 [Arabidopsis thaliana]
  misc_feature (1)..(645): Homolog of NCBI NO: 15238085 NR Description: sulfate transporter; protein id: At5g10180.1, by cDNA: gi_17064939, supported by cDNA: gi_20259973, supported
  misc_feature (23)..(651): Homolog of NCBI NO: 1711618 NR Description: Low affinity sulphate transporter 3
  misc_feature (23)..(648): Homolog of NCBI NO: 24414266 NR Description: Putative sulfate transporter [Oryza sativa
  misc_feature (272)..(603): Homolog of NCBI NO: 24414267 NR Description: Putative sulfate transporter [Oryza sativa
  misc_feature (13)..(247): Homolog of NCBI NO: 24414267 NR Description: Putative sulfate transporter [Oryza sativa
  misc_feature (607)..(645): Homolog of NCBI NO: 24414267 NR Description: Putative sulfate transporter [Oryza sativa
  misc_feature (275)..(658): Homolog of NCBI NO: 4033347 NR Description: sulfate permease [Brassica juncea]
  misc_feature (70)..(646): Homolog of NCBI NO: 11279063 NR Description: sulfate transport protein [imported] - thaliana >gi|3777483|dbj|BAA33932.1| sulfate transporter
  misc_feature (70)..(646): Homolog of NCBI NO: 15236537 NR Description: putative sulfate transporter; protein id: supported by cDNA: gi_14196242 [Arabidopsis thaliana]
MGIELQNHQSHHEEASPAEEPMSRWLINTPEPPSMWQELIGYIRTNVLAKKKHKRNKTKNSSSNLVYSCLKSAFPILSWGRQYKLNLFKKDLMAGLTLASLCIPQSIGYANLAGLDPEYGLYTSVVPPLIYSTMGTSRELAIGPVAVVSLLLSSMVRDLQDPVTDPIAYRKIVFTVTFFAGAFQAIFGLFRLGFLVDFLSHAALVGFMAGAAIVIGLQQLKGLFGLTHFTNKTDVVSVLSSVFHSLHHPWQPLNFVIGSSFLIFILLARFIGKRNNKLFWIPAMAPLISVVLATLIVYLSNAESRGVKIVKHIKPGFNQLSVNQLQFKSPHLGQIAKIGLISAIIALTEAIAVGRSFATIKGYRLDGNKEMMAMGFMNIAGSLSSCYVATGSFSRTAVNFSAGCETVVSNIVMAITVMISLEVLTRFLYFTPTAILASIILSALPGLIDVSGALHIWKLDKLDFLVLIAAFFGVLFASVEIGLLLAVGISFARIMLSSIRPSIEALGRLSKTDIFGDINQYPMANKTAGLLTLRISSPLLCFANANFIRDRILNSVQEIEGEENEQEVLKENGLQVVILDMSCVMGVDTSGVFALEELHQELASNDIRLVIASPRWRVLHKLKRAKLDEKIKTENIYMTVGEAVDIYVRARSTSHELC

SEQ ID NO: 90905 - protein, 637 aa, Arabidopsis thaliana
  peptide (1)..(637): Ceres Seq. ID no. 12725690
  misc_feature (166)..(477): Pfam Name: Sulfate transporter family Pfam Description: Sulfate transporter family
  misc_feature (84)..(637): Homolog of NCBI NO: 6573773 NR Description: F28K19.21 [Arabidopsis thaliana]
  misc_feature (1)..(624): Homolog of NCBI NO: 15238085 NR Description: sulfate transporter; protein id: At5g10180.1, by cDNA: gi_17064939, supported by cDNA: gi_20259973, supported
  misc_feature (2)..(630): Homolog of NCBI NO: 1711618 NR Description: Low affinity sulphate transporter 3
  misc_feature (2)..(627): Homolog of NCBI NO: 24414266 NR Description: Putative sulfate transporter [Oryza sativa
  misc_feature (251)..(582): Homolog of NCBI NO: 24414267 NR Description: Putative sulfate transporter [Oryza sativa
  misc_feature (1)..(226): Homolog of NCBI NO: 24414267 NR Description: Putative sulfate transporter [Oryza sativa
  misc_feature (586)..(624): Homolog of NCBI NO: 24414267 NR Description: Putative sulfate transporter [Oryza sativa
  misc_feature (254)..(637): Homolog of NCBI NO: 4033347 NR Description: sulfate permease [Brassica juncea]
  misc_feature (49)..(625): Homolog of NCBI NO: 11279063 NR Description: sulfate transport protein [imported] - thaliana >gi|3777483|dbj|BAA33932.1| sulfate transporter
  misc_feature (49)..(625): Homolog of NCBI NO: 15236537 NR Description: putative sulfate transporter; protein id: supported by cDNA: gi_14196242 [Arabidopsis thaliana]
MSRWLINTPEPPSMWQELIGYIRTNVLAKKKHKRNKTKNSSSNLVYSCLKSAFPILSWGRQYKLNLFKKDLMAGLTLASLCIPQSIGYANLAGLDPEYGLYTSVVPPLIYSTMGTSRELAIGPVAVVSLLLSSMVRDLQDPVTDPIAYRKIVFTVTFFAGAFQAIFGLFRLGFLVDFLSHAALVGFMAGAAIVIGLQQLKGLFGLTHFTNKTDVVSVLSSVFHSLHHPWQPLNFVIGSSFLIFILLARFIGKRNNKLFWIPAMAPLISVVLATLIVYLSNAESRGVKIVKHIKPGFNQLSVNQLQFKSPHLGQIAKIGLISAIIALTEAIAVGRSFATIKGYRLDGNKEMMAMGFMNIAGSLSSCYVATGSFSRTAVNFSAGCETVVSNIVMAITVMISLEVLTRFLYFTPTAILASIILSALPGLIDVSGALHIWKLDKLDFLVLIAAFFGVLFASVEIGLLLAVGISFARIMLSSIRPSIEALGRLSKTDIFGDINQYPMANKTAGLLTLRISSPLLCFANANFIRDRILNSVQEIEGEENEQEVLKENGLQVVILDMSCVMGVDTSGVFALEELHQELASNDIRLVIASPRWRVLHKLKRAKLDEKIKTENIYMTVGEAVDIYVRARSTSHELC

SEQ ID NO: 90906 - DNA, 2158 bp, Arabidopsis thaliana
  misc_feature (1)..(2158): Ceres Seq. ID no. 12725691
  misc_feature: MA Experiment ID: 20000184 Result: Up-regulated in Transcription
  misc_feature: MA Experiment 20000184 PARAMETER Experiment Name: At_Shoots__P Parameter: Age (day) Value: 7
  misc_feature: MA Experiment 20000184 PARAMETER Experiment Name: At_Shoots__P Parameter: Tissue Value: Shoots vs. Whole Plant
  misc_feature: MA Experiment ID: 20000185 Result: Up-regulated in Transcription
  misc_feature: MA Experiment 20000185 PARAMETER Experiment Name: At_Roots__P Parameter: Age (day) Value: 7 vs. 21
  misc_feature: MA Experiment 20000185 PARAMETER Experiment Name: At_Roots__P Parameter: Organism Value: A. thaliana
  misc_feature: MA Experiment 20000185 PARAMETER Experiment Name: At_Roots__P Parameter: Tissue Value: Roots vs. Whole Plant
  misc_feature: MA Experiment ID: 20000227 Result: Down-regulated in Transcription
  misc_feature: MA Experiment 20000227 PARAMETER Experiment Name: At_Root-Tips-vs-Tops_P Parameter: Tissue Value: Root Tips vs. Root Tops
  misc_feature: MA Experiment ID: 20000267 Result: Down-regulated in Transcription
  misc_feature: MA Experiment 20000267 PARAMETER Experiment Name: At_Drought_P Parameter: Age (day) Value: 7
  misc_feature: MA Experiment 20000267 PARAMETER Experiment Name: At_Drought_P Parameter: Organism Value: A. thaliana
  misc_feature: MA Experiment 20000267 PARAMETER Experiment Name: At_Drought_P Parameter: Plant Line Value: WS
  misc_feature: MA Experiment 20000267 PARAMETER Experiment Name: At_Drought_P Parameter: Timepoint (hr) Value: 6
  misc_feature: MA Experiment 20000267 PARAMETER Experiment Name: At_Drought_P Parameter: Tissue Value: Whole Plant
  misc_feature: MA Experiment 20000267 PARAMETER Experiment Name: At_Drought_P Parameter: Treatment Value: Drought vs. No Drought
  misc_feature: MA Experiment ID: 20000269 Result: Down-regulated in Transcription
  misc_feature: MA Experiment 20000269 PARAMETER Experiment Name: At_1mM_KNO3_L-vs-H_Roots_P Parameter: Age (day) Value: 7,10,12
  misc_feature: MA Experiment 20000269 PARAMETER Experiment Name: At_1mM_KNO3_L-vs-H_Roots_P Parameter: Organism Value: A. thaliana
  misc_feature: MA Experiment 20000269 PARAMETER Experiment Name: At_1mM_KNO3_L-vs-H_Roots_P Parameter: Plant Line Value: WS
  misc_feature: MA Experiment 20000269 PARAMETER Experiment Name: At_1mM_KNO3_L-vs-H_Roots_P Parameter: Timepoint (day) Value: 7,10,12
  misc_feature: MA Experiment 20000269 PARAMETER Experiment Name: At_1mM_KNO3_L-vs-H_Roots_P Parameter: Tissue Value: Roots
  misc_feature: MA Experiment 20000269 PARAMETER Experiment Name: At_1mM_KNO3_L-vs-H_Roots_P Parameter: Treatment Value: 1mM KNO3 vs. 50mM KNO3
  misc_feature: MA Experiment ID: 20000286 Result: Up-regulated in Transcription
  misc_feature: MA Experiment 20000286 PARAMETER Experiment Name: At_Open_Flower_P Parameter: Age (day) Value: 21
  misc_feature: MA Experiment 20000286 PARAMETER Experiment Name: At_Open_Flower_P Parameter: Plant Line Value: WS
  misc_feature: MA Experiment 20000286 PARAMETER Experiment Name: At_Open_Flower_P Parameter: Tissue Value: Half Open vs. Whole Plant
  misc_feature: MA Experiment ID: 20000437 Result: Down-regulated in Transcription
  misc_feature: MA Experiment 20000437 PARAMETER Experiment Name: At_Drought_P Parameter: Age (day) Value: 8
  misc_feature: MA Experiment 20000437 PARAMETER Experiment Name: At_Drought_P Parameter: Organism Value: A. thaliana
  misc_feature: MA Experiment 20000437 PARAMETER Experiment Name: At_Drought_P Parameter: Plant Line Value: WS
  misc_feature: MA Experiment 20000437 PARAMETER Experiment Name: At_Drought_P Parameter: Timepoint (hr) Value: 24
  misc_feature: MA Experiment 20000437 PARAMETER Experiment Name: At_Drought_P Parameter: Tissue Value: Whole Plant
  misc_feature: MA Experiment 20000437 PARAMETER Experiment Name: At_Drought_P Parameter: Treatment Value: Drought vs. No Drought
  misc_feature: MA Experiment ID: 20000438 Result: Up-regulated in Transcription
  misc_feature: MA Experiment 20000438 PARAMETER Experiment Name: At_Shoots__P Parameter: Age (day) Value: 14
  misc_feature: MA Experiment 20000438 PARAMETER Experiment Name: At_Shoots__P Parameter: Tissue Value: Shoots vs. Whole Plant
  misc_feature: MA Experiment ID: 20000439 Result: Up-regulated in Transcription
  misc_feature: MA Experiment 20000439 PARAMETER Experiment Name: At_Roots__P Parameter: Age (day) Value: 14 vs. 21
  misc_feature: MA Experiment 20000439 PARAMETER Experiment Name: At_Roots__P Parameter: Organism Value: A. thaliana
  misc_feature: MA Experiment 20000439 PARAMETER Experiment Name: At_Roots__P Parameter: Tissue Value: Roots vs. Whole Plant
  misc_feature: MA Experiment ID: 20000527 Result: Down-regulated in Transcription
  misc_feature: MA Experiment 20000527 PARAMETER Experiment Name: At_10percent_PEG_P Parameter: Age (day) Value: 20
  misc_feature: MA Experiment 20000527 PARAMETER Experiment Name: At_10percent_PEG_P Parameter: Organism Value: A. thaliana
  misc_feature: MA Experiment 20000527 PARAMETER Experiment Name: At_10percent_PEG_P Parameter: Plant Line Value: WS
  misc_feature: MA Experiment 20000527 PARAMETER Experiment Name: At_10percent_PEG_P Parameter: Timepoint (day) Value: 20
  misc_feature: MA Experiment 20000527 PARAMETER Experiment Name: At_10percent_PEG_P Parameter: Tissue Value: Whole Plant
  misc_feature: MA Experiment 20000527 PARAMETER Experiment Name: At_10percent_PEG_P Parameter: Treatment Value: 10percent PEG vs. No Treatment
  misc_feature: MA Experiment ID: 20001248 Result: Down-regulated in Transcription
  misc_feature: MA Experiment 20001248 PARAMETER Experiment Name: At_Far-red-induction_P Parameter: Age (day) Value: 7
  misc_feature: MA Experiment 20001248 PARAMETER Experiment Name: At_Far-red-induction_P Parameter: Light Value: Far-red vs. White
  misc_feature: MA Experiment 20001248 PARAMETER Experiment Name: At_Far-red-induction_P Parameter: Organism Value: A. thaliana
  misc_feature: MA Experiment 20001248 PARAMETER Experiment Name: At_Far-red-induction_P Parameter: Plant Line Value: Columbia
  misc_feature: MA Experiment 20001248 PARAMETER Experiment Name: At_Far-red-induction_P Parameter: Timepoint (hr) Value: 4
  misc_feature: MA Experiment 20001248 PARAMETER Experiment Name: At_Far-red-induction_P Parameter: Tissue Value: Whole Plant
  misc_feature: MA Experiment ID: 20001450 Result: Down-regulated in Transcription
  misc_feature: MA Experiment 20001450 PARAMETER Experiment Name: At_Far-red-induction_P Parameter: Age (day) Value: 7
  misc_feature: MA Experiment 20001450 PARAMETER Experiment Name: At_Far-red-induction_P Parameter: Light Value: Far-red vs. White
  misc_feature: MA Experiment 20001450 PARAMETER Experiment Name: At_Far-red-induction_P Parameter: Organism Value: A. thaliana
  misc_feature: MA Experiment 20001450 PARAMETER Experiment Name: At_Far-red-induction_P Parameter: Plant Line Value: Columbia
  misc_feature: MA Experiment 20001450 PARAMETER Experiment Name: At_Far-red-induction_P Parameter: Timepoint (hr) Value: 8
  misc_feature: MA Experiment 20001450 PARAMETER Experiment Name: At_Far-red-induction_P Parameter: Tissue Value: Whole Plant
  misc_feature: MA Experiment ID: 20001556 Result: Up-regulated in Transcription
  misc_feature: MA Experiment 20001556 PARAMETER Experiment Name: At_Drought_Soil_Dry_P Parameter: Age (day) Value: 26
  misc_feature: MA Experiment 20001556 PARAMETER Experiment Name: At_Drought_Soil_Dry_P Parameter: Organism Value: A. thaliana
  misc_feature: MA Experiment 20001556 PARAMETER Experiment Name: At_Drought_Soil_Dry_P Parameter: Plant Line Value: WS
  misc_feature: MA Experiment 20001556 PARAMETER Experiment Name: At_Drought_Soil_Dry_P Parameter: Post Timepoint (hr) Value: None
  misc_feature: MA Experiment 20001556 PARAMETER Experiment Name: At_Drought_Soil_Dry_P Parameter: Post-Treatment Value: None
  misc_feature: MA Experiment 20001556 PARAMETER Experiment Name: At_Drought_Soil_Dry_P Parameter: Timepoint (day) Value: 12
  misc_feature: MA Experiment 20001556 PARAMETER Experiment Name: At_Drought_Soil_Dry_P Parameter: Treatment Value: Drought vs. No Drought
  misc_feature: MA Experiment ID: 20001557 Result: Up-regulated in Transcription
  misc_feature: MA Experiment 20001557 PARAMETER Experiment Name: At_Drought_Soil_Dry_P Parameter: Age (day) Value: 27
  misc_feature: MA Experiment 20001557 PARAMETER Experiment Name: At_Drought_Soil_Dry_P Parameter: Organism Value: A. thaliana
  misc_feature: MA Experiment 20001557 PARAMETER Experiment Name: At_Drought_Soil_Dry_P Parameter: Plant Line Value: WS
  misc_feature: MA Experiment 20001557 PARAMETER Experiment Name: At_Drought_Soil_Dry_P Parameter: Post Timepoint (hr) Value: 3
  misc_feature: MA Experiment 20001557 PARAMETER Experiment Name: At_Drought_Soil_Dry_P Parameter: Post-Treatment Value: Re-Water vs. No Drought
  misc_feature: MA Experiment 20001557 PARAMETER Experiment Name: At_Drought_Soil_Dry_P Parameter: Timepoint (day) Value: 13
  misc_feature: MA Experiment 20001557 PARAMETER Experiment Name: At_Drought_Soil_Dry_P Parameter: Treatment Value: Drought vs. No Drought
acacttaaaagtcatctttcaacccaattatctctatcctttctcctgagttacatagctatgtcgtcaagagctcaccctgtggacggaagtccggcgacggacggtggacatgttccgatgaaaccttcacccactcggcataaagttggaatcccaccaaagcaaaacatgttcaaggatttcatgtacacattcaaagaaactttctttcatgatgatcctcttagggattttaaggatcagcctaagtctaagcagtttatgctcggtctccaatccgtcttcccggtcttcgattggggacgtaactacactttcaagaagttccgaggtgatctcatctccggtttaaccattgcaagtctctgcattcctcaggatattggatacgctaagttggcgaatcttgatcccaaatacggtttatattcgagttttgttcctccattggtgtatgcttgtatgggaagttctagggatatagcaataggacctgtcgctgtggtttcgctgttgctaggcacattgcttcgagctgagattgatccaaacacaagtccagatgaatatctccgccttgccttcactgctacgtttttcgccggtataaccgaagcagcccttggattcttcagattaggattcttgatcgatttcctttcccacgcggctgtggttggcttcatgggcggcgcagccatcactatcgctcttcagcagcttaaaggcttcctcgggatcaagaaattcaccaagaaaactgatattatttctgttcttgaatccgttttcaaagcagctcatcacggctggaattggcagactatactcattggtgcatcattcttgaccttccttctcacgtctaagatcattgggaagaagagcaagaaactattctgggtaccagctattgcgccattgatatcagttatcgtttccaccttctttgtctacataacccgagccgacaaacaaggagtccaaatcgtgaaacaccttgaccaaggaatcaacccttcctcgttccatctaatctacttcactggtgataaccttgctaagggcatccgcatcggtgtagtcgctggcatggtcgctttaacagaagctgtagcgattggaagaacctttgctgcaatgaaagactaccaaatcgacggtaacaaagagatggtagcattaggtatgatgaacgtagttggatcgatgtcttcttgctacgtagctaccggatctttctcaagatcagctgtcaatttcatggctggatgtcaaacagcggtttcaaacatcataatgtcaattgttgttctcttgacattgctcttccttactcctctcttcaagtacactccaaacgccatcctcgcagctatcatcatcaacgctgtgattcctttgatcgatatccaagctgctattttgatcttcaaggttgataagctcgatttcatcgcctgtattggagcattctttggcgtcatctttgtttctgttgagatcggacttcttattgccgtctcgatctcgtttgctaagatcctcttgcaagtaacaagacctagaactgcagttctcggaaatattccaagaacttcggtttacagaaatattcaacagtatcctgaagccactatggttccaggggttcttactattcgtgttgactccgccatttacttctccaactcaaattatgttagagaaaggatccagagatggctacatgaggaagaagaaaaggtaaaagcagcaagcctacctaggattcagtttctcatcatcgaaatgtcacctgttacggacatcgatacaagtggtattcacgcattagaagacttatacaagtctctccagaaaagagacattcagttgattctggcgaatcctggaccgttggtgataggcaagctacacttgtcgcactttgccgacatgttaggacaagacaatatctatctaacggtggctgatgccgtcgaggcttgctgtccaaaactctccaacgaggtctgaaatttacaagaaagaagaagaagaagaaaatgaagataatgacgaagaagaagaaagatatgctcttttaaatgttgtaacagtagagttaagaaagtgattgtatttctttggaccctttctttatgattcttct

SEQ ID NO: 90907 - protein, 673 aa, Arabidopsis thaliana
  peptide (1)..(673): Ceres Seq. ID no. 12725692
  misc_feature (209)..(520): Pfam Name: Sulfate transporter family Pfam Description: Sulfate transporter family
  misc_feature (21)..(673): Homolog of NCBI NO: 18395079 NR Description: high affinity sulphate transporter, putative; id: At1g22150.1, supported by cDNA: gi_10716804 [Arabidopsis >gi|10716805|dbj|BAB16410.1| sulfate tansporter Sultr1;3
  misc_feature (272)..(673): Homolog of NCBI NO: 25310832 NR Description: protein F2E2.22 [imported] - Arabidopsis thaliana
  misc_feature (21)..(271): Homolog of NCBI NO: 25310832 NR Description: protein F2E2.22 [imported] - Arabidopsis thaliana
  misc_feature (44)..(673): Homolog of NCBI NO: 13487717 NR Description: sulfate transporter 2 [Lycopersicon esculentum]
  misc_feature (31)..(672): Homolog of NCBI NO: 16197732 NR Description: sulfate transporter [Brassica napus]
  misc_feature (45)..(669): Homolog of NCBI NO: 14484936 NR Description: high affinity sulfate transporter [Lycopersicon
  misc_feature (45)..(669): Homolog of NCBI NO: 13487715 NR Description: sulfate transporter 1 [Lycopersicon esculentum]
  misc_feature (45)..(669): Homolog of NCBI NO: 11907976 NR Description: high affinity sulfate transporter type 1 [Solanum
  misc_feature (6)..(668): Homolog of NCBI NO: 1711615 NR Description: High affinity sulphate transporter 1
  misc_feature (48)..(665): Homolog of NCBI NO: 11279064 NR Description: hypothetical protein [imported] - Arabidopsis
TLKSHLSTQLSLSFLLSYIAMSSRAHPVDGSPATDGGHVPMKPSPTRHKVGIPPKQNMFKDFMYTFKETFFHDDPLRDFKDQPKSKQFMLGLQSVFPVFDWGRNYTFKKFRGDLISGLTIASLCIPQDIGYAKLANLDPKYGLYSSFVPPLVYACMGSSRDIAIGPVAVVSLLLGTLLRAEIDPNTSPDEYLRLAFTATFFAGITEAALGFFRLGFLIDFLSHAAVVGFMGGAAITIALQQLKGFLGIKKFTKKTDIISVLESVFKAAHHGWNWQTILIGASFLTFLLTSKIIGKKSKKLFWVPAIAPLISVIVSTFFVYITRADKQGVQIVKHLDQGINPSSFHLIYFTGDNLAKGIRIGVVAGMVALTEAVAIGRTFAAMKDYQIDGNKEMVALGMMNVVGSMSSCYVATGSFSRSAVNFMAGCQTAVSNIIMSIVVLLTLLFLTPLFKYTPNAILAAIIINAVIPLIDIQAAILIFKVDKLDFIACIGAFFGVIFVSVEIGLLIAVSISFAKILLQVTRPRTAVLGNIPRTSVYRNIQQYPEATMVPGVLTIRVDSAIYFSNSNYVRERIQRWLHEEEEKVKAASLPRIQFLIIEMSPVTDIDTSGIHALEDLYKSLQKRDIQLILANPGPLVIGKLHLSHFADMLGQDNIYLTVADAVEACCPKLSNEV

SEQ ID NO: 90908 - protein, 653 aa, Arabidopsis thaliana
  peptide (1)..(653): Ceres Seq. ID no. 12725693
  misc_feature (189)..(500): Pfam Name: Sulfate transporter family Pfam Description: Sulfate transporter family
  misc_feature (1)..(653): Homolog of NCBI NO: 18395079 NR Description: high affinity sulphate transporter, putative; id: At1g22150.1, supported by cDNA: gi_10716804 [Arabidopsis >gi|10716805|dbj|BAB16410.1| sulfate tansporter Sultr1;3
  misc_feature (252)..(653): Homolog of NCBI NO: 25310832 NR Description: protein F2E2.22 [imported] - Arabidopsis thaliana
  misc_feature (1)..(251): Homolog of NCBI NO: 25310832 NR Description: protein F2E2.22 [imported] - Arabidopsis thaliana
  misc_feature (24)..(653): Homolog of NCBI NO: 13487717 NR Description: sulfate transporter 2 [Lycopersicon esculentum]
  misc_feature (11)..(652): Homolog of NCBI NO: 16197732 NR Description: sulfate transporter [Brassica napus]
  misc_feature (25)..(649): Homolog of NCBI NO: 14484936 NR Description: high affinity sulfate transporter [Lycopersicon
  misc_feature (25)..(649): Homolog of NCBI NO: 13487715 NR Description: sulfate transporter 1 [Lycopersicon esculentum]
  misc_feature (25)..(649): Homolog of NCBI NO: 11907976 NR Description: high affinity sulfate transporter type 1 [Solanum
  misc_feature (1)..(648): Homolog of NCBI NO: 1711615 NR Description: High affinity sulphate transporter 1
  misc_feature (28)..(645): Homolog of NCBI NO: 11279064 NR Description: hypothetical protein [imported] - Arabidopsis
MSSRAHPVDGSPATDGGHVPMKPSPTRHKVGIPPKQNMFKDFMYTFKETFFHDDPLRDFKDQPKSKQFMLGLQSVFPVFDWGRNYTFKKFRGDLISGLTIASLCIPQDIGYAKLANLDPKYGLYSSFVPPLVYACMGSSRDIAIGPVAVVSLLLGTLLRAEIDPNTSPDEYLRLAFTATFFAGITEAALGFFRLGFLIDFLSHAAVVGFMGGAAITIALQQLKGFLGIKKFTKKTDIISVLESVFKAAHHGWNWQTILIGASFLTFLLTSKIIGKKSKKLFWVPAIAPLISVIVSTFFVYITRADKQGVQIVKHLDQGINPSSFHLIYFTGDNLAKGIRIGVVAGMVALTEAVAIGRTFAAMKDYQIDGNKEMVALGMMNVVGSMSSCYVATGSFSRSAVNFMAGCQTAVSNIIMSIVVLLTLLFLTPLFKYTPNAILAAIIINAVIPLIDIQAAILIFKVDKLDFIACIGAFFGVIFVSVEIGLLIAVSISFAKILLQVTRPRTAVLGNIPRTSVYRNIQQYPEATMVPGVLTIRVDSAIYFSNSNYVRERIQRWLHEEEEKVKAASLPRIQFLIIEMSPVTDIDTSGIHALEDLYKSLQKRDIQLILANPGPLVIGKLHLSHFADMLGQDNIYLTVADAVEACCPKLSNEV

SEQ ID NO: 90909 - protein, 633 aa, Arabidopsis thaliana
  peptide (1)..(633): Ceres Seq. ID no. 12725694
  misc_feature (169)..(480): Pfam Name: Sulfate transporter family Pfam Description: Sulfate transporter family
  misc_feature (1)..(633): Homolog of NCBI NO: 18395079 NR Description: high affinity sulphate transporter, putative; id: At1g22150.1, supported by cDNA: gi_10716804 [Arabidopsis >gi|10716805|dbj|BAB16410.1| sulfate tansporter Sultr1;3
  misc_feature (232)..(633): Homolog of NCBI NO: 25310832 NR Description: protein F2E2.22 [imported] - Arabidopsis thaliana
  misc_feature (1)..(231): Homolog of NCBI NO: 25310832 NR Description: protein F2E2.22 [imported] - Arabidopsis thaliana
  misc_feature (4)..(633): Homolog of NCBI NO: 13487717 NR Description: sulfate transporter 2 [Lycopersicon esculentum]
  misc_feature (1)..(632): Homolog of NCBI NO: 16197732 NR Description: sulfate transporter [Brassica napus]
  misc_feature (5)..(629): Homolog of NCBI NO: 14484936 NR Description: high affinity sulfate transporter [Lycopersicon
  misc_feature (5)..(629): Homolog of NCBI NO: 13487715 NR Description: sulfate transporter 1 [Lycopersicon esculentum]
  misc_feature (5)..(629): Homolog of NCBI NO: 11907976 NR Description: high affinity sulfate transporter type 1 [Solanum
  misc_feature (1)..(628): Homolog of NCBI NO: 1711615 NR Description: High affinity sulphate transporter 1
  misc_feature (8)..(625): Homolog of NCBI NO: 11279064 NR Description: hypothetical protein [imported] - Arabidopsis
MKPSPTRHKVGIPPKQNMFKDFMYTFKETFFHDDPLRDFKDQPKSKQFMLGLQSVFPVFDWGRNYTFKKFRGDLISGLTIASLCIPQDIGYAKLANLDPKYGLYSSFVPPLVYACMGSSRDIAIGPVAVVSLLLGTLLRAEIDPNTSPDEYLRLAFTATFFAGITEAALGFFRLGFLIDFLSHAAVVGFMGGAAITIALQQLKGFLGIKKFTKKTDIISVLESVFKAAHHGWNWQTILIGASFLTFLLTSKIIGKKSKKLFWVPAIAPLISVIVSTFFVYITRADKQGVQIVKHLDQGINPSSFHLIYFTGDNLAKGIRIGVVAGMVALTEAVAIGRTFAAMKDYQIDGNKEMVALGMMNVVGSMSSCYVATGSFSRSAVNFMAGCQTAVSNIIMSIVVLLTLLFLTPLFKYTPNAILAAIIINAVIPLIDIQAAILIFKVDKLDFIACIGAFFGVIFVSVEIGLLIAVSISFAKILLQVTRPRTAVLGNIPRTSVYRNIQQYPEATMVPGVLTIRVDSAIYFSNSNYVRERIQRWLHEEEEKVKAASLPRIQFLIIEMSPVTDIDTSGIHALEDLYKSLQKRDIQLILANPGPLVIGKLHLSHFADMLGQDNIYLTVADAVEACCPKLSNEV

SEQ ID NO: 90910 - DNA, 1588 bp, Arabidopsis thaliana
  misc_feature (1)..(1588): Ceres Seq. ID no. 12725707
  misc_feature: MA Experiment ID: 20000166 Result: Up-regulated in Transcription
  misc_feature: MA Experiment 20000166 PARAMETER Experiment Name: At_100uM_ABA_P Parameter: Age (day) Value: 14
  misc_feature: MA Experiment 20000166 PARAMETER Experiment Name: At_100uM_ABA_P Parameter: Organism Value: A. thaliana
  misc_feature: MA Experiment 20000166 PARAMETER Experiment Name: At_100uM_ABA_P Parameter: Plant Line Value: WS
  misc_feature: MA Experiment 20000166 PARAMETER Experiment Name: At_100uM_ABA_P Parameter: Timepoint (hr) Value: 1
  misc_feature: MA Experiment 20000166 PARAMETER Experiment Name: At_100uM_ABA_P Parameter: Tissue Value: Aerial
  misc_feature: MA Experiment 20000166 PARAMETER Experiment Name: At_100uM_ABA_P Parameter: Treatment Value: 100uM ABA vs. No Treatment
  misc_feature: MA Experiment ID: 20000173 Result: Up-regulated in Transcription
  misc_feature: MA Experiment 20000173 PARAMETER Experiment Name: At_42deg_Heat_P Parameter: Age (day) Value: 14
  misc_feature: MA Experiment 20000173 PARAMETER Experiment Name: At_42deg_Heat_P Parameter: Organism Value: A. thaliana
  misc_feature: MA Experiment 20000173 PARAMETER Experiment Name: At_42deg_Heat_P Parameter: Plant Line Value: WS
  misc_feature: MA Experiment 20000173 PARAMETER Experiment Name: At_42deg_Heat_P Parameter: Temperature (deg C) Value: 42 vs. 22
  misc_feature: MA Experiment 20000173 PARAMETER Experiment Name: At_42deg_Heat_P Parameter: Timepoint (hr) Value: 6
  misc_feature: MA Experiment 20000173 PARAMETER Experiment Name: At_42deg_Heat_P Parameter: Tissue Value: Aerial
  misc_feature: MA Experiment ID: 20000234 Result: Down-regulated in Transcription
  misc_feature: MA Experiment 20000234 PARAMETER Experiment Name: At_Siliques_P Parameter: Age (day) Value: 21
  misc_feature: MA Experiment 20000234 PARAMETER Experiment Name: At_Siliques_P Parameter: Organism Value: A. thaliana
  misc_feature: MA Experiment 20000234 PARAMETER Experiment Name: At_Siliques_P Parameter: Plant Line Value: WS
  misc_feature: MA Experiment 20000234 PARAMETER Experiment Name: At_Siliques_P Parameter: Tissue Value: Less Than 5mm Siliques vs. Whole Plant
  misc_feature: MA Experiment ID: 20000264 Result: Down-regulated in Transcription
  misc_feature: MA Experiment 20000264 PARAMETER Experiment Name: At_Open_Flower_P Parameter: Age (day) Value: 21
  misc_feature: MA Experiment 20000264 PARAMETER Experiment Name: At_Open_Flower_P Parameter: Plant Line Value: WS
  misc_feature: MA Experiment 20000264 PARAMETER Experiment Name: At_Open_Flower_P Parameter: Tissue Value: Open Flower vs. Whole Plant
  misc_feature: MA Experiment ID: 20000267 Result: Up-regulated in Transcription
  misc_feature: MA Experiment 20000267 PARAMETER Experiment Name: At_Drought_P Parameter: Age (day) Value: 7
  misc_feature: MA Experiment 20000267 PARAMETER Experiment Name: At_Drought_P Parameter: Organism Value: A. thaliana
  misc_feature: MA Experiment 20000267 PARAMETER Experiment Name: At_Drought_P Parameter: Plant Line Value: WS
  misc_feature: MA Experiment 20000267 PARAMETER Experiment Name: At_Drought_P Parameter: Timepoint (hr) Value: 6
  misc_feature: MA Experiment 20000267 PARAMETER Experiment Name: At_Drought_P Parameter: Tissue Value: Whole Plant
  misc_feature: MA Experiment 20000267 PARAMETER Experiment Name: At_Drought_P Parameter: Treatment Value: Drought vs. No Drought
  misc_feature: MA Experiment ID: 20000268 Result: Up-regulated in Transcription
  misc_feature: MA Experiment 20000268 PARAMETER Experiment Name: At_100mM_NaCl__P Parameter: Age (day) Value: 14
  misc_feature: MA Experiment 20000268 PARAMETER Experiment Name: At_100mM_NaCl__P Parameter: Organism Value: A. thaliana
  misc_feature: MA Experiment 20000268 PARAMETER Experiment Name: At_100mM_NaCl__P Parameter: Plant Line Value: WS
  misc_feature: MA Experiment 20000268 PARAMETER Experiment Name: At_100mM_NaCl__P Parameter: Timepoint (hr) Value: 6
  misc_feature: MA Experiment 20000268 PARAMETER Experiment Name: At_100mM_NaCl__P Parameter: Tissue Value: Whole Plant
  misc_feature: MA Experiment 20000268 PARAMETER Experiment Name: At_100mM_NaCl__P Parameter: Treatment Value: 100mM NaCl vs. No Treatment
  misc_feature: MA Experiment ID: 20000286 Result: Down-regulated in Transcription
  misc_feature: MA Experiment 20000286 PARAMETER Experiment Name: At_Open_Flower_P Parameter: Age (day) Value: 21
  misc_feature: MA Experiment 20000286 PARAMETER Experiment Name: At_Open_Flower_P Parameter: Plant Line Value: WS
  misc_feature: MA Experiment 20000286 PARAMETER Experiment Name: At_Open_Flower_P Parameter: Tissue Value: Half Open vs. Whole Plant
  misc_feature: MA Experiment ID: 20000436 Result: Up-regulated in Transcription
  misc_feature: MA Experiment 20000436 PARAMETER Experiment Name: At_Drought_P Parameter: Age (day) Value: 7
  misc_feature: MA Experiment 20000436 PARAMETER Experiment Name: At_Drought_P Parameter: Organism Value: A. thaliana
  misc_feature: MA Experiment 20000436 PARAMETER Experiment Name: At_Drought_P Parameter: Plant Line Value: WS
  misc_feature: MA Experiment 20000436 PARAMETER Experiment Name: At_Drought_P Parameter: Timepoint (hr) Value: 12
  misc_feature: MA Experiment 20000436 PARAMETER Experiment Name: At_Drought_P Parameter: Tissue Value: Whole Plant
  misc_feature: MA Experiment 20000436 PARAMETER Experiment Name: At_Drought_P Parameter: Treatment Value: Drought vs. No Drought
  misc_feature: MA Experiment ID: 20000437 Result: Up-regulated in Transcription
  misc_feature: MA Experiment 20000437 PARAMETER Experiment Name: At_Drought_P Parameter: Age (day) Value: 8
  misc_feature: MA Experiment 20000437 PARAMETER Experiment Name: At_Drought_P Parameter: Organism Value: A. thaliana
  misc_feature: MA Experiment 20000437 PARAMETER Experiment Name: At_Drought_P Parameter: Plant Line Value: WS
  misc_feature: MA Experiment 20000437 PARAMETER Experiment Name: At_Drought_P Parameter: Timepoint (hr) Value: 24
  misc_feature: MA Experiment 20000437 PARAMETER Experiment Name: At_Drought_P Parameter: Tissue Value: Whole Plant
  misc_feature: MA Experiment 20000437 PARAMETER Experiment Name: At_Drought_P Parameter: Treatment Value: Drought vs. No Drought
  misc_feature: MA Experiment ID: 20000573 Result: Down-regulated in Transcription
  misc_feature: MA Experiment 20000573 PARAMETER Experiment Name: At_100uM_ABA_Mutants__P Parameter: Organism Value: A. thaliana
  misc_feature: MA Experiment 20000573 PARAMETER Experiment Name: At_100uM_ABA_Mutants__P Parameter: Plant Line Value: CS22 vs. Ler wt
  misc_feature: MA Experiment 20000573 PARAMETER Experiment Name: At_100uM_ABA_Mutants__P Parameter: Timepoint (hr) Value: N/A
  misc_feature: MA Experiment 20000573 PARAMETER Experiment Name: At_100uM_ABA_Mutants__P Parameter: Tissue Value: Whole Plant
  misc_feature: MA Experiment 20000573 PARAMETER Experiment Name: At_100uM_ABA_Mutants__P Parameter: Treatment Value: None
  misc_feature: MA Experiment ID: 20001554 Result: Up-regulated in Transcription
  misc_feature: MA Experiment 20001554 PARAMETER Experiment Name: At_Drought_Soil_Dry_P Parameter: Age (day) Value: 21
  misc_feature: MA Experiment 20001554 PARAMETER Experiment Name: At_Drought_Soil_Dry_P Parameter: Organism Value: A. thaliana
  misc_feature: MA Experiment 20001554 PARAMETER Experiment Name: At_Drought_Soil_Dry_P Parameter: Plant Line Value: WS
  misc_feature: MA Experiment 20001554 PARAMETER Experiment Name: At_Drought_Soil_Dry_P Parameter: Post Timepoint (hr) Value: None
  misc_feature: MA Experiment 20001554 PARAMETER Experiment Name: At_Drought_Soil_Dry_P Parameter: Post-Treatment Value: None
  misc_feature: MA Experiment 20001554 PARAMETER Experiment Name: At_Drought_Soil_Dry_P Parameter: Timepoint (day) Value: 7
  misc_feature: MA Experiment 20001554 PARAMETER Experiment Name: At_Drought_Soil_Dry_P Parameter: Treatment Value: Drought vs. No Drought
  misc_feature: MA Experiment ID: 20001555 Result: Up-regulated in Transcription
  misc_feature: MA Experiment 20001555 PARAMETER Experiment Name: At_Drought_Soil_Dry_P Parameter: Age (day) Value: 24
  misc_feature: MA Experiment 20001555 PARAMETER Experiment Name: At_Drought_Soil_Dry_P Parameter: Organism Value: A. thaliana
  misc_feature: MA Experiment 20001555 PARAMETER Experiment Name: At_Drought_Soil_Dry_P Parameter: Plant Line Value: WS
  misc_feature: MA Experiment 20001555 PARAMETER Experiment Name: At_Drought_Soil_Dry_P Parameter: Post Timepoint (hr) Value: None
  misc_feature: MA Experiment 20001555 PARAMETER Experiment Name: At_Drought_Soil_Dry_P Parameter: Post-Treatment Value: None
  misc_feature: MA Experiment 20001555 PARAMETER Experiment Name: At_Drought_Soil_Dry_P Parameter: Timepoint (day) Value: 10
  misc_feature: MA Experiment 20001555 PARAMETER Experiment Name: At_Drought_Soil_Dry_P Parameter: Treatment Value: Drought vs. No Drought
  misc_feature: MA Experiment ID: 20001558 Result: Down-regulated in Transcription
  misc_feature: MA Experiment 20001558 PARAMETER Experiment Name: At_Drought_Soil_Dry_P Parameter: Age (day) Value: 27
  misc_feature: MA Experiment 20001558 PARAMETER Experiment Name: At_Drought_Soil_Dry_P Parameter: Organism Value: A. thaliana
  misc_feature: MA Experiment 20001558 PARAMETER Experiment Name: At_Drought_Soil_Dry_P Parameter: Plant Line Value: WS
  misc_feature: MA Experiment 20001558 PARAMETER Experiment Name: At_Drought_Soil_Dry_P Parameter: Post Timepoint (hr) Value: 6
  misc_feature: MA Experiment 20001558 PARAMETER Experiment Name: At_Drought_Soil_Dry_P Parameter: Post-Treatment Value: Re-Water vs. No Drought
  misc_feature: MA Experiment 20001558 PARAMETER Experiment Name: At_Drought_Soil_Dry_P Parameter: Timepoint (day) Value: 13
  misc_feature: MA Experiment 20001558 PARAMETER Experiment Name: At_Drought_Soil_Dry_P Parameter: Treatment Value: Drought vs. No Drought
  misc_feature: MA Experiment ID: 20001905 Result: Up-regulated in Transcription
  misc_feature: MA Experiment 20001905 PARAMETER Experiment Name: At_Drought_Reproduction_P Parameter: Age (day) Value: 40
  misc_feature: MA Experiment 20001905 PARAMETER Experiment Name: At_Drought_Reproduction_P Parameter: Organism Value: A. thaliana
  misc_feature: MA Experiment 20001905 PARAMETER Experiment Name: At_Drought_Reproduction_P Parameter: Plant Line Value: WS
  misc_feature: MA Experiment 20001905 PARAMETER Experiment Name: At_Drought_Reproduction_P Parameter: Timepoint (day) Value: 10
  misc_feature: MA Experiment 20001905 PARAMETER Experiment Name: At_Drought_Reproduction_P Parameter: Tissue Value: Rosettes
  misc_feature: MA Experiment 20001905 PARAMETER Experiment Name: At_Drought_Reproduction_P Parameter: Treatment Value: Drought vs. No Drought
  misc_feature: MA Experiment ID: 20001911 Result: Up-regulated in Transcription
  misc_feature: MA Experiment 20001911 PARAMETER Experiment Name: At_Drought_Reproduction_P Parameter: Age (day) Value: 40
  misc_feature: MA Experiment 20001911 PARAMETER Experiment Name: At_Drought_Reproduction_P Parameter: Organism Value: A. thaliana
  misc_feature: MA Experiment 20001911 PARAMETER Experiment Name: At_Drought_Reproduction_P Parameter: Plant Line Value: WS
  misc_feature: MA Experiment 20001911 PARAMETER Experiment Name: At_Drought_Reproduction_P Parameter: Timepoint (day) Value: 10
  misc_feature: MA Experiment 20001911 PARAMETER Experiment Name: At_Drought_Reproduction_P Parameter: Tissue Value: Flowers
  misc_feature: MA Experiment 20001911 PARAMETER Experiment Name: At_Drought_Reproduction_P Parameter: Treatment Value: Drought vs. No Drought
aaccacacaaagcttgttcttctccttccttctccaatttcgtaagctcaaagatttcgatttcgattttgattattgccaaaggtttaaagatggatattttcgacaactctgatcttgaataccttgttgatgaatttcacgctgatttcgatgatgatgagccctttggagaggttgatgtcaccagtgagtctgattccgatttcatggactccgattttgatttcgagctgagtgagagtaagacgaacaatgaaacatcagcgttagaagctaggaatggaaaagatattcaagggattccatgggagagcttgaattacacgagggatagataccgtgagaatagattgctgcactataaaaactttgagagtctgtttcgatccagagaagagcttgataaggaatgcttgcaagtagagaaaggaaagaacttttatgactttcagttcaatacaaggcttgtcaagtccacaatagcgcattttcagctgaggaacttggtatgggcaacatcaaagcacgatgtgtatttcatgaacaactactctctcatgcactggtcatctttgttgcaaaggggcaaagaagtacttaatgtggcaaagcccattgttccttcaatgaagcagcatggatcgttgtcacagtctgtatcaagagtccagataagcaccatggcagttaaagacgatttgaagttgcgggagggttccaaggagagcttatctgtaagaaaatcaacgaacctgaggttgctttctgcactaaactaacatcagctgataacgacatcaccaattcggttgacatctacaacgcacctagtggctcgttaagggttatgaccgcgaacaatgactgtactgtccggctatttgatgccacaaactttgccttgctcaacagatttgcctttcactggtctgtaaataacatctccaccagtccagatggtaagctagtggctgttctaggagacagtcctgagtgcttactagcagataccggatctggaaaagtgatccacggactcgaaggccatctcgactactcgttttcatcagcatggcacccaaacggtcaaatcttagccacgggtaaccaagacacaacctgtagactatgggacgtaaggaacctgtctcaatcactcaaagtcttgaaaggaaacatgggagctatcagagccttgaggttcacgtctgatggacggttcttagccatggctgagccagcggactttgtacacttgtttgacacggaagctggttacagtcagtgtcaagagattgatctgtttggagaaatagcgggaatctcgtttagccccgacacggaggcactgttcgtgggagtagctgatcgtacgtacggcagcttgttggagtttaacaggaagcgaaaccactcgtatgttgattccatattctgatctgactccaatcgttagaagcaaattaaggagctatatgtatgtgtgagattatggttgtagtggctgttggagggattaaaagtcgttgtttttgtgactttccctttgtcatgtttatgtggttttaggaattccatgtttggt

SEQ ID NO: 90911 - protein, 259 aa, Arabidopsis thaliana
  peptide (1)..(259): Ceres Seq. ID no. 12725708
  misc_feature (31)..(248): Homolog of NCBI NO: 13937195 NR Description: At1g78070/F28K19_28 [Arabidopsis thaliana]
  misc_feature (28)..(165): Homolog of NCBI NO: 25405023 NR Description: protein F28K19.28 [imported] - Arabidopsis >gi|6573770|gb|AAF17690.1|AC009243_17 F28K19.28 [Arabidopsis
  misc_feature (165)..(245): Homolog of NCBI NO: 25405023 NR Description: protein F28K19.28 [imported] - Arabidopsis >gi|6573770|gb|AAF17690.1|AC009243_17 F28K19.28 [Arabidopsis
  misc_feature (71)..(239): Homolog of NCBI NO: 18400003 NR Description: expressed protein; protein id: At1g36070.1,
  misc_feature (71)..(239): Homolog of NCBI NO: 12324715 NR Description: unknown protein; 4584-7806 [Arabidopsis thaliana]
  misc_feature (86)..(239): Homolog of NCBI NO: 21553502 NR Description: unknown [Arabidopsis thaliana]
  misc_feature (71)..(171): Homolog of NCBI NO: 6598592 NR Description: F5J5.6 [Arabidopsis thaliana]
  misc_feature (166)..(239): Homolog of NCBI NO: 6598592 NR Description: F5J5.6 [Arabidopsis thaliana]
  misc_feature (31)..(244): Homolog of NCBI NO: 18423837 NR Description: WD-repeat protein-like; protein id: At5g56190.1,
  misc_feature (40)..(244): Homolog of NCBI NO: 30696707 NR Description: WD-40 repeat protein family [Arabidopsis thaliana]
PHKACSSPSFSNFVSSKISISILIIAKGLKMDIFDNSDLEYLVDEFHADFDDDEPFGEVDVTSESDSDFMDSDFDFELSESKTNNETSALEARNGKDIQGIPWESLNYTRDRYRENRLLHYKNFESLFRSREELDKECLQVEKGKNFYDFQFNTRLVKSTIAHFQLRNLVWATSKHDVYFMNNYSLMHWSSLLQRGKEVLNVAKPIVPSMKQHGSLSQSVSRVQISTMAVKDDLKLREGSKESLSVRKSTNLRLLSALN

SEQ ID NO: 90912 - protein, 229 aa, Arabidopsis thaliana
  peptide (1)..(229): Ceres Seq. ID no. 12725709
  misc_feature (1)..(218): Homolog of NCBI NO: 13937195 NR Description: At1g78070/F28K19_28 [Arabidopsis thaliana]
  misc_feature (1)..(135): Homolog of NCBI NO: 25405023 NR Description: protein F28K19.28 [imported] - Arabidopsis >gi|6573770|gb|AAF17690.1|AC009243_17 F28K19.28 [Arabidopsis
  misc_feature (135)..(215): Homolog of NCBI NO: 25405023 NR Description: protein F28K19.28 [imported] - Arabidopsis >gi|6573770|gb|AAF17690.1|AC009243_17 F28K19.28 [Arabidopsis
  misc_feature (41)..(209): Homolog of NCBI NO: 18400003 NR Description: expressed protein; protein id: At1g36070.1,
  misc_feature (41)..(209): Homolog of NCBI NO: 12324715 NR Description: unknown protein; 4584-7806 [Arabidopsis thaliana]
  misc_feature (56)..(209): Homolog of NCBI NO: 21553502 NR Description: unknown [Arabidopsis thaliana]
  misc_feature (41)..(141): Homolog of NCBI NO: 6598592 NR Description: F5J5.6 [Arabidopsis thaliana]
  misc_feature (136)..(209): Homolog of NCBI NO: 6598592 NR Description: F5J5.6 [Arabidopsis thaliana]
  misc_feature (1)..(214): Homolog of NCBI NO: 18423837 NR Description: WD-repeat protein-like; protein id: At5g56190.1,
  misc_feature (10)..(214): Homolog of NCBI NO: 30696707 NR Description: WD-40 repeat protein family [Arabidopsis thaliana]
MDIFDNSDLEYLVDEFHADFDDDEPFGEVDVTSESDSDFMDSDFDFELSESKTNNETSALEARNGKDIQGIPWESLNYTRDRYRENRLLHYKNFESLFRSREELDKECLQVEKGKNFYDFQFNTRLVKSTIAHFQLRNLVWATSKHDVYFMNNYSLMHWSSLLQRGKEVLNVAKPIVPSMKQHGSLSQSVSRVQISTMAVKDDLKLREGSKESLSVRKSTNLRLLSALN

SEQ ID NO: 90913 - protein, 196 aa, Arabidopsis thaliana
  peptide (1)..(196): Ceres Seq. ID no. 12725710
  misc_feature (1)..(196): Homolog of NCBI NO: 13937195 NR Description: At1g78070/F28K19_28 [Arabidopsis thaliana]
  misc_feature (1)..(196): Homolog of NCBI NO: 25405023 NR Description: protein F28K19.28 [imported] - Arabidopsis >gi|6573770|gb|AAF17690.1|AC009243_17 F28K19.28 [Arabidopsis
  misc_feature (1)..(196): Homolog of NCBI NO: 18400003 NR Description: expressed protein; protein id: At1g36070.1,
  misc_feature (1)..(196): Homolog of NCBI NO: 12324715 NR Description: unknown protein; 4584-7806 [Arabidopsis thaliana]
  misc_feature (1)..(196): Homolog of NCBI NO: 21553502 NR Description: unknown [Arabidopsis thaliana]
  misc_feature (29)..(196): Homolog of NCBI NO: 6598592 NR Description: F5J5.6 [Arabidopsis thaliana]
  misc_feature (1)..(195): Homolog of NCBI NO: 18423837 NR Description: WD-repeat protein-like; protein id: At5g56190.1,
  misc_feature (1)..(195): Homolog of NCBI NO: 30696707 NR Description: WD-40 repeat protein family [Arabidopsis thaliana]
  misc_feature (1)..(194): Homolog of NCBI NO: 18399975 NR Description: expressed protein; protein id: At3g13340.1, by cDNA: gi_15081810 [Arabidopsis thaliana] AT3g13340/MDC11_13 [Arabidopsis thaliana]
  misc_feature (1)..(195): Homolog of NCBI NO: 21536732 NR Description: WD-repeat protein-like [Arabidopsis thaliana]
MTANNDCTVRLFDATNFALLNRFAFHWSVNNISTSPDGKLVAVLGDSPECLLADTGSGKVIHGLEGHLDYSFSSAWHPNGQILATGNQDTTCRLWDVRNLSQSLKVLKGNMGAIRALRFTSDGRFLAMAEPADFVHLFDTEAGYSQCQEIDLFGEIAGISFSPDTEALFVGVADRTYGSLLEFNRKRNHSYVDSIF

SEQ ID NO: 90914 - DNA, 588 bp, Arabidopsis thaliana
  misc_feature (1)..(588): Ceres Seq. ID no. 12725711
  misc_feature: MA Experiment ID: 20000314 Result: Up-regulated in Transcription
  misc_feature: MA Experiment 20000314 PARAMETER Experiment Name: At_14day_Shoots-Roots_Sub_P Parameter: Age (day) Value: 14
  misc_feature: MA Experiment 20000314 PARAMETER Experiment Name: At_14day_Shoots-Roots_Sub_P Parameter: Organism Value: A. thaliana
  misc_feature: MA Experiment 20000314 PARAMETER Experiment Name: At_14day_Shoots-Roots_Sub_P Parameter: Plant Line Value: WS
  misc_feature: MA Experiment 20000314 PARAMETER Experiment Name: At_14day_Shoots-Roots_Sub_P Parameter: Tissue Value: Roots vs. Whole Plant
  misc_feature: MA Experiment ID: 20000355 Result: Up-regulated in Transcription
  misc_feature: MA Experiment 20000355 PARAMETER Experiment Name: At_Siliques_Sub_P Parameter: Age (day) Value: 21
  misc_feature: MA Experiment 20000355 PARAMETER Experiment Name: At_Siliques_Sub_P Parameter: Organism Value: A. thaliana
  misc_feature: MA Experiment 20000355 PARAMETER Experiment Name: At_Siliques_Sub_P Parameter: Plant Line Value: WS
  misc_feature: MA Experiment 20000355 PARAMETER Experiment Name: At_Siliques_Sub_P Parameter: Tissue Value: Less Than 5mm Siliques vs. Whole Plant
  misc_feature: MA Experiment ID: 20000440 Result: Up-regulated in Transcription
  misc_feature: MA Experiment 20000440 PARAMETER Experiment Name: At_Closed-Flower__Sub_P Parameter: Tissue Value: Closed Flower vs. Whole Plant
  misc_feature: MA Experiment ID: 20001806 Result: Up-regulated in Transcription
  misc_feature: MA Experiment 20001806 PARAMETER Experiment Name: At_50mM_NH4NO3_L-to-H_Sub_P Parameter: Timepoint (hr) Value: 4
  misc_feature: MA Experiment 20001806 PARAMETER Experiment Name: At_50mM_NH4NO3_L-to-H_Sub_P Parameter: Tissue Value: Leaf
  misc_feature: MA Experiment 20001806 PARAMETER Experiment Name: At_50mM_NH4NO3_L-to-H_Sub_P Parameter: Treatment Value: 50mM NH4NO3 vs 100mM Mannitol
atgactgcaatgcttgccatgactcagcatcgtcgcaagaaggttccaatcatcttgcacaacgagagtgtaaaggcgaaaacttggagtcatgttttcagcgaagaaactagaaaacaatctatcccggttatagcggcttggcaactgaatgagagaatgtatggagagttgcagggtttgaacaagaaagaaacagcggaaagatacgggacacaacaagttcacgaatggcgcaggagttacgaaattcctcctccgaaaggcgagagcttggagatgtgtgctgagagagcagtggcttattttgaagacaatatcaaaccagagcttgcatctggaaacaatgtaatgattgctgctcacgggaactcattgagatctatcattatgtatcttgacgatttaacttctcaggaggttacaactctagacctgtccacaggtgtaccattgctctacatcttcaaagaaggcaagttcatgaaacgaggaagccccgtcggttctactgaagctggtgtctatgcttatacaaagagattggcacaatacagagagaagcttgatgcggcggcgaccatttaa

SEQ ID NO: 90915 - protein, 195 aa, Arabidopsis thaliana
  peptide (1)..(195): Ceres Seq. ID no. 12725712
  misc_feature (1)..(164): Pfam Name: Phosphoglycerate mutase family Pfam Description: Phosphoglycerate mutase family
  misc_feature (1)..(195): Homolog of NCBI NO: 15218201 NR Description: phosphoglycerate mutase, putative; protein id: [Arabidopsis thaliana] >gi|26451923|dbj|BAC43054.1| unknown [Arabidopsis thaliana] >gi|28372948|gb|AAO39956.1| At1g78050
  misc_feature (1)..(195): Homolog of NCBI NO: 25405021 NR Description: protein F28K19.26 [imported] - Arabidopsis >gi|6573769|gb|AAF17689.1|AC009243_16 F28K19.26 [Arabidopsis
  misc_feature (1)..(190): Homolog of NCBI NO: 18395083 NR Description: expressed protein; protein id: At1g22170.1, by cDNA: 33490. [Arabidopsis thaliana] >gi|25511655|pir||C86354
  misc_feature (1)..(190): Homolog of NCBI NO: 21539557 NR Description: unknown protein [Arabidopsis thaliana]
  misc_feature (1)..(190): Homolog of NCBI NO: 21618275 NR Description: unknown [Arabidopsis thaliana]
  misc_feature (1)..(163): Homolog of NCBI NO: 15618772 NR Description: Phosphoglycerate Mutase [Chlamydophila pneumoniae >gi|16752176|ref|NP_445543.1| phosphoglycerate mutase
  misc_feature (1)..(163): Homolog of NCBI NO: 15836396 NR Description: phosphoglycerate mutase [Chlamydophila pneumoniae
  misc_feature (1)..(169): Homolog of NCBI NO: 15834720 NR Description: phosphoglycerate mutase [Chlamydia muridarum]
  misc_feature (1)..(169): Homolog of NCBI NO: 29840659 NR Description: phosphoglycerate mutase [Chlamydophila caviae >gi|29835009|gb|AAP05643.1| phosphoglycerate mutase
  misc_feature (1)..(169): Homolog of NCBI NO: 15605455 NR Description: Phosphoglycerate Mutase [Chlamydia trachomatis]
MTAMLAMTQHRRKKVPIILHNESVKAKTWSHVFSEETRKQSIPVIAAWQLNERMYGELQGLNKKETAERYGTQQVHEWRRSYEIPPPKGESLEMCAERAVAYFEDNIKPELASGNNVMIAAHGNSLRSIIMYLDDLTSQEVTTLDLSTGVPLLYIFKEGKFMKRGSPVGSTEAGVYAYTKRLAQYREKLDAAATI

SEQ ID NO: 90916 - protein, 192 aa, Arabidopsis thaliana
  peptide (1)..(192): Ceres Seq. ID no. 12725713
  misc_feature (1)..(161): Pfam Name: Phosphoglycerate mutase family Pfam Description: Phosphoglycerate mutase family
  misc_feature (1)..(192): Homolog of NCBI NO: 15218201 NR Description: phosphoglycerate mutase, putative; protein id: [Arabidopsis thaliana] >gi|26451923|dbj|BAC43054.1| unknown [Arabidopsis thaliana] >gi|28372948|gb|AAO39956.1| At1g78050
  misc_feature (1)..(192): Homolog of NCBI NO: 25405021 NR Description: protein F28K19.26 [imported] - Arabidopsis >gi|6573769|gb|AAF17689.1|AC009243_16 F28K19.26 [Arabidopsis
  misc_feature (1)..(187): Homolog of NCBI NO: 18395083 NR Description: expressed protein; protein id: At1g22170.1, by cDNA: 33490. [Arabidopsis thaliana] >gi|25511655|pir||C86354
  misc_feature (1)..(187): Homolog of NCBI NO: 21539557 NR Description: unknown protein [Arabidopsis thaliana]
  misc_feature (1)..(187): Homolog of NCBI NO: 21618275 NR Description: unknown [Arabidopsis thaliana]
  misc_feature (1)..(160): Homolog of NCBI NO: 15618772 NR Description: Phosphoglycerate Mutase [Chlamydophila pneumoniae >gi|16752176|ref|NP_445543.1| phosphoglycerate mutase
  misc_feature (1)..(160): Homolog of NCBI NO: 15836396 NR Description: phosphoglycerate mutase [Chlamydophila pneumoniae
  misc_feature (1)..(166): Homolog of NCBI NO: 15834720 NR Description: phosphoglycerate mutase [Chlamydia muridarum]
  misc_feature (1)..(166): Homolog of NCBI NO: 29840659 NR Description: phosphoglycerate mutase [Chlamydophila caviae >gi|29835009|gb|AAP05643.1| phosphoglycerate mutase
  misc_feature (1)..(166): Homolog of NCBI NO: 15605455 NR Description: Phosphoglycerate Mutase [Chlamydia trachomatis]
MLAMTQHRRKKVPIILHNESVKAKTWSHVFSEETRKQSIPVIAAWQLNERMYGELQGLNKKETAERYGTQQVHEWRRSYEIPPPKGESLEMCAERAVAYFEDNIKPELASGNNVMIAAHGNSLRSIIMYLDDLTSQEVTTLDLSTGVPLLYIFKEGKFMKRGSPVGSTEAGVYAYTKRLAQYREKLDAAATI

SEQ ID NO: 90917 - protein, 189 aa, Arabidopsis thaliana
  peptide (1)..(189): Ceres Seq. ID no. 12725714
  misc_feature (1)..(158): Pfam Name: Phosphoglycerate mutase family Pfam Description: Phosphoglycerate mutase family
  misc_feature (1)..(189): Homolog of NCBI NO: 15218201 NR Description: phosphoglycerate mutase, putative; protein id: [Arabidopsis thaliana] >gi|26451923|dbj|BAC43054.1| unknown [Arabidopsis thaliana] >gi|28372948|gb|AAO39956.1| At1g78050
  misc_feature (1)..(189): Homolog of NCBI NO: 25405021 NR Description: protein F28K19.26 [imported] - Arabidopsis >gi|6573769|gb|AAF17689.1|AC009243_16 F28K19.26 [Arabidopsis
  misc_feature (1)..(184): Homolog of NCBI NO: 18395083 NR Description: expressed protein; protein id: At1g22170.1, by cDNA: 33490. [Arabidopsis thaliana] >gi|25511655|pir||C86354
  misc_feature (1)..(184): Homolog of NCBI NO: 21539557 NR Description: unknown protein [Arabidopsis thaliana]
  misc_feature (1)..(184): Homolog of NCBI NO: 21618275 NR Description: unknown [Arabidopsis thaliana]
  misc_feature (1)..(157): Homolog of NCBI NO: 15618772 NR Description: Phosphoglycerate Mutase [Chlamydophila pneumoniae >gi|16752176|ref|NP_445543.1| phosphoglycerate mutase
  misc_feature (1)..(157): Homolog of NCBI NO: 15836396 NR Description: phosphoglycerate mutase [Chlamydophila pneumoniae
  misc_feature (1)..(163): Homolog of NCBI NO: 15834720 NR Description: phosphoglycerate mutase [Chlamydia muridarum]
  misc_feature (1)..(163): Homolog of NCBI NO: 29840659 NR Description: phosphoglycerate mutase [Chlamydophila caviae >gi|29835009|gb|AAP05643.1| phosphoglycerate mutase
  misc_feature (1)..(163): Homolog of NCBI NO: 15605455 NR Description: Phosphoglycerate Mutase [Chlamydia trachomatis]
MTQHRRKKVPIILHNESVKAKTWSHVFSEETRKQSIPVIAAWQLNERMYGELQGLNKKETAERYGTQQVHEWRRSYEIPPPKGESLEMCAERAVAYFEDNIKPELASGNNVMIAAHGNSLRSIIMYLDDLTSQEVTTLDLSTGVPLLYIFKEGKFMKRGSPVGSTEAGVYAYTKRLAQYREKLDAAATI

SEQ ID NO: 90918 - DNA, 1823 bp, Arabidopsis thaliana
  misc_feature (1)..(1823): Ceres Seq. ID no. 12725715
  misc_feature: MA Experiment ID: 20000166 Result: Up-regulated in Transcription
  misc_feature: MA Experiment 20000166 PARAMETER Experiment Name: At_100uM_ABA_P Parameter: Age (day) Value: 14
  misc_feature: MA Experiment 20000166 PARAMETER Experiment Name: At_100uM_ABA_P Parameter: Organism Value: A. thaliana
  misc_feature: MA Experiment 20000166 PARAMETER Experiment Name: At_100uM_ABA_P Parameter: Plant Line Value: WS
  misc_feature: MA Experiment 20000166 PARAMETER Experiment Name: At_100uM_ABA_P Parameter: Timepoint (hr) Value: 1
  misc_feature: MA Experiment 20000166 PARAMETER Experiment Name: At_100uM_ABA_P Parameter: Tissue Value: Aerial
  misc_feature: MA Experiment 20000166 PARAMETER Experiment Name: At_100uM_ABA_P Parameter: Treatment Value: 100uM ABA vs. No Treatment
  misc_feature: MA Experiment ID: 20000173 Result: Down-regulated in Transcription
  misc_feature: MA Experiment 20000173 PARAMETER Experiment Name: At_42deg_Heat_P Parameter: Age (day) Value: 14
  misc_feature: MA Experiment 20000173 PARAMETER Experiment Name: At_42deg_Heat_P Parameter: Organism Value: A. thaliana
  misc_feature: MA Experiment 20000173 PARAMETER Experiment Name: At_42deg_Heat_P Parameter: Plant Line Value: WS
  misc_feature: MA Experiment 20000173 PARAMETER Experiment Name: At_42deg_Heat_P Parameter: Temperature (deg C) Value: 42 vs. 22
  misc_feature: MA Experiment 20000173 PARAMETER Experiment Name: At_42deg_Heat_P Parameter: Timepoint (hr) Value: 6
  misc_feature: MA Experiment 20000173 PARAMETER Experiment Name: At_42deg_Heat_P Parameter: Tissue Value: Aerial
  misc_feature: MA Experiment ID: 20000227 Result: Down-regulated in Transcription
  misc_feature: MA Experiment 20000227 PARAMETER Experiment Name: At_Root-Tips-vs-Tops_P Parameter: Tissue Value: Root Tips vs. Root Tops
  misc_feature: MA Experiment ID: 20000234 Result: Down-regulated in Transcription
  misc_feature: MA Experiment 20000234 PARAMETER Experiment Name: At_Siliques_P Parameter: Age (day) Value: 21
  misc_feature: MA Experiment 20000234 PARAMETER Experiment Name: At_Siliques_P Parameter: Organism Value: A. thaliana
  misc_feature: MA Experiment 20000234 PARAMETER Experiment Name: At_Siliques_P Parameter: Plant Line Value: WS
  misc_feature: MA Experiment 20000234 PARAMETER Experiment Name: At_Siliques_P Parameter: Tissue Value: Less Than 5mm Siliques vs. Whole Plant
  misc_feature: MA Experiment ID: 20000286 Result: Down-regulated in Transcription
  misc_feature: MA Experiment 20000286 PARAMETER Experiment Name: At_Open_Flower_P Parameter: Age (day) Value: 21
  misc_feature: MA Experiment 20000286 PARAMETER Experiment Name: At_Open_Flower_P Parameter: Plant Line Value: WS
  misc_feature: MA Experiment 20000286 PARAMETER Experiment Name: At_Open_Flower_P Parameter: Tissue Value: Half Open vs. Whole Plant
atcggtgaggttgagagtaattcactacacacacacaaaaaataaattgagtgcctcccccaaaaacaaaattggtagataacgagcaattgttttttttcagatttgatcctgaatttttacatttttttttttgcaatctccccctaatctgttgtttctcgcttcttcttctgttaatcatctgtctttcaaaaagaaagaaaaaagaaaaattcgatttctgggtttgtttttgtcatacagaaaaaaatcaagcttatgaatttgtgtttaattttttgttttaatttgaaaggcaggttttttcagaacgagatcgttttttcaaatttcttctgattttacctctttttttcttcttagattttagtgaatcgagggtgaaatttttgattccctcttttcggatctacacagaggttgcttatttcaaaccttttagatccatttttttttaattttctcggaaaaatccctgtttctttacttttttataagtctcaggttcaattttttcggattcaaatttttattttaaatggcagctgctatgaatttgtacacttgtagcagatcgtttcaagactctggtggtgaactcatggacgcgcttgtaccttttatcaaaagcgtttccgattctccttcttcttcttctgcagcgtctgcgtctgcgtttcttcacccctctgcgttttctctccctcctctccccggttattacccggattcaacgttcttgacccaaccgttttcatacgggtcggatcttcaacaaaccgggtcattaatcggactcaacaacctctcttcttctcagatccaccagatccagtctcagatccatcatcctcttcctccgacgcatcacaacaacaacaactctttctcgaatcttctcagcccaaagccgttactgatgaagcaatctggagtcgctggatcttgtttcgcttacggttcaggtgttccttcgaagccgacgaagctttacagaggtgtgaggcaacgtcactggggaaaatgggtggctgagatccgtttgccgagaaatcggactcgtctctggcttgggacttttgacacggcggaggaagctgcgttggcctatgataaggcggcgtacaagctgcgcggcgatttcgcccggcttaacttccctaacctacgtcataacggatctcacatcggaggcgatttcggtgaatataaacctcttcactcctcagtcgacgctaagcttgaagctatttgtaaaagcatggcggagactcagaaacaggacaaatcgacgaaatcatcgaagaaacgtgagaagaaggtttcgtcgccagatctatcggagaaagtgaaggcggaggagaattcggtttcgatcggtggatctccaccggtgacggagtttgaagagtccaccgctggatcttcgccgttgtcggacttgacgttcgctgacccggaggagccgccgcagtggaacgagacgttctcgttggagaagtatccgtcgtacgagatcgattgggattcgattctagcttaggggcaaaataggaaattcagccgcttgcaatggagtttttgtgaaattgcatgactggcccaagagtaattaattaaatatggattagtgttaaatttcgtatgttaatatttgtattatggtttgtattagtctctctgtgtcggtccagcttgcggttttttgtcaggctcgaccatgccacagttttcattttatgtaatctttttttcttttgtcttatgtaatttgtagcttcagtttcttcatctataatgcaattttattatgattatgt

SEQ ID NO: 90919 - protein, 334 aa, Arabidopsis thaliana
  peptide (1)..(334): Ceres Seq. ID no. 12725716
  misc_feature (149)..(213): Pfam Name: AP2 domain Pfam Description: AP2 domain
  misc_feature (1)..(334): Homolog of NCBI NO: 15218204 NR Description: AP2 domain protein RAP2.4; protein id: supported by cDNA: gi_13877778 [Arabidopsis thaliana]
  misc_feature (1)..(334): Homolog of NCBI NO: 13877779 NR Description: putative AP2 domain-containing protein
  misc_feature (5)..(334): Homolog of NCBI NO: 6573771 NR Description: F28K19.29 [Arabidopsis thaliana]
  misc_feature (106)..(334): Homolog of NCBI NO: 2281633 NR Description: AP2 domain containing protein RAP2.4 [Arabidopsis
  misc_feature (150)..(334): Homolog of NCBI NO: 12324244 NR Description: putative AP2 domain transcriptional regulator, 5'
  misc_feature (114)..(257): Homolog of NCBI NO: 8571476 NR Description: apetala2 domain-containing protein [Atriplex
  misc_feature (240)..(334): Homolog of NCBI NO: 8571476 NR Description: apetala2 domain-containing protein [Atriplex
  misc_feature (61)..(333): Homolog of NCBI NO: 15219839 NR Description: AP2 domain transcription factor RAP2, putative; id: At1g22190.1, supported by cDNA: gi_15292782 [Arabidopsis
  misc_feature (64)..(332): Homolog of NCBI NO: 27436378 NR Description: dehydration-responsive element binding protein 3
  misc_feature (18)..(334): Homolog of NCBI NO: 18400001 NR Description: AP2 domain transcription factor RAP2, putative; id: At1g36060.1 [Arabidopsis thaliana] >gi|25350213|pir||E86482
MAAAMNLYTCSRSFQDSGGELMDALVPFIKSVSDSPSSSSAASASAFLHPSAFSLPPLPGYYPDSTFLTQPFSYGSDLQQTGSLIGLNNLSSSQIHQIQSQIHHPLPPTHHNNNNSFSNLLSPKPLLMKQSGVAGSCFAYGSGVPSKPTKLYRGVRQRHWGKWVAEIRLPRNRTRLWLGTFDTAEEAALAYDKAAYKLRGDFARLNFPNLRHNGSHIGGDFGEYKPLHSSVDAKLEAICKSMAETQKQDKSTKSSKKREKKVSSPDLSEKVKAEENSVSIGGSPPVTEFEESTAGSSPLSDLTFADPEEPPQWNETFSLEKYPSYEIDWDSILA

SEQ ID NO: 90920 - protein, 330 aa, Arabidopsis thaliana
  peptide (1)..(330): Ceres Seq. ID no. 12725717
  misc_feature (145)..(209): Pfam Name: AP2 domain Pfam Description: AP2 domain
  misc_feature (1)..(330): Homolog of NCBI NO: 15218204 NR Description: AP2 domain protein RAP2.4; protein id: supported by cDNA: gi_13877778 [Arabidopsis thaliana]
  misc_feature (1)..(330): Homolog of NCBI NO: 13877779 NR Description: putative AP2 domain-containing protein
  misc_feature (1)..(330): Homolog of NCBI NO: 6573771 NR Description: F28K19.29 [Arabidopsis thaliana]
  misc_feature (102)..(330): Homolog of NCBI NO: 2281633 NR Description: AP2 domain containing protein RAP2.4 [Arabidopsis
  misc_feature (146)..(330): Homolog of NCBI NO: 12324244 NR Description: putative AP2 domain transcriptional regulator, 5'
  misc_feature (110)..(253): Homolog of NCBI NO: 8571476 NR Description: apetala2 domain-containing protein [Atriplex
  misc_feature (236)..(330): Homolog of NCBI NO: 8571476 NR Description: apetala2 domain-containing protein [Atriplex
  misc_feature (57)..(329): Homolog of NCBI NO: 15219839 NR Description: AP2 domain transcription factor RAP2, putative; id: At1g22190.1, supported by cDNA: gi_15292782 [Arabidopsis
  misc_feature (60)..(328): Homolog of NCBI NO: 27436378 NR Description: dehydration-responsive element binding protein 3
  misc_feature (14)..(330): Homolog of NCBI NO: 18400001 NR Description: AP2 domain transcription factor RAP2, putative; id: At1g36060.1 [Arabidopsis thaliana] >gi|25350213|pir||E86482
MNLYTCSRSFQDSGGELMDALVPFIKSVSDSPSSSSAASASAFLHPSAFSLPPLPGYYPDSTFLTQPFSYGSDLQQTGSLIGLNNLSSSQIHQIQSQIHHPLPPTHHNNNNSFSNLLSPKPLLMKQSGVAGSCFAYGSGVPSKPTKLYRGVRQRHWGKWVAEIRLPRNRTRLWLGTFDTAEEAALAYDKAAYKLRGDFARLNFPNLRHNGSHIGGDFGEYKPLHSSVDAKLEAICKSMAETQKQDKSTKSSKKREKKVSSPDLSEKVKAEENSVSIGGSPPVTEFEESTAGSSPLSDLTFADPEEPPQWNETFSLEKYPSYEIDWDSILA

SEQ ID NO: 90921 - protein, 313 aa, Arabidopsis thaliana
  peptide (1)..(313): Ceres Seq. ID no. 12725718
  misc_feature (128)..(192): Pfam Name: AP2 domain Pfam Description: AP2 domain
  misc_feature (1)..(313): Homolog of NCBI NO: 15218204 NR Description: AP2 domain protein RAP2.4; protein id: supported by cDNA: gi_13877778 [Arabidopsis thaliana]
  misc_feature (1)..(313): Homolog of NCBI NO: 13877779 NR Description: putative AP2 domain-containing protein
  misc_feature (1)..(313): Homolog of NCBI NO: 6573771 NR Description: F28K19.29 [Arabidopsis thaliana]
  misc_feature (85)..(313): Homolog of NCBI NO: 2281633 NR Description: AP2 domain containing protein RAP2.4 [Arabidopsis
  misc_feature (129)..(313): Homolog of NCBI NO: 12324244 NR Description: putative AP2 domain transcriptional regulator, 5'
  misc_feature (93)..(236): Homolog of NCBI NO: 8571476 NR Description: apetala2 domain-containing protein [Atriplex
  misc_feature (219)..(313): Homolog of NCBI NO: 8571476 NR Description: apetala2 domain-containing protein [Atriplex
  misc_feature (40)..(312): Homolog of NCBI NO: 15219839 NR Description: AP2 domain transcription factor RAP2, putative; id: At1g22190.1, supported by cDNA: gi_15292782 [Arabidopsis
  misc_feature (43)..(311): Homolog of NCBI NO: 27436378 NR Description: dehydration-responsive element binding protein 3
  misc_feature (1)..(313): Homolog of NCBI NO: 18400001 NR Description: AP2 domain transcription factor RAP2, putative; id: At1g36060.1 [Arabidopsis thaliana] >gi|25350213|pir||E86482
MDALVPFIKSVSDSPSSSSAASASAFLHPSAFSLPPLPGYYPDSTFLTQPFSYGSDLQQTGSLIGLNNLSSSQIHQIQSQIHHPLPPTHHNNNNSFSNLLSPKPLLMKQSGVAGSCFAYGSGVPSKPTKLYRGVRQRHWGKWVAEIRLPRNRTRLWLGTFDTAEEAALAYDKAAYKLRGDFARLNFPNLRHNGSHIGGDFGEYKPLHSSVDAKLEAICKSMAETQKQDKSTKSSKKREKKVSSPDLSEKVKAEENSVSIGGSPPVTEFEESTAGSSPLSDLTFADPEEPPQWNETFSLEKYPSYEIDWDSILA

SEQ ID NO: 90922 - DNA, 2816 bp, Arabidopsis thaliana
  misc_feature (1)..(2816): Ceres Seq. ID no. 12725735
  misc_feature: MA Experiment ID: 20000184 Result: Down-regulated in Transcription
  misc_feature: MA Experiment 20000184 PARAMETER Experiment Name: At_Shoots__P Parameter: Age (day) Value: 7
  misc_feature: MA Experiment 20000184 PARAMETER Experiment Name: At_Shoots__P Parameter: Tissue Value: Shoots vs. Whole Plant
  misc_feature: MA Experiment ID: 20000185 Result: Down-regulated in Transcription
  misc_feature: MA Experiment 20000185 PARAMETER Experiment Name: At_Roots__P Parameter: Age (day) Value: 7 vs. 21
  misc_feature: MA Experiment 20000185 PARAMETER Experiment Name: At_Roots__P Parameter: Organism Value: A. thaliana
  misc_feature: MA Experiment 20000185 PARAMETER Experiment Name: At_Roots__P Parameter: Tissue Value: Roots vs. Whole Plant
  misc_feature: MA Experiment ID: 20000214 Result: Up-regulated in Transcription
  misc_feature: MA Experiment 20000214 PARAMETER Experiment Name: At_4deg_Cold_P Parameter: Timepoint (hr) Value: 6
  misc_feature: MA Experiment ID: 20000235 Result: Up-regulated in Transcription
  misc_feature: MA Experiment 20000235 PARAMETER Experiment Name: At_Siliques_P Parameter: Age (day) Value: 21
  misc_feature: MA Experiment 20000235 PARAMETER Experiment Name: At_Siliques_P Parameter: Organism Value: A. thaliana
  misc_feature: MA Experiment 20000235 PARAMETER Experiment Name: At_Siliques_P Parameter: Plant Line Value: WS
  misc_feature: MA Experiment 20000235 PARAMETER Experiment Name: At_Siliques_P Parameter: Tissue Value: 5-10mm Siliques vs. Whole Plant
  misc_feature: MA Experiment ID: 20000794 Result: Up-regulated in Transcription
  misc_feature: MA Experiment 20000794 PARAMETER Experiment Name: At_Petals_P Parameter: Age (day) Value: 23-25 days
  misc_feature: MA Experiment 20000794 PARAMETER Experiment Name: At_Petals_P Parameter: Plant Line Value: WS
  misc_feature: MA Experiment 20000794 PARAMETER Experiment Name: At_Petals_P Parameter: Tissue Value: Petals vs. Whole plant
  misc_feature: MA Experiment ID: 20001247 Result: Up-regulated in Transcription
  misc_feature: MA Experiment 20001247 PARAMETER Experiment Name: At_Far-red-induction_P Parameter: Age (day) Value: 7
  misc_feature: MA Experiment 20001247 PARAMETER Experiment Name: At_Far-red-induction_P Parameter: Light Value: Far-red vs. White
  misc_feature: MA Experiment 20001247 PARAMETER Experiment Name: At_Far-red-induction_P Parameter: Organism Value: A. thaliana
  misc_feature: MA Experiment 20001247 PARAMETER Experiment Name: At_Far-red-induction_P Parameter: Plant Line Value: Columbia
  misc_feature: MA Experiment 20001247 PARAMETER Experiment Name: At_Far-red-induction_P Parameter: Timepoint (hr) Value: 1
  misc_feature: MA Experiment 20001247 PARAMETER Experiment Name: At_Far-red-induction_P Parameter: Tissue Value: Whole Plant
  misc_feature: MA Experiment ID: 20001248 Result: Up-regulated in Transcription
  misc_feature: MA Experiment 20001248 PARAMETER Experiment Name: At_Far-red-induction_P Parameter: Age (day) Value: 7
  misc_feature: MA Experiment 20001248 PARAMETER Experiment Name: At_Far-red-induction_P Parameter: Light Value: Far-red vs. White
  misc_feature: MA Experiment 20001248 PARAMETER Experiment Name: At_Far-red-induction_P Parameter: Organism Value: A. thaliana
  misc_feature: MA Experiment 20001248 PARAMETER Experiment Name: At_Far-red-induction_P Parameter: Plant Line Value: Columbia
  misc_feature: MA Experiment 20001248 PARAMETER Experiment Name: At_Far-red-induction_P Parameter: Timepoint (hr) Value: 4
  misc_feature: MA Experiment 20001248 PARAMETER Experiment Name: At_Far-red-induction_P Parameter: Tissue Value: Whole Plant
  misc_feature: MA Experiment ID: 20001555 Result: Down-regulated in Transcription
  misc_feature: MA Experiment 20001555 PARAMETER Experiment Name: At_Drought_Soil_Dry_P Parameter: Age (day) Value: 24
  misc_feature: MA Experiment 20001555 PARAMETER Experiment Name: At_Drought_Soil_Dry_P Parameter: Organism Value: A. thaliana
  misc_feature: MA Experiment 20001555 PARAMETER Experiment Name: At_Drought_Soil_Dry_P Parameter: Plant Line Value: WS
  misc_feature: MA Experiment 20001555 PARAMETER Experiment Name: At_Drought_Soil_Dry_P Parameter: Post Timepoint (hr) Value: None
  misc_feature: MA Experiment 20001555 PARAMETER Experiment Name: At_Drought_Soil_Dry_P Parameter: Post-Treatment Value: None
  misc_feature: MA Experiment 20001555 PARAMETER Experiment Name: At_Drought_Soil_Dry_P Parameter: Timepoint (day) Value: 10
  misc_feature: MA Experiment 20001555 PARAMETER Experiment Name: At_Drought_Soil_Dry_P Parameter: Treatment Value: Drought vs. No Drought
aattcattttttgtttgttttggtttaaataattcagtgtctcacgagctgtgtcgagattggatccatacaaaatctgcacgacgcctgcttcttcactctctcccactgttccagcttcaactctcttgatatacagagagagatagagataaagagagagagagtgagagtgatagctctcggagaaattgaagaagacacaatctgattagtattctccaatattccatcaactttttgctgagggaaatctccagatttataatcgtttgtatatatatatatacagagcagcgtagaaaaggatcttagatttatagcagcaacaaaaaaatgtcaatgccactacaacgtggcatctctggagtacgagtttctgatagcagtgatgatttgagagactctcaaatgaaagacaaaactgaaagagctcgttctactgagaacaacaacttaaccttaaggtttccttttggtttcctctttagtaatcaatcttcttccaaacacggtggtggtggcgaaaacggtttttctgctgatccatatagtgcaagaagcaggcatagattgatgttgttgtttctcaagatcagtttggttcttattgtggttattgctcttgctggttctttctggtggactatttccatttcgacttcttccagaggtcatgtatatcacaattataggaggttacaggagcagcttgtttcagacttatgggatattggggagatttctcttggtcctaataggtggaaggagcttgaatattgtaatatagaatctgagaattttgtcccttgctttaatgtttctgagaatcttgctctgggttactccaatggtgatgaaaatgatcggttttgtgggcctggatcaaagcaagaatgtttagagttgccaccggtgaaatatcgagtccctcttaggtggccgactggtaaagatataatctggcattctaatgttaagattactgctcaagaagttgtgtcttctggtagcataaccaagaggatgatgatgatggaagatgatcagatatctttcaggtcagcatctcctatgtctgatgaggttgaagactattcccatcagatcgctgaaatgatcgggattaagaaggataacttcatagaagctggtgtgagaactatcttggatattggatgtggttatggtagctttggggcacatctattgtccaaacagattttaactatgtgcatagcaaactacgaagcttcgggtagccaagttcagctaacactcgaaaggggtcttcctgcaatgattggctcttttatatcaaagcaattgccatatccttctctttcctttgatatgttgcattgcttaagatgtggcattgattgggaccagaaaggtaacagtttaatgacaccccagaatgatttttttcatgtccttaacccgatggaagatccaactttactgtttcaatctgctgtgtagatgggcttctccttgtagaaattgacagggttctcaagcccggtggttactttgtatggacatctccgctcacaaaccctcgtaacaaggatcatcttaaaagatggaactttgttcatgattttgctgaaagcatctgttggactcttttaaatcagcaagatgagacagttgtctggaaaaagactatcaacaccaaatgttatagttcccggaaacctggagtgggcccttctgtgtgtaccaaagggcacgatgttgagtctccttattacaggccgcttcagatgtgtataggtggaacacgtagccggaggtggattcccattgaaggcaggacaagatggcctagccggtctaacatgaacaagactgaactttcattatatggtcttcaccccgaggtgcttggagaggatgctgagaactggaagataacagtgagagaatactggtctctcttgtctcctctgatattctctgatcatccaaaaagacccggcgatgaagatccatcaccgccttataacatgctcagaaacgtactggatatgaatgctcaattcggtggtctcaattccgccttgttggaagcaagaaaatcagtctgggtcatgaatgtggtccctacagctggacctaaccacctccccatgatacttgaccgtggctttgtcggagttttgcacaactggtgtgaaccattcccgacttacccgagaacatatgacctggtacatgcagacaatctcttgtcgcttcagacaagtcagccccgaaaaacatgtctacttattgatatattcacagagattgaccgattgcttcgtccagagggatgggtgataatccgtgacacggcacagctggtggaaaaggcgagagagacgataacgcagttgaagtgggaagctcgagtaatagaggttgaaagcagcagtgaacaaagacttctcatctgccaaaaaccattcaccaagcgacaatcaatctgaagaagaagaagaacatagacacaggtttttctccacttttttaatttttttgttccaatgcctcacattttggaatcaaatcatccaacttgtgttggcgatacggggaagaaaggaggaagagatgaaatatatatcccgccggggacgtaagaccgccggtgaaatttctttatctggttccgtgagttcccattttacagaatctagattttttttttctttacaactttggttctataacaactcttattatacagcgaaaaaagaatatgattcaatatttgtgaagatgtttatgaaataagttcaaagctttttagtaaattttcactg

SEQ ID NO: 90923 - protein, 382 aa, Arabidopsis thaliana
  peptide (1)..(382): Ceres Seq. ID no. 12725736
  misc_feature (155)..(370): Pfam Name: Putative methyltransferase Pfam Description: Putative methyltransferase
  misc_feature (306)..(370): Homolog of NCBI NO: 12324243 NR Description: unknown protein, 5' partial; 69506-67937
  misc_feature (1)..(382): Homolog of NCBI NO: 22330717 NR Description: unknown protein; protein id: At1g78240.1,
  misc_feature (72)..(358): Homolog of NCBI NO: 25411012 NR Description: hypothetical protein At2g03480 [imported] -
  misc_feature (82)..(358): Homolog of NCBI NO: 15222970 NR Description: hypothetical protein; protein id: At1g13860.1
  misc_feature (82)..(358): Homolog of NCBI NO: 26449782 NR Description: unknown protein [Arabidopsis thaliana]
  misc_feature (82)..(358): Homolog of NCBI NO: 25402770 NR Description: protein F16A14.7 [imported] - Arabidopsis >gi|8778408|gb|AAF79416.1|AC068197_26 F16A14.7 [Arabidopsis
  misc_feature (297)..(358): Homolog of NCBI NO: 14532450 NR Description: At2g03480/T4M8.9 [Arabidopsis thaliana]
  misc_feature (297)..(358): Homolog of NCBI NO: 18395560 NR Description: expressed protein; protein id: At2g03480.1 thaliana] >gi|20197738|gb|AAD17428.2| expressed protein
  misc_feature (297)..(358): Homolog of NCBI NO: 24111341 NR Description: At2g03480/T4M8.9 [Arabidopsis thaliana]
  misc_feature (144)..(362): Homolog of NCBI NO: 15239326 NR Description: ankyrin-like protein; protein id: At5g06050.1
MSMPLQRGISGVRVSDSSDDLRDSQMKDKTERARSTENNNLTLRFPFGFLFSNQSSSKHGGGGENGFSADPYSARSRHRLMLLFLKISLVLIVVIALAGSFWWTISISTSSRGHVYHNYRRLQEQLVSDLWDIGEISLGPNRWKELEYCNIESENFVPCFNVSENLALGYSNGDENDRFCGPGSKQECLELPPVKYRVPLRWPTGKDIIWHSNVKITAQEVVSSGSITKRMMMMEDDQISFRSASPMSDEVEDYSHQIAEMIGIKKDNFIEAGVRTILDIGCGYGSFGAHLLSKQILTMCIANYEASGSQVQLTLERGLPAMIGSFISKQLPYPSLSFDMLHCLRCGIDWDQKGNSLMTPQNDFFHVLNPMEDPTLLFQSAV

SEQ ID NO: 90924 - protein, 380 aa, Arabidopsis thaliana
  peptide (1)..(380): Ceres Seq. ID no. 12725737
  misc_feature (153)..(368): Pfam Name: Putative methyltransferase Pfam Description: Putative methyltransferase
  misc_feature (304)..(368): Homolog of NCBI NO: 12324243 NR Description: unknown protein, 5' partial; 69506-67937
  misc_feature (1)..(380): Homolog of NCBI NO: 22330717 NR Description: unknown protein; protein id: At1g78240.1,
  misc_feature (70)..(356): Homolog of NCBI NO: 25411012 NR Description: hypothetical protein At2g03480 [imported] -
  misc_feature (80)..(356): Homolog of NCBI NO: 15222970 NR Description: hypothetical protein; protein id: At1g13860.1
  misc_feature (80)..(356): Homolog of NCBI NO: 26449782 NR Description: unknown protein [Arabidopsis thaliana]
  misc_feature (80)..(356): Homolog of NCBI NO: 25402770 NR Description: protein F16A14.7 [imported] - Arabidopsis >gi|8778408|gb|AAF79416.1|AC068197_26 F16A14.7 [Arabidopsis
  misc_feature (295)..(356): Homolog of NCBI NO: 14532450 NR Description: At2g03480/T4M8.9 [Arabidopsis thaliana]
  misc_feature (295)..(356): Homolog of NCBI NO: 18395560 NR Description: expressed protein; protein id: At2g03480.1 thaliana] >gi|20197738|gb|AAD17428.2| expressed protein
  misc_feature (295)..(356): Homolog of NCBI NO: 24111341 NR Description: At2g03480/T4M8.9 [Arabidopsis thaliana]
  misc_feature (142)..(360): Homolog of NCBI NO: 15239326 NR Description: ankyrin-like protein; protein id: At5g06050.1
MPLQRGISGVRVSDSSDDLRDSQMKDKTERARSTENNNLTLRFPFGFLFSNQSSSKHGGGGENGFSADPYSARSRHRLMLLFLKISLVLIVVIALAGSFWWTISISTSSRGHVYHNYRRLQEQLVSDLWDIGEISLGPNRWKELEYCNIESENFVPCFNVSENLALGYSNGDENDRFCGPGSKQECLELPPVKYRVPLRWPTGKDIIWHSNVKITAQEVVSSGSITKRMMMMEDDQISFRSASPMSDEVEDYSHQIAEMIGIKKDNFIEAGVRTILDIGCGYGSFGAHLLSKQILTMCIANYEASGSQVQLTLERGLPAMIGSFISKQLPYPSLSFDMLHCLRCGIDWDQKGNSLMTPQNDFFHVLNPMEDPTLLFQSAV

SEQ ID NO: 90925 - protein, 357 aa, Arabidopsis thaliana
  peptide (1)..(357): Ceres Seq. ID no. 12725738
  misc_feature (130)..(345): Pfam Name: Putative methyltransferase Pfam Description: Putative methyltransferase
  misc_feature (281)..(345): Homolog of NCBI NO: 12324243 NR Description: unknown protein, 5' partial; 69506-67937
  misc_feature (1)..(357): Homolog of NCBI NO: 22330717 NR Description: unknown protein; protein id: At1g78240.1,
  misc_feature (47)..(333): Homolog of NCBI NO: 25411012 NR Description: hypothetical protein At2g03480 [imported] -
  misc_feature (57)..(333): Homolog of NCBI NO: 15222970 NR Description: hypothetical protein; protein id: At1g13860.1
  misc_feature (57)..(333): Homolog of NCBI NO: 26449782 NR Description: unknown protein [Arabidopsis thaliana]
  misc_feature (57)..(333): Homolog of NCBI NO: 25402770 NR Description: protein F16A14.7 [imported] - Arabidopsis >gi|8778408|gb|AAF79416.1|AC068197_26 F16A14.7 [Arabidopsis
  misc_feature (272)..(333): Homolog of NCBI NO: 14532450 NR Description: At2g03480/T4M8.9 [Arabidopsis thaliana]
  misc_feature (272)..(333): Homolog of NCBI NO: 18395560 NR Description: expressed protein; protein id: At2g03480.1 thaliana] >gi|20197738|gb|AAD17428.2| expressed protein
  misc_feature (272)..(333): Homolog of NCBI NO: 24111341 NR Description: At2g03480/T4M8.9 [Arabidopsis thaliana]
  misc_feature (119)..(337): Homolog of NCBI NO: 15239326 NR Description: ankyrin-like protein; protein id: At5g06050.1
MKDKTERARSTENNNLTLRFPFGFLFSNQSSSKHGGGGENGFSADPYSARSRHRLMLLFLKISLVLIVVIALAGSFWWTISISTSSRGHVYHNYRRLQEQLVSDLWDIGEISLGPNRWKELEYCNIESENFVPCFNVSENLALGYSNGDENDRFCGPGSKQECLELPPVKYRVPLRWPTGKDIIWHSNVKITAQEVVSSGSITKRMMMMEDDQISFRSASPMSDEVEDYSHQIAEMIGIKKDNFIEAGVRTILDIGCGYGSFGAHLLSKQILTMCIANYEASGSQVQLTLERGLPAMIGSFISKQLPYPSLSFDMLHCLRCGIDWDQKGNSLMTPQNDFFHVLNPMEDPTLLFQSAV

SEQ ID NO: 90926 - DNA, 669 bp, Arabidopsis thaliana
  misc_feature (1)..(669): Ceres Seq. ID no. 12725743
  misc_feature: MA Experiment ID: 20000173 Result: Up-regulated in Transcription
  misc_feature: MA Experiment 20000173 PARAMETER Experiment Name: At_42deg_Heat_P Parameter: Age (day) Value: 14
  misc_feature: MA Experiment 20000173 PARAMETER Experiment Name: At_42deg_Heat_P Parameter: Organism Value: A. thaliana
  misc_feature: MA Experiment 20000173 PARAMETER Experiment Name: At_42deg_Heat_P Parameter: Plant Line Value: WS
  misc_feature: MA Experiment 20000173 PARAMETER Experiment Name: At_42deg_Heat_P Parameter: Temperature (deg C) Value: 42 vs. 22
  misc_feature: MA Experiment 20000173 PARAMETER Experiment Name: At_42deg_Heat_P Parameter: Timepoint (hr) Value: 6
  misc_feature: MA Experiment 20000173 PARAMETER Experiment Name: At_42deg_Heat_P Parameter: Tissue Value: Aerial
  misc_feature: MA Experiment ID: 20000227 Result: Down-regulated in Transcription
  misc_feature: MA Experiment 20000227 PARAMETER Experiment Name: At_Root-Tips-vs-Tops_P Parameter: Tissue Value: Root Tips vs. Root Tops
atggcagccgaagtgatccttctcggtttctggccgagcatgttcggaatgaggacgatgatcgcgttagaggagaaaggagtgaagtatgagtatagagaagaggatgtgatcaataacaagagtcccttgctactagagatgaatccgattcacaagacaatcccggttctcatccacaatggtaaaccggttcttgaatcccttatccaaatccaatatatagacgaggtttggtctgacaacaactcatttctcccttctgatccttaccatagagctcaagctttattttgggccgatttcatcgacaagaaggaacagttgtatgtttgtgggaggaagacttgggcaacgaaaggtgaggagctagaagcagccaataaagagtttattgaaatactcaagactcttcaatgtgagctcggagaaaaaccttactttggcggcgataaattcgggtttgtagacattgtcctgattggattctatagttggtttccagcataccagaagtttggtaacttcagcatcgaaccagagtgtttgaagctgattgcttggggaaaaagatgtatgcaaagagagagtgtggctaaagctttgcctgattctgagaaagttgttggatacgttttacagcttaagaagttatatggaattgagtaa

SEQ ID NO: 90927 - protein, 222 aa, Arabidopsis thaliana
  peptide (1)..(222): Ceres Seq. ID no. 12725744
  misc_feature (1)..(222): Homolog of NCBI NO: 15218308 NR Description: glutathione transferase, putative; protein id:
  misc_feature (106)..(222): Homolog of NCBI NO: 8052534 NR Description: F3F9.11 [Arabidopsis thaliana]
  misc_feature (1)..(106): Homolog of NCBI NO: 8052534 NR Description: F3F9.11 [Arabidopsis thaliana]
  misc_feature (1)..(219): Homolog of NCBI NO: 18411929 NR Description: glutathione transferase, putative; protein id: supported by cDNA: 30759., supported by cDNA: gi_14326476
  misc_feature (1)..(219): Homolog of NCBI NO: 21592644 NR Description: glutathione transferase, putative [Arabidopsis
  misc_feature (1)..(222): Homolog of NCBI NO: 15220041 NR Description: glutathione transferase, putative; protein id: [Arabidopsis thaliana] >gi|25313212|pir||H86307 probable
  misc_feature (1)..(219): Homolog of NCBI NO: 8052534 NR Description: F3F9.11 [Arabidopsis thaliana]
  misc_feature (1)..(221): Homolog of NCBI NO: 7447307 NR Description: glutathione transferase (EC 2.5.1.18) - papaya
  misc_feature (4)..(222): Homolog of NCBI NO: 1346215 NR Description: PROBABLE GLUTATHIONE S-TRANSFERASE PARC
  misc_feature (4)..(222): Homolog of NCBI NO: 416652 NR Description: PROBABLE GLUTATHIONE S-TRANSFERASE (AUXIN-INDUCED
MAAEVILLGFWPSMFGMRTMIALEEKGVKYEYREEDVINNKSPLLLEMNPIHKTIPVLIHNGKPVLESLIQIQYIDEVWSDNNSFLPSDPYHRAQALFWADFIDKKEQLYVCGRKTWATKGEELEAANKEFIEILKTLQCELGEKPYFGGDKFGFVDIVLIGFYSWFPAYQKFGNFSIEPECLKLIAWGKRCMQRESVAKALPDSEKVVGYVLQLKKLYGIE

SEQ ID NO: 90928 - protein, 209 aa, Arabidopsis thaliana
  peptide (1)..(209): Ceres Seq. ID no. 12725745
  misc_feature (1)..(209): Homolog of NCBI NO: 15218308 NR Description: glutathione transferase, putative; protein id:
  misc_feature (93)..(209): Homolog of NCBI NO: 8052534 NR Description: F3F9.11 [Arabidopsis thaliana]
  misc_feature (1)..(93): Homolog of NCBI NO: 8052534 NR Description: F3F9.11 [Arabidopsis thaliana]
  misc_feature (1)..(206): Homolog of NCBI NO: 18411929 NR Description: glutathione transferase, putative; protein id: supported by cDNA: 30759., supported by cDNA: gi_14326476
  misc_feature (1)..(206): Homolog of NCBI NO: 21592644 NR Description: glutathione transferase, putative [Arabidopsis
  misc_feature (1)..(209): Homolog of NCBI NO: 15220041 NR Description: glutathione transferase, putative; protein id: [Arabidopsis thaliana] >gi|25313212|pir||H86307 probable
  misc_feature (1)..(206): Homolog of NCBI NO: 8052534 NR Description: F3F9.11 [Arabidopsis thaliana]
  misc_feature (1)..(208): Homolog of NCBI NO: 7447307 NR Description: glutathione transferase (EC 2.5.1.18) - papaya
  misc_feature (1)..(209): Homolog of NCBI NO: 1346215 NR Description: PROBABLE GLUTATHIONE S-TRANSFERASE PARC
  misc_feature (1)..(209): Homolog of NCBI NO: 416652 NR Description: PROBABLE GLUTATHIONE S-TRANSFERASE (AUXIN-INDUCED
MFGMRTMIALEEKGVKYEYREEDVINNKSPLLLEMNPIHKTIPVLIHNGKPVLESLIQIQYIDEVWSDNNSFLPSDPYHRAQALFWADFIDKKEQLYVCGRKTWATKGEELEAANKEFIEILKTLQCELGEKPYFGGDKFGFVDIVLIGFYSWFPAYQKFGNFSIEPECLKLIAWGKRCMQRESVAKALPDSEKVVGYVLQLKKLYGIE

SEQ ID NO: 90929 - protein, 206 aa, Arabidopsis thaliana
  peptide (1)..(206): Ceres Seq. ID no. 12725746
  misc_feature (1)..(206): Homolog of NCBI NO: 15218308 NR Description: glutathione transferase, putative; protein id:
  misc_feature (90)..(206): Homolog of NCBI NO: 8052534 NR Description: F3F9.11 [Arabidopsis thaliana]
  misc_feature (1)..(90): Homolog of NCBI NO: 8052534 NR Description: F3F9.11 [Arabidopsis thaliana]
  misc_feature (1)..(203): Homolog of NCBI NO: 18411929 NR Description: glutathione transferase, putative; protein id: supported by cDNA: 30759., supported by cDNA: gi_14326476
  misc_feature (1)..(203): Homolog of NCBI NO: 21592644 NR Description: glutathione transferase, putative [Arabidopsis
  misc_feature (1)..(206): Homolog of NCBI NO: 15220041 NR Description: glutathione transferase, putative; protein id: [Arabidopsis thaliana] >gi|25313212|pir||H86307 probable
  misc_feature (1)..(203): Homolog of NCBI NO: 8052534 NR Description: F3F9.11 [Arabidopsis thaliana]
  misc_feature (1)..(205): Homolog of NCBI NO: 7447307 NR Description: glutathione transferase (EC 2.5.1.18) - papaya
  misc_feature (1)..(206): Homolog of NCBI NO: 1346215 NR Description: PROBABLE GLUTATHIONE S-TRANSFERASE PARC
  misc_feature (1)..(206): Homolog of NCBI NO: 416652 NR Description: PROBABLE GLUTATHIONE S-TRANSFERASE (AUXIN-INDUCED
MRTMIALEEKGVKYEYREEDVINNKSPLLLEMNPIHKTIPVLIHNGKPVLESLIQIQYIDEVWSDNNSFLPSDPYHRAQALFWADFIDKKEQLYVCGRKTWATKGEELEAANKEFIEILKTLQCELGEKPYFGGDKFGFVDIVLIGFYSWFPAYQKFGNFSIEPECLKLIAWGKRCMQRESVAKALPDSEKVVGYVLQLKKLYGIE

SEQ ID NO: 90930 - DNA, 1200 bp, Arabidopsis thaliana
  misc_feature (1)..(1200): Ceres Seq. ID no. 12725773
  misc_feature: MA Experiment ID: 20000173 Result: Down-regulated in Transcription
  misc_feature: MA Experiment 20000173 PARAMETER Experiment Name: At_42deg_Heat_P Parameter: Age (day) Value: 14
  misc_feature: MA Experiment 20000173 PARAMETER Experiment Name: At_42deg_Heat_P Parameter: Organism Value: A. thaliana
  misc_feature: MA Experiment 20000173 PARAMETER Experiment Name: At_42deg_Heat_P Parameter: Plant Line Value: WS
  misc_feature: MA Experiment 20000173 PARAMETER Experiment Name: At_42deg_Heat_P Parameter: Temperature (deg C) Value: 42 vs. 22
  misc_feature: MA Experiment 20000173 PARAMETER Experiment Name: At_42deg_Heat_P Parameter: Timepoint (hr) Value: 6
  misc_feature: MA Experiment 20000173 PARAMETER Experiment Name: At_42deg_Heat_P Parameter: Tissue Value: Aerial
  misc_feature: MA Experiment ID: 20000182 Result: Up-regulated in Transcription
  misc_feature: MA Experiment 20000182 PARAMETER Experiment Name: At_2mM_SA_P Parameter: Age (day) Value: 14
  misc_feature: MA Experiment 20000182 PARAMETER Experiment Name: At_2mM_SA_P Parameter: Organism Value: A. thaliana
  misc_feature: MA Experiment 20000182 PARAMETER Experiment Name: At_2mM_SA_P Parameter: Plant Line Value: WS
  misc_feature: MA Experiment 20000182 PARAMETER Experiment Name: At_2mM_SA_P Parameter: Timepoint (hr) Value: 6
  misc_feature: MA Experiment 20000182 PARAMETER Experiment Name: At_2mM_SA_P Parameter: Tissue Value: Aerial
  misc_feature: MA Experiment 20000182 PARAMETER Experiment Name: At_2mM_SA_P Parameter: Treatment Value: 2mM SA vs. No Treatment
gattttctttcacctttctctctgatttcaatttcaatttttgttcgtttttttcttccggaaaattggttgttgggtggatcaaagcttacgagatttgtacttttgttctggtgctacaagtccaatggaggcggaaggagaaaaacagtggagttctctcatagtaccttttgttctagagatagtgaaagagaagaacttcacaactattcctccgaggtatgttcgggttgatcaagaaaaaactgagatcttaaatgattctagtcttagttctgagattccagtcatcgacatgacacggttgtgttctgtttccgccatggattccgagctcaagaagctggatttcgcttgccaagattggggattttttcaattggtaaaccatggaatagactcgtctttcttggaaaaactagagacagaagttcaagaattcttcaatctccctatgaaagagaagcagaagttgtggcagagaagtggtgaatttgaaggatttggacaagtgaacattgtctcggagaatcagaaactcgattggggagacatgtttatcctcaccactgaaccaattcgatcacgtaaatctcacttgttctccaaattacctcctcctttcagagaaactttagagacttactcctctgaagtgaagagcatagctaagattctgtttgcgaaaatggcgagtgttctagagatcaaacacgaagaaatggaagatttgtttgatgatgtttggcaatctatcaagattaattactacccgccatgtccacagccagatcaagttatgggtttgactcaacattcagacgctgcaggtctcacaatactcttacaggtgaatcaagtggaaggacttcagatcaagaaagacggcaagtgggttgtcgtaaaacctcttcgagatgctttagttgttaatgttggcgaaatcttagagatcataacaaacgggagatatcgaagcatcgagcatagagcggtggtgaattcagagaaagagaggttatcggttgcgatgtttcatagtcccggaaaggagacaatcattcgtcctgcgaaaagccttgtagataggcagaagcaatgtttgttcaaaagtatgagcacacaagagtactttgatgccttctttactcaaaaactcaatgggaaatctcaccttgatcttatgcgtatttaagg

SEQ ID NO: 90931 - protein, 356 aa, Arabidopsis thaliana
  peptide (1)..(356): Ceres Seq. ID no. 12725774
  misc_feature (207)..(307): Pfam Name: 2OG-Fe(II) oxygenase superfamily Pfam Description: 2OG-Fe(II) oxygenase superfamily
  misc_feature (1)..(356): Homolog of NCBI NO: 15218400 NR Description: flavanone 3-hydroxylase, putative; protein id: supported by cDNA: gi_13507544, supported by cDNA: gi_15293284
  misc_feature (1)..(356): Homolog of NCBI NO: 15219988 NR Description: SRG1-like protein; protein id: At1g17020.1,
  misc_feature (1)..(356): Homolog of NCBI NO: 15219986 NR Description: SRG1-like protein; protein id: At1g17010.1
  misc_feature (1)..(356): Homolog of NCBI NO: 26451337 NR Description: SRG1 like protein [Arabidopsis thaliana]
  misc_feature (1)..(356): Homolog of NCBI NO: 15235014 NR Description: SRG1-like protein; protein id: At4g25300.1
  misc_feature (1)..(356): Homolog of NCBI NO: 15235017 NR Description: SRG1-like protein; protein id: At4g25310.1
  misc_feature (1)..(356): Homolog of NCBI NO: 25285681 NR Description: SRG1 homolog [imported] - Arabidopsis thaliana
  misc_feature (5)..(356): Homolog of NCBI NO: 37536804 NR Description: putative ethylene-forming enzyme [Oryza sativa
  misc_feature (29)..(356): Homolog of NCBI NO: 40736992 NR Description: putative oxidoreductase [Oryza sativa (japonica
  misc_feature (6)..(329): Homolog of NCBI NO: 34898470 NR Description: ESTs D47168(S12332),D46350(S10967) correspond to
MEAEGEKQWSSLIVPFVLEIVKEKNFTTIPPRYVRVDQEKTEILNDSSLSSEIPVIDMTRLCSVSAMDSELKKLDFACQDWGFFQLVNHGIDSSFLEKLETEVQEFFNLPMKEKQKLWQRSGEFEGFGQVNIVSENQKLDWGDMFILTTEPIRSRKSHLFSKLPPPFRETLETYSSEVKSIAKILFAKMASVLEIKHEEMEDLFDDVWQSIKINYYPPCPQPDQVMGLTQHSDAAGLTILLQVNQVEGLQIKKDGKWVVVKPLRDALVVNVGEILEIITNGRYRSIEHRAVVNSEKERLSVAMFHSPGKETIIRPAKSLVDRQKQCLFKSMSTQEYFDAFFTQKLNGKSHLDLMRI

SEQ ID NO: 90932 - protein, 299 aa, Arabidopsis thaliana
  peptide (1)..(299): Ceres Seq. ID no. 12725775
  misc_feature (150)..(250): Pfam Name: 2OG-Fe(II) oxygenase superfamily Pfam Description: 2OG-Fe(II) oxygenase superfamily
  misc_feature (1)..(299): Homolog of NCBI NO: 15218400 NR Description: flavanone 3-hydroxylase, putative; protein id: supported by cDNA: gi_13507544, supported by cDNA: gi_15293284
  misc_feature (1)..(299): Homolog of NCBI NO: 15219988 NR Description: SRG1-like protein; protein id: At1g17020.1,
  misc_feature (1)..(299): Homolog of NCBI NO: 15219986 NR Description: SRG1-like protein; protein id: At1g17010.1
  misc_feature (1)..(299): Homolog of NCBI NO: 26451337 NR Description: SRG1 like protein [Arabidopsis thaliana]
  misc_feature (1)..(299): Homolog of NCBI NO: 15235014 NR Description: SRG1-like protein; protein id: At4g25300.1
  misc_feature (1)..(299): Homolog of NCBI NO: 15235017 NR Description: SRG1-like protein; protein id: At4g25310.1
  misc_feature (1)..(299): Homolog of NCBI NO: 25285681 NR Description: SRG1 homolog [imported] - Arabidopsis thaliana
  misc_feature (1)..(299): Homolog of NCBI NO: 37536804 NR Description: putative ethylene-forming enzyme [Oryza sativa
  misc_feature (1)..(299): Homolog of NCBI NO: 40736992 NR Description: putative oxidoreductase [Oryza sativa (japonica
  misc_feature (1)..(272): Homolog of NCBI NO: 34898470 NR Description: ESTs D47168(S12332),D46350(S10967) correspond to
MTRLCSVSAMDSELKKLDFACQDWGFFQLVNHGIDSSFLEKLETEVQEFFNLPMKEKQKLWQRSGEFEGFGQVNIVSENQKLDWGDMFILTTEPIRSRKSHLFSKLPPPFRETLETYSSEVKSIAKILFAKMASVLEIKHEEMEDLFDDVWQSIKINYYPPCPQPDQVMGLTQHSDAAGLTILLQVNQVEGLQIKKDGKWVVVKPLRDALVVNVGEILEIITNGRYRSIEHRAVVNSEKERLSVAMFHSPGKETIIRPAKSLVDRQKQCLFKSMSTQEYFDAFFTQKLNGKSHLDLMRI

SEQ ID NO: 90933 - protein, 290 aa, Arabidopsis thaliana
  peptide (1)..(290): Ceres Seq. ID no. 12725776
  misc_feature (141)..(241): Pfam Name: 2OG-Fe(II) oxygenase superfamily Pfam Description: 2OG-Fe(II) oxygenase superfamily
  misc_feature (1)..(290): Homolog of NCBI NO: 15218400 NR Description: flavanone 3-hydroxylase, putative; protein id: supported by cDNA: gi_13507544, supported by cDNA: gi_15293284
  misc_feature (1)..(290): Homolog of NCBI NO: 15219988 NR Description: SRG1-like protein; protein id: At1g17020.1,
  misc_feature (1)..(290): Homolog of NCBI NO: 15219986 NR Description: SRG1-like protein; protein id: At1g17010.1
  misc_feature (1)..(290): Homolog of NCBI NO: 26451337 NR Description: SRG1 like protein [Arabidopsis thaliana]
  misc_feature (1)..(290): Homolog of NCBI NO: 15235014 NR Description: SRG1-like protein; protein id: At4g25300.1
  misc_feature (1)..(290): Homolog of NCBI NO: 15235017 NR Description: SRG1-like protein; protein id: At4g25310.1
  misc_feature (1)..(290): Homolog of NCBI NO: 25285681 NR Description: SRG1 homolog [imported] - Arabidopsis thaliana
  misc_feature (1)..(290): Homolog of NCBI NO: 37536804 NR Description: putative ethylene-forming enzyme [Oryza sativa
  misc_feature (1)..(290): Homolog of NCBI NO: 40736992 NR Description: putative oxidoreductase [Oryza sativa (japonica
  misc_feature (1)..(263): Homolog of NCBI NO: 34898470 NR Description: ESTs D47168(S12332),D46350(S10967) correspond to
MDSELKKLDFACQDWGFFQLVNHGIDSSFLEKLETEVQEFFNLPMKEKQKLWQRSGEFEGFGQVNIVSENQKLDWGDMFILTTEPIRSRKSHLFSKLPPPFRETLETYSSEVKSIAKILFAKMASVLEIKHEEMEDLFDDVWQSIKINYYPPCPQPDQVMGLTQHSDAAGLTILLQVNQVEGLQIKKDGKWVVVKPLRDALVVNVGEILEIITNGRYRSIEHRAVVNSEKERLSVAMFHSPGKETIIRPAKSLVDRQKQCLFKSMSTQEYFDAFFTQKLNGKSHLDLMRI

SEQ ID NO: 90934 - DNA, 2571 bp, Arabidopsis thaliana
  misc_feature (1)..(2571): Ceres Seq. ID no. 12725777
  misc_feature: MA Experiment ID: 20000169 Result: Up-regulated in Transcription
  misc_feature: MA Experiment 20000169 PARAMETER Experiment Name: At_100uM_ABA_P Parameter: Age (day) Value: 14
  misc_feature: MA Experiment 20000169 PARAMETER Experiment Name: At_100uM_ABA_P Parameter: Organism Value: A. thaliana
  misc_feature: MA Experiment 20000169 PARAMETER Experiment Name: At_100uM_ABA_P Parameter: Plant Line Value: WS
  misc_feature: MA Experiment 20000169 PARAMETER Experiment Name: At_100uM_ABA_P Parameter: Timepoint (hr) Value: 6
  misc_feature: MA Experiment 20000169 PARAMETER Experiment Name: At_100uM_ABA_P Parameter: Tissue Value: Aerial
  misc_feature: MA Experiment 20000169 PARAMETER Experiment Name: At_100uM_ABA_P Parameter: Treatment Value: 100uM ABA vs. No Treatment
  misc_feature: MA Experiment ID: 20000171 Result: Up-regulated in Transcription
  misc_feature: MA Experiment 20000171 PARAMETER Experiment Name: At_42deg_Heat_P Parameter: Age (day) Value: 14
  misc_feature: MA Experiment 20000171 PARAMETER Experiment Name: At_42deg_Heat_P Parameter: Organism Value: A. thaliana
  misc_feature: MA Experiment 20000171 PARAMETER Experiment Name: At_42deg_Heat_P Parameter: Plant Line Value: WS
  misc_feature: MA Experiment 20000171 PARAMETER Experiment Name: At_42deg_Heat_P Parameter: Temperature (deg C) Value: 42 vs. 22
  misc_feature: MA Experiment 20000171 PARAMETER Experiment Name: At_42deg_Heat_P Parameter: Timepoint (hr) Value: 1
  misc_feature: MA Experiment 20000171 PARAMETER Experiment Name: At_42deg_Heat_P Parameter: Tissue Value: Aerial
  misc_feature: MA Experiment ID: 20000234 Result: Up-regulated in Transcription
  misc_feature: MA Experiment 20000234 PARAMETER Experiment Name: At_Siliques_P Parameter: Age (day) Value: 21
  misc_feature: MA Experiment 20000234 PARAMETER Experiment Name: At_Siliques_P Parameter: Organism Value: A. thaliana
  misc_feature: MA Experiment 20000234 PARAMETER Experiment Name: At_Siliques_P Parameter: Plant Line Value: WS
  misc_feature: MA Experiment 20000234 PARAMETER Experiment Name: At_Siliques_P Parameter: Tissue Value: Less Than 5mm Siliques vs. Whole Plant
  misc_feature: MA Experiment ID: 20000264 Result: Up-regulated in Transcription
  misc_feature: MA Experiment 20000264 PARAMETER Experiment Name: At_Open_Flower_P Parameter: Age (day) Value: 21
  misc_feature: MA Experiment 20000264 PARAMETER Experiment Name: At_Open_Flower_P Parameter: Plant Line Value: WS
  misc_feature: MA Experiment 20000264 PARAMETER Experiment Name: At_Open_Flower_P Parameter: Tissue Value: Open Flower vs. Whole Plant
  misc_feature: MA Experiment ID: 20000268 Result: Up-regulated in Transcription
  misc_feature: MA Experiment 20000268 PARAMETER Experiment Name: At_100mM_NaCl__P Parameter: Age (day) Value: 14
  misc_feature: MA Experiment 20000268 PARAMETER Experiment Name: At_100mM_NaCl__P Parameter: Organism Value: A. thaliana
  misc_feature: MA Experiment 20000268 PARAMETER Experiment Name: At_100mM_NaCl__P Parameter: Plant Line Value: WS
  misc_feature: MA Experiment 20000268 PARAMETER Experiment Name: At_100mM_NaCl__P Parameter: Timepoint (hr) Value: 6
  misc_feature: MA Experiment 20000268 PARAMETER Experiment Name: At_100mM_NaCl__P Parameter: Tissue Value: Whole Plant
  misc_feature: MA Experiment 20000268 PARAMETER Experiment Name: At_100mM_NaCl__P Parameter: Treatment Value: 100mM NaCl vs. No Treatment
  misc_feature: MA Experiment ID: 20000436 Result: Up-regulated in Transcription
  misc_feature: MA Experiment 20000436 PARAMETER Experiment Name: At_Drought_P Parameter: Age (day) Value: 7
  misc_feature: MA Experiment 20000436 PARAMETER Experiment Name: At_Drought_P Parameter: Organism Value: A. thaliana
  misc_feature: MA Experiment 20000436 PARAMETER Experiment Name: At_Drought_P Parameter: Plant Line Value: WS
  misc_feature: MA Experiment 20000436 PARAMETER Experiment Name: At_Drought_P Parameter: Timepoint (hr) Value: 12
  misc_feature: MA Experiment 20000436 PARAMETER Experiment Name: At_Drought_P Parameter: Tissue Value: Whole Plant
  misc_feature: MA Experiment 20000436 PARAMETER Experiment Name: At_Drought_P Parameter: Treatment Value: Drought vs. No Drought
  misc_feature: MA Experiment ID: 20000437 Result: Up-regulated in Transcription
  misc_feature: MA Experiment 20000437 PARAMETER Experiment Name: At_Drought_P Parameter: Age (day) Value: 8
  misc_feature: MA Experiment 20000437 PARAMETER Experiment Name: At_Drought_P Parameter: Organism Value: A. thaliana
  misc_feature: MA Experiment 20000437 PARAMETER Experiment Name: At_Drought_P Parameter: Plant Line Value: WS
  misc_feature: MA Experiment 20000437 PARAMETER Experiment Name: At_Drought_P Parameter: Timepoint (hr) Value: 24
  misc_feature: MA Experiment 20000437 PARAMETER Experiment Name: At_Drought_P Parameter: Tissue Value: Whole Plant
  misc_feature: MA Experiment 20000437 PARAMETER Experiment Name: At_Drought_P Parameter: Treatment Value: Drought vs. No Drought
  misc_feature: MA Experiment ID: 20000453 Result: Up-regulated in Transcription
  misc_feature: MA Experiment 20000453 PARAMETER Experiment Name: At_100uM_ABA_P Parameter: Age (day) Value: 15
  misc_feature: MA Experiment 20000453 PARAMETER Experiment Name: At_100uM_ABA_P Parameter: Organism Value: A. thaliana
  misc_feature: MA Experiment 20000453 PARAMETER Experiment Name: At_100uM_ABA_P Parameter: Plant Line Value: WS
  misc_feature: MA Experiment 20000453 PARAMETER Experiment Name: At_100uM_ABA_P Parameter: Timepoint (hr) Value: 24
  misc_feature: MA Experiment 20000453 PARAMETER Experiment Name: At_100uM_ABA_P Parameter: Tissue Value: Aerial
  misc_feature: MA Experiment 20000453 PARAMETER Experiment Name: At_100uM_ABA_P Parameter: Treatment Value: 100uM ABA vs. No Treatment
  misc_feature: MA Experiment ID: 20000455 Result: Up-regulated in Transcription
  misc_feature: MA Experiment 20000455 PARAMETER Experiment Name: At_100uM_ABA_P Parameter: Age (day) Value: 16
  misc_feature: MA Experiment 20000455 PARAMETER Experiment Name: At_100uM_ABA_P Parameter: Organism Value: A. thaliana
  misc_feature: MA Experiment 20000455 PARAMETER Experiment Name: At_100uM_ABA_P Parameter: Plant Line Value: WS
  misc_feature: MA Experiment 20000455 PARAMETER Experiment Name: At_100uM_ABA_P Parameter: Timepoint (hr) Value: 48
  misc_feature: MA Experiment 20000455 PARAMETER Experiment Name: At_100uM_ABA_P Parameter: Tissue Value: Aerial
  misc_feature: MA Experiment 20000455 PARAMETER Experiment Name: At_100uM_ABA_P Parameter: Treatment Value: 100uM ABA vs. No Treatment
  misc_feature: MA Experiment ID: 20000794 Result: Up-regulated in Transcription
  misc_feature: MA Experiment 20000794 PARAMETER Experiment Name: At_Petals_P Parameter: Age (day) Value: 23-25 days
  misc_feature: MA Experiment 20000794 PARAMETER Experiment Name: At_Petals_P Parameter: Plant Line Value: WS
  misc_feature: MA Experiment 20000794 PARAMETER Experiment Name: At_Petals_P Parameter: Tissue Value: Petals vs. Whole plant
  misc_feature: MA Experiment ID: 20001555 Result: Up-regulated in Transcription
  misc_feature: MA Experiment 20001555 PARAMETER Experiment Name: At_Drought_Soil_Dry_P Parameter: Age (day) Value: 24
  misc_feature: MA Experiment 20001555 PARAMETER Experiment Name: At_Drought_Soil_Dry_P Parameter: Organism Value: A. thaliana
  misc_feature: MA Experiment 20001555 PARAMETER Experiment Name: At_Drought_Soil_Dry_P Parameter: Plant Line Value: WS
  misc_feature: MA Experiment 20001555 PARAMETER Experiment Name: At_Drought_Soil_Dry_P Parameter: Post Timepoint (hr) Value: None
  misc_feature: MA Experiment 20001555 PARAMETER Experiment Name: At_Drought_Soil_Dry_P Parameter: Post-Treatment Value: None
  misc_feature: MA Experiment 20001555 PARAMETER Experiment Name: At_Drought_Soil_Dry_P Parameter: Timepoint (day) Value: 10
  misc_feature: MA Experiment 20001555 PARAMETER Experiment Name: At_Drought_Soil_Dry_P Parameter: Treatment Value: Drought vs. No Drought
  misc_feature: MA Experiment ID: 20001556 Result: Up-regulated in Transcription
  misc_feature: MA Experiment 20001556 PARAMETER Experiment Name: At_Drought_Soil_Dry_P Parameter: Age (day) Value: 26
  misc_feature: MA Experiment 20001556 PARAMETER Experiment Name: At_Drought_Soil_Dry_P Parameter: Organism Value: A. thaliana
  misc_feature: MA Experiment 20001556 PARAMETER Experiment Name: At_Drought_Soil_Dry_P Parameter: Plant Line Value: WS
  misc_feature: MA Experiment 20001556 PARAMETER Experiment Name: At_Drought_Soil_Dry_P Parameter: Post Timepoint (hr) Value: None
  misc_feature: MA Experiment 20001556 PARAMETER Experiment Name: At_Drought_Soil_Dry_P Parameter: Post-Treatment Value: None
  misc_feature: MA Experiment 20001556 PARAMETER Experiment Name: At_Drought_Soil_Dry_P Parameter: Timepoint (day) Value: 12
  misc_feature: MA Experiment 20001556 PARAMETER Experiment Name: At_Drought_Soil_Dry_P Parameter: Treatment Value: Drought vs. No Drought
  misc_feature: MA Experiment ID: 20001559 Result: Up-regulated in Transcription
  misc_feature: MA Experiment 20001559 PARAMETER Experiment Name: At_Drought_Soil_Dry_P Parameter: Age (day) Value: 28
  misc_feature: MA Experiment 20001559 PARAMETER Experiment Name: At_Drought_Soil_Dry_P Parameter: Organism Value: A. thaliana
  misc_feature: MA Experiment 20001559 PARAMETER Experiment Name: At_Drought_Soil_Dry_P Parameter: Plant Line Value: WS
  misc_feature: MA Experiment 20001559 PARAMETER Experiment Name: At_Drought_Soil_Dry_P Parameter: Post Timepoint (hr) Value: 29
  misc_feature: MA Experiment 20001559 PARAMETER Experiment Name: At_Drought_Soil_Dry_P Parameter: Post-Treatment Value: Re-Water vs. No Drought
  misc_feature: MA Experiment 20001559 PARAMETER Experiment Name: At_Drought_Soil_Dry_P Parameter: Timepoint (day) Value: 14
  misc_feature: MA Experiment 20001559 PARAMETER Experiment Name: At_Drought_Soil_Dry_P Parameter: Treatment Value: Drought vs. No Drought
  misc_feature: MA Experiment ID: 20001560 Result: Up-regulated in Transcription
  misc_feature: MA Experiment 20001560 PARAMETER Experiment Name: At_Drought_Soil_Dry_P Parameter: Age (day) Value: 28
  misc_feature: MA Experiment 20001560 PARAMETER Experiment Name: At_Drought_Soil_Dry_P Parameter: Organism Value: A. thaliana
  misc_feature: MA Experiment 20001560 PARAMETER Experiment Name: At_Drought_Soil_Dry_P Parameter: Plant Line Value: WS
  misc_feature: MA Experiment 20001560 PARAMETER Experiment Name: At_Drought_Soil_Dry_P Parameter: Post Timepoint (hr) Value: None
  misc_feature: MA Experiment 20001560 PARAMETER Experiment Name: At_Drought_Soil_Dry_P Parameter: Post-Treatment Value: None
  misc_feature: MA Experiment 20001560 PARAMETER Experiment Name: At_Drought_Soil_Dry_P Parameter: Timepoint (day) Value: 14
  misc_feature: MA Experiment 20001560 PARAMETER Experiment Name: At_Drought_Soil_Dry_P Parameter: Treatment Value: Drought vs. No Drought
  misc_feature: MA Experiment ID: 20001911 Result: Up-regulated in Transcription
  misc_feature: MA Experiment 20001911 PARAMETER Experiment Name: At_Drought_Reproduction_P Parameter: Age (day) Value: 40
  misc_feature: MA Experiment 20001911 PARAMETER Experiment Name: At_Drought_Reproduction_P Parameter: Organism Value: A. thaliana
  misc_feature: MA Experiment 20001911 PARAMETER Experiment Name: At_Drought_Reproduction_P Parameter: Plant Line Value: WS
  misc_feature: MA Experiment 20001911 PARAMETER Experiment Name: At_Drought_Reproduction_P Parameter: Timepoint (day) Value: 10
  misc_feature: MA Experiment 20001911 PARAMETER Experiment Name: At_Drought_Reproduction_P Parameter: Tissue Value: Flowers
  misc_feature: MA Experiment 20001911 PARAMETER Experiment Name: At_Drought_Reproduction_P Parameter: Treatment Value: Drought vs. No Drought
atggccgttgatgcggctgaccggcgagaagttatcgtcaaaatcgacggtgaaaacggaaacaacaatggagtctccggagagactgtaggaaagatatggagagacggaagctacgatttttggactgatggtgaaggtaacctcaacaaaggtcataatgctgcggcggttgattctgatagatccgccgccacgacgggggagcaacaaaaagatgagggttttgagtttcgtcgcggcgaagatcctcccacgaagctgattggtcagtttctccataaacagcaagcttccggtgagatttgtttagatatggacttaggtatggacgagcttcaatctagaggtttaactccggtatcggaatctccgagagtttctacaaaacgtgaccccgtgggaagacgagacagtcgcagtaataccaacaataacgatgatggagaagttgtcaagtgtagtggtaataatgctccgattcagagaagctctagcactttacttaagatgagaactaggtcacgtctttcggatccgccaacgcctcagttgccgccgcaaacggcggatatgaagtcgggtcggattccgaaatccgggcagatgaaatcaggtttttttggaaaaagccctaagactcaaggtgaggaagaagaagatgatccatttgcagcagaggatttaccagaagagtataggaaagataaacttagtctatggattgtgttggaatggttgagtttgattttgattatagctgggtttgtttgcactcttgcgataccttccttgcgtaagaagaaactctgggaacttcagctatggaaatgggagtcaatggttttagtgttgatctgtggtaggttagtctcgagctggattgtgaagattgttgtcttctttatcgaaaggaactttcttttgaggaaaagagttttgtatttcgtttatggtgtccgaaaagcggtgcagaattgcttatggttaggacttgttttactggcttggcatttcttgtttgatgagaaagtggctaaagcagcaaacactaaggcgcttcgtgttgtgactaagatctttgtgtgtttgttggttgggttcttgttgtggctcgtgaagacactgttggtcaaagttcttgcttcatcgtttcatatgagcacttacttcgataggattcaagagtctttgtttactcagtatgtgattgagacgctctcgggtcctcctttgattgagatccaaaaaaatgaggaagaggaagagagaatcagtgttgaggttaagaagtttcaaaatccagggggtgttgagattcagtcaggagctcagaaaagtccaatgaagaccgggaaaagcccgtttctctctcatgttctatctaatggaggagggggaggaggagaaaacaaagggattacgatcgatagccttcataagctgaatcctaagaatgtttccgcatggaaaatgaagaggctgatgaatataatccggaatggatcacttaccactttggatgaacagcttcaggatccaagcttggatgatgataaaggaaaccaaattagaagtgagtttgaggcaaagctcgctgcaagaaagatctttcataatgttgctaagccaggatcaaagttcatctatgcaaacgacataatgcggtttctgccagatgacgaagctttgaagactttaagtctctttgaaggagcatctgagacgaacaggatcagcaagtcatctcttaaaaactgggtggtgaatgcttttagagagagaagagctcttgcattgaccctaaacgacaccaaaacagcagtaaacaggcttcacaagatggtgaatatcgtggttgggatcatcatacttgttatctggcttatcatacttggaatcacttccaccaaattcctcgtcgtcatgagctcgcaagtcgtggttgtagcattcatatttggaaacatgtgcaagatagtatttgaatctatcatctacttgtttgtgatacatccgtttgatgtaggcgatcgatgtgaaattgatggagtccagatggttgtggaagagatgaacatattgacaacagttttcttgagatttgataaccagaaagtcgtgtacccgaacagtcttctctggactaaatccatcggaaattattaccgtagtcctgatatgggagatggtatcgaattctccatccacattactactccagctgagaaaatcatactcatcaaacagagaatcacaagttacattgagggcaagaaggatcattggtatccagcgccaatgatagtattcaaagacatggagtcattaaacagcgtgagaattgcggtttggccaacacatcgaatgaatcatcaagatatgggagagaaatgggctcgaaggtctcaacttgttgaagagattgccaaaatttgcagagagcttgacattgagtatagattgtatcctcttgatatcaatgtccgaaacttgcccacttctacggctttgcctgtttccgaccgtcttccaccaaactggagtgctccagcttctggcagcaactga

SEQ ID NO: 90935 - protein, 856 aa, Arabidopsis thaliana
  peptide (1)..(856): Ceres Seq. ID no. 12725778
  misc_feature (613)..(821): Pfam Name: Mechanosensitive ion channel Pfam Description: Mechanosensitive ion channel
  misc_feature (138)..(853): Homolog of NCBI NO: 15220793 NR Description: hypothetical protein; protein id: At1g53470.1
  misc_feature (1)..(148): Homolog of NCBI NO: 15220793 NR Description: hypothetical protein; protein id: At1g53470.1
  misc_feature (116)..(848): Homolog of NCBI NO: 11994592 NR Description: gb|AAD30575.1~gene_id:T21E2.7~strong similarity
  misc_feature (116)..(660): Homolog of NCBI NO: 15231928 NR Description: hypothetical protein; protein id: At3g14810.1
  misc_feature (647)..(848): Homolog of NCBI NO: 15231928 NR Description: hypothetical protein; protein id: At3g14810.1
  misc_feature (112)..(849): Homolog of NCBI NO: 15227342 NR Description: hypothetical protein; protein id: At2g17000.1
  misc_feature (186)..(848): Homolog of NCBI NO: 38345847 NR Description: OSJNBa0084K11.11 [Oryza sativa (japonica
  misc_feature (560)..(849): Homolog of NCBI NO: 30679840 NR Description: expressed protein [Arabidopsis thaliana]
  misc_feature (105)..(392): Homolog of NCBI NO: 30679840 NR Description: expressed protein [Arabidopsis thaliana]
  misc_feature (470)..(841): Homolog of NCBI NO: 18390104 NR Description: putative protein T30F21.6 [Sorghum bicolor]
MAVDAADRREVIVKIDGENGNNNGVSGETVGKIWRDGSYDFWTDGEGNLNKGHNAAAVDSDRSAATTGEQQKDEGFEFRRGEDPPTKLIGQFLHKQQASGEICLDMDLGMDELQSRGLTPVSESPRVSTKRDPVGRRDSRSNTNNNDDGEVVKCSGNNAPIQRSSSTLLKMRTRSRLSDPPTPQLPPQTADMKSGRIPKSGQMKSGFFGKSPKTQGEEEEDDPFAAEDLPEEYRKDKLSLWIVLEWLSLILIIAGFVCTLAIPSLRKKKLWELQLWKWESMVLVLICGRLVSSWIVKIVVFFIERNFLLRKRVLYFVYGVRKAVQNCLWLGLVLLAWHFLFDEKVAKAANTKALRVVTKIFVCLLVGFLLWLVKTLLVKVLASSFHMSTYFDRIQESLFTQYVIETLSGPPLIEIQKNEEEEERISVEVKKFQNPGGVEIQSGAQKSPMKTGKSPFLSHVLSNGGGGGGENKGITIDSLHKLNPKNVSAWKMKRLMNIIRNGSLTTLDEQLQDPSLDDDKGNQIRSEFEAKLAARKIFHNVAKPGSKFIYANDIMRFLPDDEALKTLSLFEGASETNRISKSSLKNWVVNAFRERRALALTLNDTKTAVNRLHKMVNIVVGIIILVIWLIILGITSTKFLVVMSSQVVVVAFIFGNMCKIVFESIIYLFVIHPFDVGDRCEIDGVQMVVEEMNILTTVFLRFDNQKVVYPNSLLWTKSIGNYYRSPDMGDGIEFSIHITTPAEKIILIKQRITSYIEGKKDHWYPAPMIVFKDMESLNSVRIAVWPTHRMNHQDMGEKWARRSQLVEEIAKICRELDIEYRLYPLDINVRNLPTSTALPVSDRLPPNWSAPASGSN

SEQ ID NO: 90936 - protein, 751 aa, Arabidopsis thaliana
  peptide (1)..(751): Ceres Seq. ID no. 12725779
  misc_feature (508)..(716): Pfam Name: Mechanosensitive ion channel Pfam Description: Mechanosensitive ion channel
  misc_feature (33)..(748): Homolog of NCBI NO: 15220793 NR Description: hypothetical protein; protein id: At1g53470.1
  misc_feature (1)..(43): Homolog of NCBI NO: 15220793 NR Description: hypothetical protein; protein id: At1g53470.1
  misc_feature (11)..(743): Homolog of NCBI NO: 11994592 NR Description: gb|AAD30575.1~gene_id:T21E2.7~strong similarity
  misc_feature (11)..(555): Homolog of NCBI NO: 15231928 NR Description: hypothetical protein; protein id: At3g14810.1
  misc_feature (542)..(743): Homolog of NCBI NO: 15231928 NR Description: hypothetical protein; protein id: At3g14810.1
  misc_feature (7)..(744): Homolog of NCBI NO: 15227342 NR Description: hypothetical protein; protein id: At2g17000.1
  misc_feature (81)..(743): Homolog of NCBI NO: 38345847 NR Description: OSJNBa0084K11.11 [Oryza sativa (japonica
  misc_feature (455)..(744): Homolog of NCBI NO: 30679840 NR Description: expressed protein [Arabidopsis thaliana]
  misc_feature (1)..(287): Homolog of NCBI NO: 30679840 NR Description: expressed protein [Arabidopsis thaliana]
  misc_feature (365)..(736): Homolog of NCBI NO: 18390104 NR Description: putative protein T30F21.6 [Sorghum bicolor]
MDLGMDELQSRGLTPVSESPRVSTKRDPVGRRDSRSNTNNNDDGEVVKCSGNNAPIQRSSSTLLKMRTRSRLSDPPTPQLPPQTADMKSGRIPKSGQMKSGFFGKSPKTQGEEEEDDPFAAEDLPEEYRKDKLSLWIVLEWLSLILIIAGFVCTLAIPSLRKKKLWELQLWKWESMVLVLICGRLVSSWIVKIVVFFIERNFLLRKRVLYFVYGVRKAVQNCLWLGLVLLAWHFLFDEKVAKAANTKALRVVTKIFVCLLVGFLLWLVKTLLVKVLASSFHMSTYFDRIQESLFTQYVIETLSGPPLIEIQKNEEEEERISVEVKKFQNPGGVEIQSGAQKSPMKTGKSPFLSHVLSNGGGGGGENKGITIDSLHKLNPKNVSAWKMKRLMNIIRNGSLTTLDEQLQDPSLDDDKGNQIRSEFEAKLAARKIFHNVAKPGSKFIYANDIMRFLPDDEALKTLSLFEGASETNRISKSSLKNWVVNAFRERRALALTLNDTKTAVNRLHKMVNIVVGIIILVIWLIILGITSTKFLVVMSSQVVVVAFIFGNMCKIVFESIIYLFVIHPFDVGDRCEIDGVQMVVEEMNILTTVFLRFDNQKVVYPNSLLWTKSIGNYYRSPDMGDGIEFSIHITTPAEKIILIKQRITSYIEGKKDHWYPAPMIVFKDMESLNSVRIAVWPTHRMNHQDMGEKWARRSQLVEEIAKICRELDIEYRLYPLDINVRNLPTSTALPVSDRLPPNWSAPASGSN

SEQ ID NO: 90937 - protein, 747 aa, Arabidopsis thaliana
  peptide (1)..(747): Ceres Seq. ID no. 12725780
  misc_feature (504)..(712): Pfam Name: Mechanosensitive ion channel Pfam Description: Mechanosensitive ion channel
  misc_feature (29)..(744): Homolog of NCBI NO: 15220793 NR Description: hypothetical protein; protein id: At1g53470.1
  misc_feature (1)..(39): Homolog of NCBI NO: 15220793 NR Description: hypothetical protein; protein id: At1g53470.1
  misc_feature (7)..(739): Homolog of NCBI NO: 11994592 NR Description: gb|AAD30575.1~gene_id:T21E2.7~strong similarity
  misc_feature (7)..(551): Homolog of NCBI NO: 15231928 NR Description: hypothetical protein; protein id: At3g14810.1
  misc_feature (538)..(739): Homolog of NCBI NO: 15231928 NR Description: hypothetical protein; protein id: At3g14810.1
  misc_feature (3)..(740): Homolog of NCBI NO: 15227342 NR Description: hypothetical protein; protein id: At2g17000.1
  misc_feature (77)..(739): Homolog of NCBI NO: 38345847 NR Description: OSJNBa0084K11.11 [Oryza sativa (japonica
  misc_feature (451)..(740): Homolog of NCBI NO: 30679840 NR Description: expressed protein [Arabidopsis thaliana]
  misc_feature (1)..(283): Homolog of NCBI NO: 30679840 NR Description: expressed protein [Arabidopsis thaliana]
  misc_feature (361)..(732): Homolog of NCBI NO: 18390104 NR Description: putative protein T30F21.6 [Sorghum bicolor]
MDELQSRGLTPVSESPRVSTKRDPVGRRDSRSNTNNNDDGEVVKCSGNNAPIQRSSSTLLKMRTRSRLSDPPTPQLPPQTADMKSGRIPKSGQMKSGFFGKSPKTQGEEEEDDPFAAEDLPEEYRKDKLSLWIVLEWLSLILIIAGFVCTLAIPSLRKKKLWELQLWKWESMVLVLICGRLVSSWIVKIVVFFIERNFLLRKRVLYFVYGVRKAVQNCLWLGLVLLAWHFLFDEKVAKAANTKALRVVTKIFVCLLVGFLLWLVKTLLVKVLASSFHMSTYFDRIQESLFTQYVIETLSGPPLIEIQKNEEEEERISVEVKKFQNPGGVEIQSGAQKSPMKTGKSPFLSHVLSNGGGGGGENKGITIDSLHKLNPKNVSAWKMKRLMNIIRNGSLTTLDEQLQDPSLDDDKGNQIRSEFEAKLAARKIFHNVAKPGSKFIYANDIMRFLPDDEALKTLSLFEGASETNRISKSSLKNWVVNAFRERRALALTLNDTKTAVNRLHKMVNIVVGIIILVIWLIILGITSTKFLVVMSSQVVVVAFIFGNMCKIVFESIIYLFVIHPFDVGDRCEIDGVQMVVEEMNILTTVFLRFDNQKVVYPNSLLWTKSIGNYYRSPDMGDGIEFSIHITTPAEKIILIKQRITSYIEGKKDHWYPAPMIVFKDMESLNSVRIAVWPTHRMNHQDMGEKWARRSQLVEEIAKICRELDIEYRLYPLDINVRNLPTSTALPVSDRLPPNWSAPASGSN

SEQ ID NO: 90938 - DNA, 1080 bp, Arabidopsis thaliana
  misc_feature (1)..(1080): Ceres Seq. ID no. 12725789
atgaatttccatcaggtcctctttctccttcttcttatttttcttgttgatttatcagattatggtgtcttagcagataagaccaatgatggttacaagaacgcaacaaagtgtaacatttaccaaggacgttggatttatgacaattcttctaatcctctttatggaacatcaacttgtccgttcattggattggattgccagaagtttggtcggccggacaagaactaccttcattaccgatggcaacccaccggatgtgacatcccaagattcaacggacgagatttcttaacaagattcaaagggaaaaaaatactgtttgtgggagattcactaagcaacaatatgtgggtgtcactaagttgcatgcttcacgcggccgttcctaacgctaagtataccttccaactcaacaagggcctctcaactttcaccattccagaatatggaatatctgtaaatttcctgaaaaatgggttcctggtggatttggtatcggacaaaacaagaggattgattctgaaattagattcgatcagtaggggaaatcaatggttgggatctgatgtcgccatctttaacacattccactggtggtctcacactggccgtgccaaaacatgggattattttcaaacgggagataaaatagtgaaagagatgaatagaatggaggctttcaagattgctttgacaacttggtctaaatggattgatcacaatatcgatccttcaaaaactagggttttctatcaaggcgtctctcccgttcacttaaatggtggtgaatggggtaaaccggggaagacttgcttgggtgagacggtaccagtgcaaggaccaagttaccccggacgacctaatgaaggtgaagctatagtgaaaagtgtgatcggaaggatggctaaaccagtggagctccttgatgtgacggctatgacggagatgaggaaggacggtcacccttccatctatgccggtggaggcgatcgcttaaacgactgcagccattggtgcctccctggagtcccagacgcttggaaccagctcctttatacagctcttctcagccactag

SEQ ID NO: 90939 - protein, 359 aa, Arabidopsis thaliana
  peptide (1)..(359): Ceres Seq. ID no. 12725790
  misc_feature (1)..(359): Homolog of NCBI NO: 15219157 NR Description: hypothetical protein; protein id: At1g78710.1
  misc_feature (38)..(358): Homolog of NCBI NO: 34911864 NR Description: OSJNBb0032K15.9 [Oryza sativa (japonica
  misc_feature (27)..(358): Homolog of NCBI NO: 21593142 NR Description: unknown [Arabidopsis thaliana]
  misc_feature (27)..(358): Homolog of NCBI NO: 28393769 NR Description: unknown protein [Arabidopsis thaliana]
  misc_feature (33)..(356): Homolog of NCBI NO: 18396930 NR Description: expressed protein; protein id: At1g29050.1, by cDNA: 30068., supported by cDNA: gi_18377637, supported by gi_20465654 [Arabidopsis thaliana] >gi|18377638|gb|AAL66969.1|
  misc_feature (6)..(356): Homolog of NCBI NO: 15224585 NR Description: hypothetical protein; protein id: At2g30900.1
  misc_feature (6)..(356): Homolog of NCBI NO: 30350855 NR Description: hypothetical protein At2g30900 [Arabidopsis
  misc_feature (8)..(358): Homolog of NCBI NO: 18406003 NR Description: expressed protein; protein id: At2g42570.1, by cDNA: 17752., supported by cDNA: gi_14334589, supported by
  misc_feature (31)..(356): Homolog of NCBI NO: 18403435 NR Description: expressed protein; protein id: At2g34070.1, by cDNA: 25519. [Arabidopsis thaliana] expressed protein [Arabidopsis thaliana]
  misc_feature (33)..(356): Homolog of NCBI NO: 25366741 NR Description: F28N24.24 protein - Arabidopsis thaliana
MNFHQVLFLLLLIFLVDLSDYGVLADKTNDGYKNATKCNIYQGRWIYDNSSNPLYGTSTCPFIGLDCQKFGRPDKNYLHYRWQPTGCDIPRFNGRDFLTRFKGKKILFVGDSLSNNMWVSLSCMLHAAVPNAKYTFQLNKGLSTFTIPEYGISVNFLKNGFLVDLVSDKTRGLILKLDSISRGNQWLGSDVAIFNTFHWWSHTGRAKTWDYFQTGDKIVKEMNRMEAFKIALTTWSKWIDHNIDPSKTRVFYQGVSPVHLNGGEWGKPGKTCLGETVPVQGPSYPGRPNEGEAIVKSVIGRMAKPVELLDVTAMTEMRKDGHPSIYAGGGDRLNDCSHWCLPGVPDAWNQLLYTALLSH

SEQ ID NO: 90940 - protein, 243 aa, Arabidopsis thaliana
  peptide (1)..(243): Ceres Seq. ID no. 12725791
  misc_feature (1)..(243): Homolog of NCBI NO: 15219157 NR Description: hypothetical protein; protein id: At1g78710.1
  misc_feature (1)..(242): Homolog of NCBI NO: 34911864 NR Description: OSJNBb0032K15.9 [Oryza sativa (japonica
  misc_feature (1)..(242): Homolog of NCBI NO: 21593142 NR Description: unknown [Arabidopsis thaliana]
  misc_feature (1)..(242): Homolog of NCBI NO: 28393769 NR Description: unknown protein [Arabidopsis thaliana]
  misc_feature (1)..(240): Homolog of NCBI NO: 18396930 NR Description: expressed protein; protein id: At1g29050.1, by cDNA: 30068., supported by cDNA: gi_18377637, supported by gi_20465654 [Arabidopsis thaliana] >gi|18377638|gb|AAL66969.1|
  misc_feature (1)..(240): Homolog of NCBI NO: 15224585 NR Description: hypothetical protein; protein id: At2g30900.1
  misc_feature (1)..(240): Homolog of NCBI NO: 30350855 NR Description: hypothetical protein At2g30900 [Arabidopsis
  misc_feature (1)..(242): Homolog of NCBI NO: 18406003 NR Description: expressed protein; protein id: At2g42570.1, by cDNA: 17752., supported by cDNA: gi_14334589, supported by
  misc_feature (1)..(240): Homolog of NCBI NO: 18403435 NR Description: expressed protein; protein id: At2g34070.1, by cDNA: 25519. [Arabidopsis thaliana] expressed protein [Arabidopsis thaliana]
  misc_feature (1)..(240): Homolog of NCBI NO: 25366741 NR Description: F28N24.24 protein - Arabidopsis thaliana
MWVSLSCMLHAAVPNAKYTFQLNKGLSTFTIPEYGISVNFLKNGFLVDLVSDKTRGLILKLDSISRGNQWLGSDVAIFNTFHWWSHTGRAKTWDYFQTGDKIVKEMNRMEAFKIALTTWSKWIDHNIDPSKTRVFYQGVSPVHLNGGEWGKPGKTCLGETVPVQGPSYPGRPNEGEAIVKSVIGRMAKPVELLDVTAMTEMRKDGHPSIYAGGGDRLNDCSHWCLPGVPDAWNQLLYTALLSH

SEQ ID NO: 90941 - protein, 236 aa, Arabidopsis thaliana
  peptide (1)..(236): Ceres Seq. ID no. 12725792
  misc_feature (1)..(236): Homolog of NCBI NO: 15219157 NR Description: hypothetical protein; protein id: At1g78710.1
  misc_feature (1)..(235): Homolog of NCBI NO: 34911864 NR Description: OSJNBb0032K15.9 [Oryza sativa (japonica
  misc_feature (1)..(235): Homolog of NCBI NO: 21593142 NR Description: unknown [Arabidopsis thaliana]
  misc_feature (1)..(235): Homolog of NCBI NO: 28393769 NR Description: unknown protein [Arabidopsis thaliana]
  misc_feature (1)..(233): Homolog of NCBI NO: 18396930 NR Description: expressed protein; protein id: At1g29050.1, by cDNA: 30068., supported by cDNA: gi_18377637, supported by gi_20465654 [Arabidopsis thaliana] >gi|18377638|gb|AAL66969.1|
  misc_feature (1)..(233): Homolog of NCBI NO: 15224585 NR Description: hypothetical protein; protein id: At2g30900.1
  misc_feature (1)..(233): Homolog of NCBI NO: 30350855 NR Description: hypothetical protein At2g30900 [Arabidopsis
  misc_feature (1)..(235): Homolog of NCBI NO: 18406003 NR Description: expressed protein; protein id: At2g42570.1, by cDNA: 17752., supported by cDNA: gi_14334589, supported by
  misc_feature (1)..(233): Homolog of NCBI NO: 18403435 NR Description: expressed protein; protein id: At2g34070.1, by cDNA: 25519. [Arabidopsis thaliana] expressed protein [Arabidopsis thaliana]
  misc_feature (1)..(233): Homolog of NCBI NO: 25366741 NR Description: F28N24.24 protein - Arabidopsis thaliana
MLHAAVPNAKYTFQLNKGLSTFTIPEYGISVNFLKNGFLVDLVSDKTRGLILKLDSISRGNQWLGSDVAIFNTFHWWSHTGRAKTWDYFQTGDKIVKEMNRMEAFKIALTTWSKWIDHNIDPSKTRVFYQGVSPVHLNGGEWGKPGKTCLGETVPVQGPSYPGRPNEGEAIVKSVIGRMAKPVELLDVTAMTEMRKDGHPSIYAGGGDRLNDCSHWCLPGVPDAWNQLLYTALLSH

SEQ ID NO: 90942 - DNA, 1368 bp, Arabidopsis thaliana
  misc_feature (1)..(1368): Ceres Seq. ID no. 12725820
  misc_feature: MA Experiment ID: 20000314 Result: Up-regulated in Transcription
  misc_feature: MA Experiment 20000314 PARAMETER Experiment Name: At_14day_Shoots-Roots_Sub_P Parameter: Age (day) Value: 14
  misc_feature: MA Experiment 20000314 PARAMETER Experiment Name: At_14day_Shoots-Roots_Sub_P Parameter: Organism Value: A. thaliana
  misc_feature: MA Experiment 20000314 PARAMETER Experiment Name: At_14day_Shoots-Roots_Sub_P Parameter: Plant Line Value: WS
  misc_feature: MA Experiment 20000314 PARAMETER Experiment Name: At_14day_Shoots-Roots_Sub_P Parameter: Tissue Value: Roots vs. Whole Plant
  misc_feature: MA Experiment ID: 20000355 Result: Down-regulated in Transcription
  misc_feature: MA Experiment 20000355 PARAMETER Experiment Name: At_Siliques_Sub_P Parameter: Age (day) Value: 21
  misc_feature: MA Experiment 20000355 PARAMETER Experiment Name: At_Siliques_Sub_P Parameter: Organism Value: A. thaliana
  misc_feature: MA Experiment 20000355 PARAMETER Experiment Name: At_Siliques_Sub_P Parameter: Plant Line Value: WS
  misc_feature: MA Experiment 20000355 PARAMETER Experiment Name: At_Siliques_Sub_P Parameter: Tissue Value: Less Than 5mm Siliques vs. Whole Plant
  misc_feature: MA Experiment ID: 20000440 Result: Down-regulated in Transcription
  misc_feature: MA Experiment 20000440 PARAMETER Experiment Name: At_Closed-Flower__Sub_P Parameter: Tissue Value: Closed Flower vs. Whole Plant
  misc_feature: MA Experiment ID: 20000634 Result: Down-regulated in Transcription
  misc_feature: MA Experiment 20000634 PARAMETER Experiment Name: At_10percent_PEG_Sub_P Parameter: Age (day) Value: 12
  misc_feature: MA Experiment 20000634 PARAMETER Experiment Name: At_10percent_PEG_Sub_P Parameter: Organism Value: A. thaliana
  misc_feature: MA Experiment 20000634 PARAMETER Experiment Name: At_10percent_PEG_Sub_P Parameter: Plant Line Value: WS
  misc_feature: MA Experiment 20000634 PARAMETER Experiment Name: At_10percent_PEG_Sub_P Parameter: Timepoint (day) Value: 12
  misc_feature: MA Experiment 20000634 PARAMETER Experiment Name: At_10percent_PEG_Sub_P Parameter: Tissue Value: Whole Plant
  misc_feature: MA Experiment 20000634 PARAMETER Experiment Name: At_10percent_PEG_Sub_P Parameter: Treatment Value: 10% PEG vs. No Treatment
atgggagaagcggcggagcaagcacgtggcttccacgtgaccaccaccaggaagcaagtcatcacggcggctcttcccctccaggaccactggctcccactctcgaacctcgacctcctccttcctcctctcaacgttcacgtttgcttttgctacaagaaaccacttcactttaccaacacagtggcttatgaaaccctcaagactgctttggcagagactctcgtctcctactacgcctttgccggcgagctcgtcaccaatcctaccggagaaccggagatcctctgcaacaaccgtggcgtagatttcgtggaagccggtgctgacgtggagctccgagagcttaacctgtatgatcctgatgaaagtattgccaagctagtccccatcaagaaacatggagtcatagcgatacaggtgactcaactgaaatgtgggagcatagttgtaggctgcacatttgatcatcgtgtagcggacgcgtattccatgaacatgttcctcttatcgtgggccgagatctcacgatcagatgtaccaatctcttgtgtaccatcttttcgaagatctttgctaaacccacgacgaccattggtcatggatccatctatagaccagatttatatgcctgtcacgtccttgccccctccacaggaaaccaccaatccagaaaatctccttgctagccgtatctattacatcaaagcaaacgcattacaagagctccaaactctagccagcagttcgaagaacggtaaaaggacaaaacttgaatcattcagcgcgtttctatggaaactcgtggcagaacacgctgcaaaagatccagtcccgatcaagacctcgaaactcgggatcgttgtggatggaaggaggagacttatggagaaagaaaacaatacttacttcggaaacgttctctcagtcccatttggtgggcagagaatcgatgacttgatcagcaagccactatcttgggtgaccgaagaggttcacagattcttgaagaaatcagtgaccaaagaacatttcttgaatttgatcgattgggttgagacttgccgaccaacacctgcggtttcaagaatctacagcgtcggatccgacgatggacctgcgtttgtggtttcttccggaaggagttttccagtgaaccaagtggatttcgggtggggctcaccggttttcggatcttaccatttcccatggggaggcagcgccggatacgttatgccgatgcccagttcagtggacgacagagattggatggtttacttgcaccttacgaaaggacagttgaggttcattgaggaagaggcttctcatgtgcttaaacctattgacaatgattatctcaagatttga

SEQ ID NO: 90943 - protein, 455 aa, Arabidopsis thaliana
  peptide (1)..(455): Ceres Seq. ID no. 12725821
  misc_feature (11)..(444): Pfam Name: Transferase family Pfam Description: Transferase family
  misc_feature (1)..(455): Homolog of NCBI NO: 7487911 NR Description: hypothetical protein YUP8H12R.39 - Arabidopsis
  misc_feature (1)..(455): Homolog of NCBI NO: 15219263 NR Description: hypothetical protein; protein id: At1g78990.1
  misc_feature (1)..(455): Homolog of NCBI NO: 15223333 NR Description: hypothetical protein; protein id: At1g32910.1
  misc_feature (7)..(455): Homolog of NCBI NO: 15237343 NR Description: putative protein; protein id: At5g16410.1
  misc_feature (1)..(453): Homolog of NCBI NO: 38567901 NR Description: OSJNBa0060N03.21 [Oryza sativa (japonica
  misc_feature (11)..(455): Homolog of NCBI NO: 15222365 NR Description: hypothetical protein; protein id: At1g31490.1
  misc_feature (26)..(439): Homolog of NCBI NO: 15239747 NR Description: anthranilate N-benzoyltransferase; protein id: supported by cDNA: 114130. [Arabidopsis thaliana]
  misc_feature (26)..(439): Homolog of NCBI NO: 21536883 NR Description: anthranilate N-benzoyltransferase [Arabidopsis
  misc_feature (35)..(419): Homolog of NCBI NO: 40644899 NR Description: hydroxycinnamoyl CoA quinate transferase
  misc_feature (35)..(439): Homolog of NCBI NO: 40644084 NR Description: hydroxycinnamoyl CoA quinate transferase
MGEAAEQARGFHVTTTRKQVITAALPLQDHWLPLSNLDLLLPPLNVHVCFCYKKPLHFTNTVAYETLKTALAETLVSYYAFAGELVTNPTGEPEILCNNRGVDFVEAGADVELRELNLYDPDESIAKLVPIKKHGVIAIQVTQLKCGSIVVGCTFDHRVADAYSMNMFLLSWAEISRSDVPISCVPSFRRSLLNPRRPLVMDPSIDQIYMPVTSLPPPQETTNPENLLASRIYYIKANALQELQTLASSSKNGKRTKLESFSAFLWKLVAEHAAKDPVPIKTSKLGIVVDGRRRLMEKENNTYFGNVLSVPFGGQRIDDLISKPLSWVTEEVHRFLKKSVTKEHFLNLIDWVETCRPTPAVSRIYSVGSDDGPAFVVSSGRSFPVNQVDFGWGSPVFGSYHFPWGGSAGYVMPMPSSVDDRDWMVYLHLTKGQLRFIEEEASHVLKPIDNDYLKI

SEQ ID NO: 90944 - protein, 291 aa, Arabidopsis thaliana
  peptide (1)..(291): Ceres Seq. ID no. 12725822
  misc_feature (1)..(280): Pfam Name: Transferase family Pfam Description: Transferase family
  misc_feature (1)..(291): Homolog of NCBI NO: 7487911 NR Description: hypothetical protein YUP8H12R.39 - Arabidopsis
  misc_feature (1)..(291): Homolog of NCBI NO: 15219263 NR Description: hypothetical protein; protein id: At1g78990.1
  misc_feature (1)..(291): Homolog of NCBI NO: 15223333 NR Description: hypothetical protein; protein id: At1g32910.1
  misc_feature (1)..(291): Homolog of NCBI NO: 15237343 NR Description: putative protein; protein id: At5g16410.1
  misc_feature (1)..(289): Homolog of NCBI NO: 38567901 NR Description: OSJNBa0060N03.21 [Oryza sativa (japonica
  misc_feature (1)..(291): Homolog of NCBI NO: 15222365 NR Description: hypothetical protein; protein id: At1g31490.1
  misc_feature (1)..(275): Homolog of NCBI NO: 15239747 NR Description: anthranilate N-benzoyltransferase; protein id: supported by cDNA: 114130. [Arabidopsis thaliana]
  misc_feature (1)..(275): Homolog of NCBI NO: 21536883 NR Description: anthranilate N-benzoyltransferase [Arabidopsis
  misc_feature (1)..(255): Homolog of NCBI NO: 40644899 NR Description: hydroxycinnamoyl CoA quinate transferase
  misc_feature (1)..(275): Homolog of NCBI NO: 40644084 NR Description: hydroxycinnamoyl CoA quinate transferase
MNMFLLSWAEISRSDVPISCVPSFRRSLLNPRRPLVMDPSIDQIYMPVTSLPPPQETTNPENLLASRIYYIKANALQELQTLASSSKNGKRTKLESFSAFLWKLVAEHAAKDPVPIKTSKLGIVVDGRRRLMEKENNTYFGNVLSVPFGGQRIDDLISKPLSWVTEEVHRFLKKSVTKEHFLNLIDWVETCRPTPAVSRIYSVGSDDGPAFVVSSGRSFPVNQVDFGWGSPVFGSYHFPWGGSAGYVMPMPSSVDDRDWMVYLHLTKGQLRFIEEEASHVLKPIDNDYLKI

SEQ ID NO: 90945 - protein, 289 aa, Arabidopsis thaliana
  peptide (1)..(289): Ceres Seq. ID no. 12725823
  misc_feature (1)..(278): Pfam Name: Transferase family Pfam Description: Transferase family
  misc_feature (1)..(289): Homolog of NCBI NO: 7487911 NR Description: hypothetical protein YUP8H12R.39 - Arabidopsis
  misc_feature (1)..(289): Homolog of NCBI NO: 15219263 NR Description: hypothetical protein; protein id: At1g78990.1
  misc_feature (1)..(289): Homolog of NCBI NO: 15223333 NR Description: hypothetical protein; protein id: At1g32910.1
  misc_feature (1)..(289): Homolog of NCBI NO: 15237343 NR Description: putative protein; protein id: At5g16410.1
  misc_feature (1)..(287): Homolog of NCBI NO: 38567901 NR Description: OSJNBa0060N03.21 [Oryza sativa (japonica
  misc_feature (1)..(289): Homolog of NCBI NO: 15222365 NR Description: hypothetical protein; protein id: At1g31490.1
  misc_feature (1)..(273): Homolog of NCBI NO: 15239747 NR Description: anthranilate N-benzoyltransferase; protein id: supported by cDNA: 114130. [Arabidopsis thaliana]
  misc_feature (1)..(273): Homolog of NCBI NO: 21536883 NR Description: anthranilate N-benzoyltransferase [Arabidopsis
  misc_feature (1)..(253): Homolog of NCBI NO: 40644899 NR Description: hydroxycinnamoyl CoA quinate transferase
  misc_feature (1)..(273): Homolog of NCBI NO: 40644084 NR Description: hydroxycinnamoyl CoA quinate transferase
MFLLSWAEISRSDVPISCVPSFRRSLLNPRRPLVMDPSIDQIYMPVTSLPPPQETTNPENLLASRIYYIKANALQELQTLASSSKNGKRTKLESFSAFLWKLVAEHAAKDPVPIKTSKLGIVVDGRRRLMEKENNTYFGNVLSVPFGGQRIDDLISKPLSWVTEEVHRFLKKSVTKEHFLNLIDWVETCRPTPAVSRIYSVGSDDGPAFVVSSGRSFPVNQVDFGWGSPVFGSYHFPWGGSAGYVMPMPSSVDDRDWMVYLHLTKGQLRFIEEEASHVLKPIDNDYLKI

SEQ ID NO: 90946 - DNA, 1701 bp, Arabidopsis thaliana
  misc_feature (1)..(1701): Ceres Seq. ID no. 12725828
  misc_feature: MA Experiment ID: 20000171 Result: Down-regulated in Transcription
  misc_feature: MA Experiment 20000171 PARAMETER Experiment Name: At_42deg_Heat_P Parameter: Age (day) Value: 14
  misc_feature: MA Experiment 20000171 PARAMETER Experiment Name: At_42deg_Heat_P Parameter: Organism Value: A. thaliana
  misc_feature: MA Experiment 20000171 PARAMETER Experiment Name: At_42deg_Heat_P Parameter: Plant Line Value: WS
  misc_feature: MA Experiment 20000171 PARAMETER Experiment Name: At_42deg_Heat_P Parameter: Temperature (deg C) Value: 42 vs. 22
  misc_feature: MA Experiment 20000171 PARAMETER Experiment Name: At_42deg_Heat_P Parameter: Timepoint (hr) Value: 1
  misc_feature: MA Experiment 20000171 PARAMETER Experiment Name: At_42deg_Heat_P Parameter: Tissue Value: Aerial
  misc_feature: MA Experiment ID: 20000173 Result: Down-regulated in Transcription
  misc_feature: MA Experiment 20000173 PARAMETER Experiment Name: At_42deg_Heat_P Parameter: Age (day) Value: 14
  misc_feature: MA Experiment 20000173 PARAMETER Experiment Name: At_42deg_Heat_P Parameter: Organism Value: A. thaliana
  misc_feature: MA Experiment 20000173 PARAMETER Experiment Name: At_42deg_Heat_P Parameter: Plant Line Value: WS
  misc_feature: MA Experiment 20000173 PARAMETER Experiment Name: At_42deg_Heat_P Parameter: Temperature (deg C) Value: 42 vs. 22
  misc_feature: MA Experiment 20000173 PARAMETER Experiment Name: At_42deg_Heat_P Parameter: Timepoint (hr) Value: 6
  misc_feature: MA Experiment 20000173 PARAMETER Experiment Name: At_42deg_Heat_P Parameter: Tissue Value: Aerial
  misc_feature: MA Experiment ID: 20000185 Result: Down-regulated in Transcription
  misc_feature: MA Experiment 20000185 PARAMETER Experiment Name: At_Roots__P Parameter: Age (day) Value: 7 vs. 21
  misc_feature: MA Experiment 20000185 PARAMETER Experiment Name: At_Roots__P Parameter: Organism Value: A. thaliana
  misc_feature: MA Experiment 20000185 PARAMETER Experiment Name: At_Roots__P Parameter: Tissue Value: Roots vs. Whole Plant
  misc_feature: MA Experiment ID: 20000439 Result: Down-regulated in Transcription
  misc_feature: MA Experiment 20000439 PARAMETER Experiment Name: At_Roots__P Parameter: Age (day) Value: 14 vs. 21
  misc_feature: MA Experiment 20000439 PARAMETER Experiment Name: At_Roots__P Parameter: Organism Value: A. thaliana
  misc_feature: MA Experiment 20000439 PARAMETER Experiment Name: At_Roots__P Parameter: Tissue Value: Roots vs. Whole Plant
  misc_feature: MA Experiment ID: 20001451 Result: Up-regulated in Transcription
  misc_feature: MA Experiment 20001451 PARAMETER Experiment Name: At_Far-red-induction_P Parameter: Age (day) Value: 7
  misc_feature: MA Experiment 20001451 PARAMETER Experiment Name: At_Far-red-induction_P Parameter: Light Value: Far-red vs. White
  misc_feature: MA Experiment 20001451 PARAMETER Experiment Name: At_Far-red-induction_P Parameter: Organism Value: A. thaliana
  misc_feature: MA Experiment 20001451 PARAMETER Experiment Name: At_Far-red-induction_P Parameter: Plant Line Value: Columbia
  misc_feature: MA Experiment 20001451 PARAMETER Experiment Name: At_Far-red-induction_P Parameter: Timepoint (hr) Value: 24
  misc_feature: MA Experiment 20001451 PARAMETER Experiment Name: At_Far-red-induction_P Parameter: Tissue Value: Whole Plant
atggcgtcaccggaatcatcgccgagaaaagccgtaggttttgtttcccacatcccttctggtttccttcatttctcctccgtcagtaaaggtgttgctagggttttagcttcgacccagataacattatcccctaaagactccgcctttaccattactggatccagttggaaacccgatttggattccgggtcgttttctgatgacccgagaagcgacgagccgaatttgagcgatagtttctctcatctagaaagtttagtcacgggagggcataaacccaatgtagctcattctactcagctcttgtacgatctctgcaaagccaatagattgaagaaagccattcgtgtgattgagcttatggttagctccgggattatacccgatgcatctgcttacacgtatttggttaatcagctttgtaaaagaggtaacgttggttatgcgatgcagcttgttgagaaaatggaagatcatggttatccttctaataccgttacttacaatgccttggttcgaggtctttgtatgcttggtagcttaaatcaaagcttacagtttgttgagaggttgatgcagaaaggcttagctccaaatgctttcacttattctttcttgcttgaagcagcttataaagaacgaggaaccgacgaagctgtgaagctcttagatgagatcattgtgaaaggcggtgaacccaatttggttagctataatgtgctgttgactggtttctgtaaagaagggagaacagacgatgccatggcgctgtttagggaattacctgcaaaagggtttaaggcaaatgttgtgagctataacattttgttgaggtgtttgtgctgtgatgggaggtgggaggaagcgaattcgctcttggctgagatggacggtggagatcgagctccttcagttgttacctataacatattgatcaattcgttagcttttcatggaagaacagagcaggcactgcaggttttaaaggagatgagcaaaggaaatcatcagtttagagtcactgccacgagctataatccggtgatcgcccgtctgtgcaaggaaggaaaagttgatcttgttgtgaaatgtctagacgagatgatataccggcgttgtaaaccaaacgaaggaacgtacaatgcaataggttcgttatgcgagcataacagcaaggtgcaggaagcgttttacataatacagagcttaagcaacaagcagaaatgctgcacgcatgatttctacaaaagcgtaatcacgagtctctgcaggaaaggtaacacctttgcagcgttccagctcttgtacgagatgactaggtgcgggtttgatcccgatgcgcacacctactcggctttgatcagagggctgtgtctggaagggatgtttacaggagccatggaggttttgtcgataatggaagagagtgagaattgtaaacctacagtggataactttaacgccatgatcctagggttgtgcaagataaggaggacagatttggcaatggaggtgtttgagatgatggttgagaagaagagaatgccgaatgagacaacatatgcgatactcgttgaagggatagctcatgaggatgaattggagctggctaaagaagttcttgatgagctacgattgcgtaaggttataggacagaacgcagtagataggattgtaatgcagttcaatttagattga

SEQ ID NO: 90947 - protein, 566 aa, Arabidopsis thaliana
  peptide (1)..(566): Ceres Seq. ID no. 12725829
  misc_feature (272)..(306): Pfam Name: PPR repeat Pfam Description: PPR repeat
  misc_feature (1)..(566): Homolog of NCBI NO: 7487907 NR Description: hypothetical protein YUP8H12R.30 - Arabidopsis >gi|3152594|gb|AAC17075.1| Contains repeats similar to RECA gb|L26100 from Acinetobacter calcoaceticus. [Arabidopsis
  misc_feature (1)..(566): Homolog of NCBI NO: 30699392 NR Description: pentatricopeptide (PPR) repeat-containing protein
  misc_feature (77)..(559): Homolog of NCBI NO: 15218325 NR Description: hypothetical protein; protein id: At1g09900.1
  misc_feature (76)..(565): Homolog of NCBI NO: 18397002 NR Description: expressed protein; protein id: At3g04760.1, by cDNA: gi_15810358 [Arabidopsis thaliana] hypothetical protein [Arabidopsis thaliana]
  misc_feature (52)..(545): Homolog of NCBI NO: 34910106 NR Description: B1100D10.28 [Oryza sativa (japonica
  misc_feature (132)..(550): Homolog of NCBI NO: 38605763 NR Description: OSJNBa0044K18.6 [Oryza sativa (japonica
  misc_feature (87)..(551): Homolog of NCBI NO: 34015232 NR Description: putative fertility restorer [Oryza sativa
  misc_feature (25)..(538): Homolog of NCBI NO: 9502388 NR Description: T12C24.15 [Arabidopsis thaliana]
  misc_feature (25)..(538): Homolog of NCBI NO: 18391414 NR Description: expressed protein; protein id: At1g12620.1, by cDNA: gi_13605504 [Arabidopsis thaliana] At1g12620/T12C24_25 [Arabidopsis thaliana]
  misc_feature (96)..(538): Homolog of NCBI NO: 25518293 NR Description: hypothetical protein F13K23.2 - Arabidopsis >gi|8698724|gb|AAF78482.1|AC012187_2 Contains similarity to an protein F16M19.7 gi|6598837 from Arabidopsis thaliana BAC
MASPESSPRKAVGFVSHIPSGFLHFSSVSKGVARVLASTQITLSPKDSAFTITGSSWKPDLDSGSFSDDPRSDEPNLSDSFSHLESLVTGGHKPNVAHSTQLLYDLCKANRLKKAIRVIELMVSSGIIPDASAYTYLVNQLCKRGNVGYAMQLVEKMEDHGYPSNTVTYNALVRGLCMLGSLNQSLQFVERLMQKGLAPNAFTYSFLLEAAYKERGTDEAVKLLDEIIVKGGEPNLVSYNVLLTGFCKEGRTDDAMALFRELPAKGFKANVVSYNILLRCLCCDGRWEEANSLLAEMDGGDRAPSVVTYNILINSLAFHGRTEQALQVLKEMSKGNHQFRVTATSYNPVIARLCKEGKVDLVVKCLDEMIYRRCKPNEGTYNAIGSLCEHNSKVQEAFYIIQSLSNKQKCCTHDFYKSVITSLCRKGNTFAAFQLLYEMTRCGFDPDAHTYSALIRGLCLEGMFTGAMEVLSIMEESENCKPTVDNFNAMILGLCKIRRTDLAMEVFEMMVEKKRMPNETTYAILVEGIAHEDELELAKEVLDELRLRKVIGQNAVDRIVMQFNLD

SEQ ID NO: 90948 - protein, 445 aa, Arabidopsis thaliana
  peptide (1)..(445): Ceres Seq. ID no. 12725830
  misc_feature (151)..(185): Pfam Name: PPR repeat Pfam Description: PPR repeat
  misc_feature (1)..(445): Homolog of NCBI NO: 30699392 NR Description: pentatricopeptide (PPR) repeat-containing protein
  misc_feature (1)..(445): Homolog of NCBI NO: 7487907 NR Description: hypothetical protein YUP8H12R.30 - Arabidopsis >gi|3152594|gb|AAC17075.1| Contains repeats similar to RECA gb|L26100 from Acinetobacter calcoaceticus. [Arabidopsis
  misc_feature (1)..(438): Homolog of NCBI NO: 15218325 NR Description: hypothetical protein; protein id: At1g09900.1
  misc_feature (1)..(444): Homolog of NCBI NO: 18397002 NR Description: expressed protein; protein id: At3g04760.1, by cDNA: gi_15810358 [Arabidopsis thaliana] hypothetical protein [Arabidopsis thaliana]
  misc_feature (1)..(424): Homolog of NCBI NO: 34910106 NR Description: B1100D10.28 [Oryza sativa (japonica
  misc_feature (11)..(429): Homolog of NCBI NO: 38605763 NR Description: OSJNBa0044K18.6 [Oryza sativa (japonica
  misc_feature (1)..(430): Homolog of NCBI NO: 34015232 NR Description: putative fertility restorer [Oryza sativa
  misc_feature (1)..(417): Homolog of NCBI NO: 9502388 NR Description: T12C24.15 [Arabidopsis thaliana]
  misc_feature (1)..(417): Homolog of NCBI NO: 18391414 NR Description: expressed protein; protein id: At1g12620.1, by cDNA: gi_13605504 [Arabidopsis thaliana] At1g12620/T12C24_25 [Arabidopsis thaliana]
  misc_feature (1)..(417): Homolog of NCBI NO: 25518293 NR Description: hypothetical protein F13K23.2 - Arabidopsis >gi|8698724|gb|AAF78482.1|AC012187_2 Contains similarity to an protein F16M19.7 gi|6598837 from Arabidopsis thaliana BAC
MVSSGIIPDASAYTYLVNQLCKRGNVGYAMQLVEKMEDHGYPSNTVTYNALVRGLCMLGSLNQSLQFVERLMQKGLAPNAFTYSFLLEAAYKERGTDEAVKLLDEIIVKGGEPNLVSYNVLLTGFCKEGRTDDAMALFRELPAKGFKANVVSYNILLRCLCCDGRWEEANSLLAEMDGGDRAPSVVTYNILINSLAFHGRTEQALQVLKEMSKGNHQFRVTATSYNPVIARLCKEGKVDLVVKCLDEMIYRRCKPNEGTYNAIGSLCEHNSKVQEAFYIIQSLSNKQKCCTHDFYKSVITSLCRKGNTFAAFQLLYEMTRCGFDPDAHTYSALIRGLCLEGMFTGAMEVLSIMEESENCKPTVDNFNAMILGLCKIRRTDLAMEVFEMMVEKKRMPNETTYAILVEGIAHEDELELAKEVLDELRLRKVIGQNAVDRIVMQFNLD

SEQ ID NO: 90949 - protein, 416 aa, Arabidopsis thaliana
  peptide (1)..(416): Ceres Seq. ID no. 12725831
  misc_feature (122)..(156): Pfam Name: PPR repeat Pfam Description: PPR repeat
  misc_feature (1)..(416): Homolog of NCBI NO: 30699392 NR Description: pentatricopeptide (PPR) repeat-containing protein
  misc_feature (1)..(416): Homolog of NCBI NO: 7487907 NR Description: hypothetical protein YUP8H12R.30 - Arabidopsis >gi|3152594|gb|AAC17075.1| Contains repeats similar to RECA gb|L26100 from Acinetobacter calcoaceticus. [Arabidopsis
  misc_feature (1)..(409): Homolog of NCBI NO: 15218325 NR Description: hypothetical protein; protein id: At1g09900.1
  misc_feature (1)..(415): Homolog of NCBI NO: 18397002 NR Description: expressed protein; protein id: At3g04760.1, by cDNA: gi_15810358 [Arabidopsis thaliana] hypothetical protein [Arabidopsis thaliana]
  misc_feature (1)..(395): Homolog of NCBI NO: 34910106 NR Description: B1100D10.28 [Oryza sativa (japonica
  misc_feature (1)..(400): Homolog of NCBI NO: 38605763 NR Description: OSJNBa0044K18.6 [Oryza sativa (japonica
  misc_feature (1)..(401): Homolog of NCBI NO: 34015232 NR Description: putative fertility restorer [Oryza sativa
  misc_feature (1)..(388): Homolog of NCBI NO: 9502388 NR Description: T12C24.15 [Arabidopsis thaliana]
  misc_feature (1)..(388): Homolog of NCBI NO: 18391414 NR Description: expressed protein; protein id: At1g12620.1, by cDNA: gi_13605504 [Arabidopsis thaliana] At1g12620/T12C24_25 [Arabidopsis thaliana]
  misc_feature (1)..(388): Homolog of NCBI NO: 25518293 NR Description: hypothetical protein F13K23.2 - Arabidopsis >gi|8698724|gb|AAF78482.1|AC012187_2 Contains similarity to an protein F16M19.7 gi|6598837 from Arabidopsis thaliana BAC
MQLVEKMEDHGYPSNTVTYNALVRGLCMLGSLNQSLQFVERLMQKGLAPNAFTYSFLLEAAYKERGTDEAVKLLDEIIVKGGEPNLVSYNVLLTGFCKEGRTDDAMALFRELPAKGFKANVVSYNILLRCLCCDGRWEEANSLLAEMDGGDRAPSVVTYNILINSLAFHGRTEQALQVLKEMSKGNHQFRVTATSYNPVIARLCKEGKVDLVVKCLDEMIYRRCKPNEGTYNAIGSLCEHNSKVQEAFYIIQSLSNKQKCCTHDFYKSVITSLCRKGNTFAAFQLLYEMTRCGFDPDAHTYSALIRGLCLEGMFTGAMEVLSIMEESENCKPTVDNFNAMILGLCKIRRTDLAMEVFEMMVEKKRMPNETTYAILVEGIAHEDELELAKEVLDELRLRKVIGQNAVDRIVMQFNLD

SEQ ID NO: 90950 - DNA, 936 bp, Arabidopsis thaliana
  misc_feature (1)..(936): Ceres Seq. ID no. 12725836
  misc_feature: MA Experiment ID: 20000179 Result: Down-regulated in Transcription
  misc_feature: MA Experiment 20000179 PARAMETER Experiment Name: At_Germinating_Seeds_P Parameter: Age (hr) Value: 6 vs. 0
  misc_feature: MA Experiment 20000179 PARAMETER Experiment Name: At_Germinating_Seeds_P Parameter: Tissue Value: Germinating Seeds
  misc_feature: MA Experiment ID: 20000180 Result: Down-regulated in Transcription
  misc_feature: MA Experiment 20000180 PARAMETER Experiment Name: At_Germinating_Seeds_P Parameter: Age (hr) Value: 24 vs. 0
  misc_feature: MA Experiment 20000180 PARAMETER Experiment Name: At_Germinating_Seeds_P Parameter: Tissue Value: Germinating Seeds
  misc_feature: MA Experiment ID: 20000227 Result: Up-regulated in Transcription
  misc_feature: MA Experiment 20000227 PARAMETER Experiment Name: At_Root-Tips-vs-Tops_P Parameter: Tissue Value: Root Tips vs. Root Tops
  misc_feature: MA Experiment ID: 20000234 Result: Up-regulated in Transcription
  misc_feature: MA Experiment 20000234 PARAMETER Experiment Name: At_Siliques_P Parameter: Age (day) Value: 21
  misc_feature: MA Experiment 20000234 PARAMETER Experiment Name: At_Siliques_P Parameter: Organism Value: A. thaliana
  misc_feature: MA Experiment 20000234 PARAMETER Experiment Name: At_Siliques_P Parameter: Plant Line Value: WS
  misc_feature: MA Experiment 20000234 PARAMETER Experiment Name: At_Siliques_P Parameter: Tissue Value: Less Than 5mm Siliques vs. Whole Plant
  misc_feature: MA Experiment ID: 20000264 Result: Up-regulated in Transcription
  misc_feature: MA Experiment 20000264 PARAMETER Experiment Name: At_Open_Flower_P Parameter: Age (day) Value: 21
  misc_feature: MA Experiment 20000264 PARAMETER Experiment Name: At_Open_Flower_P Parameter: Plant Line Value: WS
  misc_feature: MA Experiment 20000264 PARAMETER Experiment Name: At_Open_Flower_P Parameter: Tissue Value: Open Flower vs. Whole Plant
  misc_feature: MA Experiment ID: 20000265 Result: Up-regulated in Transcription
  misc_feature: MA Experiment 20000265 PARAMETER Experiment Name: At_Open_Flower_P Parameter: Age (day) Value: 21
  misc_feature: MA Experiment 20000265 PARAMETER Experiment Name: At_Open_Flower_P Parameter: Plant Line Value: WS
  misc_feature: MA Experiment 20000265 PARAMETER Experiment Name: At_Open_Flower_P Parameter: Tissue Value: Closed Flower vs. Whole Plant
  misc_feature: MA Experiment ID: 20000439 Result: Up-regulated in Transcription
  misc_feature: MA Experiment 20000439 PARAMETER Experiment Name: At_Roots__P Parameter: Age (day) Value: 14 vs. 21
  misc_feature: MA Experiment 20000439 PARAMETER Experiment Name: At_Roots__P Parameter: Organism Value: A. thaliana
  misc_feature: MA Experiment 20000439 PARAMETER Experiment Name: At_Roots__P Parameter: Tissue Value: Roots vs. Whole Plant
  misc_feature: MA Experiment ID: 20001458 Result: Up-regulated in Transcription
  misc_feature: MA Experiment 20001458 PARAMETER Experiment Name: At_50mM_NH4NO3_L-to-H_P Parameter: Age (day) Value: Undefined
  misc_feature: MA Experiment 20001458 PARAMETER Experiment Name: At_50mM_NH4NO3_L-to-H_P Parameter: Organism Value: Undefined
  misc_feature: MA Experiment 20001458 PARAMETER Experiment Name: At_50mM_NH4NO3_L-to-H_P Parameter: Plant Line Value: Undefined
  misc_feature: MA Experiment 20001458 PARAMETER Experiment Name: At_50mM_NH4NO3_L-to-H_P Parameter: Timepoint (hr) Value: 2
  misc_feature: MA Experiment 20001458 PARAMETER Experiment Name: At_50mM_NH4NO3_L-to-H_P Parameter: Tissue Value: Siliques
  misc_feature: MA Experiment 20001458 PARAMETER Experiment Name: At_50mM_NH4NO3_L-to-H_P Parameter: Treatment Value: 50mM NH4NO3 vs. 100mM Manitol
  misc_feature: MA Experiment ID: 20001557 Result: Up-regulated in Transcription
  misc_feature: MA Experiment 20001557 PARAMETER Experiment Name: At_Drought_Soil_Dry_P Parameter: Age (day) Value: 27
  misc_feature: MA Experiment 20001557 PARAMETER Experiment Name: At_Drought_Soil_Dry_P Parameter: Organism Value: A. thaliana
  misc_feature: MA Experiment 20001557 PARAMETER Experiment Name: At_Drought_Soil_Dry_P Parameter: Plant Line Value: WS
  misc_feature: MA Experiment 20001557 PARAMETER Experiment Name: At_Drought_Soil_Dry_P Parameter: Post Timepoint (hr) Value: 3
  misc_feature: MA Experiment 20001557 PARAMETER Experiment Name: At_Drought_Soil_Dry_P Parameter: Post-Treatment Value: Re-Water vs. No Drought
  misc_feature: MA Experiment 20001557 PARAMETER Experiment Name: At_Drought_Soil_Dry_P Parameter: Timepoint (day) Value: 13
  misc_feature: MA Experiment 20001557 PARAMETER Experiment Name: At_Drought_Soil_Dry_P Parameter: Treatment Value: Drought vs. No Drought
  misc_feature: MA Experiment ID: 20001558 Result: Up-regulated in Transcription
  misc_feature: MA Experiment 20001558 PARAMETER Experiment Name: At_Drought_Soil_Dry_P Parameter: Age (day) Value: 27
  misc_feature: MA Experiment 20001558 PARAMETER Experiment Name: At_Drought_Soil_Dry_P Parameter: Organism Value: A. thaliana
  misc_feature: MA Experiment 20001558 PARAMETER Experiment Name: At_Drought_Soil_Dry_P Parameter: Plant Line Value: WS
  misc_feature: MA Experiment 20001558 PARAMETER Experiment Name: At_Drought_Soil_Dry_P Parameter: Post Timepoint (hr) Value: 6
  misc_feature: MA Experiment 20001558 PARAMETER Experiment Name: At_Drought_Soil_Dry_P Parameter: Post-Treatment Value: Re-Water vs. No Drought
  misc_feature: MA Experiment 20001558 PARAMETER Experiment Name: At_Drought_Soil_Dry_P Parameter: Timepoint (day) Value: 13
  misc_feature: MA Experiment 20001558 PARAMETER Experiment Name: At_Drought_Soil_Dry_P Parameter: Treatment Value: Drought vs. No Drought
  misc_feature: MA Experiment ID: 20001560 Result: Up-regulated in Transcription
  misc_feature: MA Experiment 20001560 PARAMETER Experiment Name: At_Drought_Soil_Dry_P Parameter: Age (day) Value: 28
  misc_feature: MA Experiment 20001560 PARAMETER Experiment Name: At_Drought_Soil_Dry_P Parameter: Organism Value: A. thaliana
  misc_feature: MA Experiment 20001560 PARAMETER Experiment Name: At_Drought_Soil_Dry_P Parameter: Plant Line Value: WS
  misc_feature: MA Experiment 20001560 PARAMETER Experiment Name: At_Drought_Soil_Dry_P Parameter: Post Timepoint (hr) Value: None
  misc_feature: MA Experiment 20001560 PARAMETER Experiment Name: At_Drought_Soil_Dry_P Parameter: Post-Treatment Value: None
  misc_feature: MA Experiment 20001560 PARAMETER Experiment Name: At_Drought_Soil_Dry_P Parameter: Timepoint (day) Value: 14
  misc_feature: MA Experiment 20001560 PARAMETER Experiment Name: At_Drought_Soil_Dry_P Parameter: Treatment Value: Drought vs. No Drought
  misc_feature: MA Experiment ID: 20001757 Result: Up-regulated in Transcription
  misc_feature: MA Experiment 20001757 PARAMETER Experiment Name: At_50mM_NH4NO3_L-to-H_P Parameter: Timepoint (hr) Value: 6
  misc_feature: MA Experiment 20001757 PARAMETER Experiment Name: At_50mM_NH4NO3_L-to-H_P Parameter: Tissue Value: Leaf
  misc_feature: MA Experiment 20001757 PARAMETER Experiment Name: At_50mM_NH4NO3_L-to-H_P Parameter: Treatment Value: 50mM NH4NO3 vs 100mM Mannitol
atgggagatctaatgaactatctcaagaagcttgcttctagcagtagcagcgtctccaacaacacaaagcagaaaaactcaaaactgttgacagtatctgaacgccttaggtgttgccttgtcgccttcaaagtcatgaggagcaacttaaatgccttgaatgttgacttgcaagacttctttgtccaactttacaacctcattctcgagtaccgccctggaagagattcaggtgtaatcttggctgagtctctgaagataatgttgtgcgacgacagacatcaagacatgcaaaaagcagctgcatttgtaaaacgtttagccacattcgcgctatgctttggatgtgccgaatctatgtctgcgctagtcactttgaaaactctgcttcagaagaacgtgaaatgcagaaaccttctagagaacgatgctggaggcggctctgtttccggttcaattgcaaaatatcagccgtatgcaacagatcctaacctaagcggggctttagcaacagtgctttgggaactcagtctcttgagtaaacattatcatcctgcgatctcaacaatggccacaacagtctccaacatgaacacttctcagagccaaacatttctttctgcagtgactccacaacaggcttttgcagatttctctcttgtaaaggaatcgtttgagccgaagaacgagtctcggaaattgaacaacaaacggaaacgggagagtttgcctgaagaagctaagaatgttccggaaatagacatggttaagctcagcaagaaattgaaagagaactttactattcttcgggatataaaagaggacgagagagtgagaatggagttgttgcagtctgaagagaaaaaaccattgaagaaacagaacaacgtggtgaagaagaaacttaagaaccctaaatccaaaaagcaaatttga

SEQ ID NO: 90951 - protein, 311 aa, Arabidopsis thaliana
  peptide (1)..(311): Ceres Seq. ID no. 12725837
  misc_feature (150)..(193): Pfam Name: CBF/Mak21 family Pfam Description: CBF/Mak21 family
  misc_feature (1)..(311): Homolog of NCBI NO: 7487900 NR Description: hypothetical protein YUP8H12R.24 - Arabidopsis >gi|3152566|gb|AAC17047.1| Similar to hypothetical protein
  misc_feature (1)..(311): Homolog of NCBI NO: 15219298 NR Description: unknown protein; protein id: At1g79140.1
  misc_feature (30)..(247): Homolog of NCBI NO: 7208452 NR Description: unknown [Mus musculus]
  misc_feature (30)..(247): Homolog of NCBI NO: 23956108 NR Description: cDNA sequence AF233884; cDNA sequence, AF233884 musculus] >gi|18389431|dbj|BAB84193.1| AD24 [Mus musculus]
  misc_feature (30)..(247): Homolog of NCBI NO: 34877840 NR Description: similar to AD24 [Rattus norvegicus]
  misc_feature (30)..(239): Homolog of NCBI NO: 10439934 NR Description: unnamed protein product [Homo sapiens]
  misc_feature (30)..(261): Homolog of NCBI NO: 14039964 NR Description: hypothetical protein 1-2 [Cricetulus griseus]
  misc_feature (30)..(239): Homolog of NCBI NO: 10434534 NR Description: unnamed protein product [Homo sapiens]
  misc_feature (30)..(239): Homolog of NCBI NO: 20806097 NR Description: AD24 protein [Homo sapiens] bA146P21.2 (novel protein) [Homo sapiens] AD24 [Homo sapiens] >gi|29436383|gb|AAH49850.1| AD24 protein
  misc_feature (34)..(227): Homolog of NCBI NO: 21358345 NR Description: CG1234-PA [Drosophila melanogaster]
MGDLMNYLKKLASSSSSVSNNTKQKNSKLLTVSERLRCCLVAFKVMRSNLNALNVDLQDFFVQLYNLILEYRPGRDSGVILAESLKIMLCDDRHQDMQKAAAFVKRLATFALCFGCAESMSALVTLKTLLQKNVKCRNLLENDAGGGSVSGSIAKYQPYATDPNLSGALATVLWELSLLSKHYHPAISTMATTVSNMNTSQSQTFLSAVTPQQAFADFSLVKESFEPKNESRKLNNKRKRESLPEEAKNVPEIDMVKLSKKLKENFTILRDIKEDERVRMELLQSEEKKPLKKQNNVVKKKLKNPKSKKQI

SEQ ID NO: 90952 - protein, 307 aa, Arabidopsis thaliana
  peptide (1)..(307): Ceres Seq. ID no. 12725838
  misc_feature (146)..(189): Pfam Name: CBF/Mak21 family Pfam Description: CBF/Mak21 family
  misc_feature (1)..(307): Homolog of NCBI NO: 7487900 NR Description: hypothetical protein YUP8H12R.24 - Arabidopsis >gi|3152566|gb|AAC17047.1| Similar to hypothetical protein
  misc_feature (1)..(307): Homolog of NCBI NO: 15219298 NR Description: unknown protein; protein id: At1g79140.1
  misc_feature (26)..(243): Homolog of NCBI NO: 7208452 NR Description: unknown [Mus musculus]
  misc_feature (26)..(243): Homolog of NCBI NO: 23956108 NR Description: cDNA sequence AF233884; cDNA sequence, AF233884 musculus] >gi|18389431|dbj|BAB84193.1| AD24 [Mus musculus]
  misc_feature (26)..(243): Homolog of NCBI NO: 34877840 NR Description: similar to AD24 [Rattus norvegicus]
  misc_feature (26)..(235): Homolog of NCBI NO: 10439934 NR Description: unnamed protein product [Homo sapiens]
  misc_feature (26)..(257): Homolog of NCBI NO: 14039964 NR Description: hypothetical protein 1-2 [Cricetulus griseus]
  misc_feature (26)..(235): Homolog of NCBI NO: 10434534 NR Description: unnamed protein product [Homo sapiens]
  misc_feature (26)..(235): Homolog of NCBI NO: 20806097 NR Description: AD24 protein [Homo sapiens] bA146P21.2 (novel protein) [Homo sapiens] AD24 [Homo sapiens] >gi|29436383|gb|AAH49850.1| AD24 protein
  misc_feature (30)..(223): Homolog of NCBI NO: 21358345 NR Description: CG1234-PA [Drosophila melanogaster]
MNYLKKLASSSSSVSNNTKQKNSKLLTVSERLRCCLVAFKVMRSNLNALNVDLQDFFVQLYNLILEYRPGRDSGVILAESLKIMLCDDRHQDMQKAAAFVKRLATFALCFGCAESMSALVTLKTLLQKNVKCRNLLENDAGGGSVSGSIAKYQPYATDPNLSGALATVLWELSLLSKHYHPAISTMATTVSNMNTSQSQTFLSAVTPQQAFADFSLVKESFEPKNESRKLNNKRKRESLPEEAKNVPEIDMVKLSKKLKENFTILRDIKEDERVRMELLQSEEKKPLKKQNNVVKKKLKNPKSKKQI

SEQ ID NO: 90953 - protein, 266 aa, Arabidopsis thaliana
  peptide (1)..(266): Ceres Seq. ID no. 12725839
  misc_feature (105)..(148): Pfam Name: CBF/Mak21 family Pfam Description: CBF/Mak21 family
  misc_feature (1)..(266): Homolog of NCBI NO: 7487900 NR Description: hypothetical protein YUP8H12R.24 - Arabidopsis >gi|3152566|gb|AAC17047.1| Similar to hypothetical protein
  misc_feature (1)..(266): Homolog of NCBI NO: 15219298 NR Description: unknown protein; protein id: At1g79140.1
  misc_feature (1)..(202): Homolog of NCBI NO: 7208452 NR Description: unknown [Mus musculus]
  misc_feature (1)..(202): Homolog of NCBI NO: 23956108 NR Description: cDNA sequence AF233884; cDNA sequence, AF233884 musculus] >gi|18389431|dbj|BAB84193.1| AD24 [Mus musculus]
  misc_feature (1)..(202): Homolog of NCBI NO: 34877840 NR Description: similar to AD24 [Rattus norvegicus]
  misc_feature (1)..(194): Homolog of NCBI NO: 10439934 NR Description: unnamed protein product [Homo sapiens]
  misc_feature (1)..(216): Homolog of NCBI NO: 14039964 NR Description: hypothetical protein 1-2 [Cricetulus griseus]
  misc_feature (1)..(194): Homolog of NCBI NO: 10434534 NR Description: unnamed protein product [Homo sapiens]
  misc_feature (1)..(194): Homolog of NCBI NO: 20806097 NR Description: AD24 protein [Homo sapiens] bA146P21.2 (novel protein) [Homo sapiens] AD24 [Homo sapiens] >gi|29436383|gb|AAH49850.1| AD24 protein
  misc_feature (1)..(182): Homolog of NCBI NO: 21358345 NR Description: CG1234-PA [Drosophila melanogaster]
MRSNLNALNVDLQDFFVQLYNLILEYRPGRDSGVILAESLKIMLCDDRHQDMQKAAAFVKRLATFALCFGCAESMSALVTLKTLLQKNVKCRNLLENDAGGGSVSGSIAKYQPYATDPNLSGALATVLWELSLLSKHYHPAISTMATTVSNMNTSQSQTFLSAVTPQQAFADFSLVKESFEPKNESRKLNNKRKRESLPEEAKNVPEIDMVKLSKKLKENFTILRDIKEDERVRMELLQSEEKKPLKKQNNVVKKKLKNPKSKKQI

SEQ ID NO: 90954 - DNA, 1143 bp, Arabidopsis thaliana
  misc_feature (1)..(1143): Ceres Seq. ID no. 12725850
  misc_feature: MA Experiment ID: 20000185 Result: Up-regulated in Transcription
  misc_feature: MA Experiment 20000185 PARAMETER Experiment Name: At_Roots__P Parameter: Age (day) Value: 7 vs. 21
  misc_feature: MA Experiment 20000185 PARAMETER Experiment Name: At_Roots__P Parameter: Organism Value: A. thaliana
  misc_feature: MA Experiment 20000185 PARAMETER Experiment Name: At_Roots__P Parameter: Tissue Value: Roots vs. Whole Plant
  misc_feature: MA Experiment ID: 20000439 Result: Up-regulated in Transcription
  misc_feature: MA Experiment 20000439 PARAMETER Experiment Name: At_Roots__P Parameter: Age (day) Value: 14 vs. 21
  misc_feature: MA Experiment 20000439 PARAMETER Experiment Name: At_Roots__P Parameter: Organism Value: A. thaliana
  misc_feature: MA Experiment 20000439 PARAMETER Experiment Name: At_Roots__P Parameter: Tissue Value: Roots vs. Whole Plant
atgaaagtcgaagcttttattcccgccgttttattgctctgttttggggtaatgttatgtttaaaaagctcgtgtgcgttgcagataggtaacaataatgagttgaagaattacataagttgggaagatttgagagttgtggaagatggaagaatagagagaagttttagcattaaggagaatagtaattgggtaaccacaaacgctaacgctaacgcgaacgctactaacgtgagaagagtgattgtggttgataaaaacggaggaggagattctgttacagttcaaggagctgttgatatggttcctgattccaattcacagagagttaaaatcttcattcttcctgggatttacagggagaaggtgattgtgccgaaatcaaaaccgtatatttcgttcataggtaatgagagctatgcgggagatacagtgattagttggagcgataaagcttcagaccttggctgcgatggtaaagaactcggcacttatagaaccgcctctgtttccattgaatctgatttcttctgtgctactgccatcacttttgagaacacggtggttgcagaggcaggggaacaggggaggcaagcggtggcgttgagaataattggggacaaagctgtgttctatagagttagggttttgggatcacaagacactctttttgatgacaatggatctcactacttttaccaatgctatatccaaggcaatgtagatttcatctttggcaatgcgaaatcactttaccaggactgtgatatccactcaaccgcaaagagatatggcgcgatcgcggctcatcatagagactcggagactgaagataccgggttctcctttgtgaactgtgatatcagtggtactgggcagatttacttaggaagggcttggggaaactactcaagaactgtttattcaaactgtttcatagctgatattatcactcctgtgggctggagtgactggaaacaccctgagaggcaaaggaaagtgatgttcggggagtacaattgcaggggaagaggagcagagagaggaggccgagtaccgtggtcgaaaactcttaccagagatgaagtgaagccttttctgggaagagagttcatatatggagatcaatggctgagactctaa

SEQ ID NO: 90955 - protein, 380 aa, Arabidopsis thaliana
  peptide (1)..(380): Ceres Seq. ID no. 12725851
  misc_feature (81)..(375): Pfam Name: Pectinesterase Pfam Description: Pectinesterase
  misc_feature (1)..(380): Homolog of NCBI NO: 15240544 NR Description: pectinesterase family; protein id: At5g55590.1 thaliana] >gi|9758593|dbj|BAB09226.1| contains similarity to
  misc_feature (78)..(378): Homolog of NCBI NO: 38345478 NR Description: OSJNBa0010H02.16 [Oryza sativa (japonica
  misc_feature (82)..(380): Homolog of NCBI NO: 34909402 NR Description: putative pectin methylesterase [Oryza sativa
  misc_feature (80)..(378): Homolog of NCBI NO: 15238111 NR Description: pectinesterase family; protein id: At5g47500.1, by cDNA: gi_20856814 [Arabidopsis thaliana] AT5g47500/MNJ7_9 [Arabidopsis thaliana]
  misc_feature (80)..(378): Homolog of NCBI NO: 9758778 NR Description: pectin methylesterase-like [Arabidopsis thaliana]
  misc_feature (86)..(380): Homolog of NCBI NO: 15241163 NR Description: pectinesterase family; protein id: At5g19730.1, by cDNA: gi_17529289, supported by cDNA: gi_20465498 [Arabidopsis >gi|17529290|gb|AAL38872.1| putative pectin methylesterase
  misc_feature (76)..(379): Homolog of NCBI NO: 15220471 NR Description: pectinesterase family; protein id: At1g05310.1
  misc_feature (81)..(379): Homolog of NCBI NO: 15228023 NR Description: pectinesterase family; protein id: At2g36710.1
  misc_feature (76)..(379): Homolog of NCBI NO: 25325338 NR Description: hypothetical protein [imported] - Arabidopsis >gi|2388565|gb|AAB71446.1| Similar to Prunus pectinesterase
  misc_feature (81)..(379): Homolog of NCBI NO: 27754550 NR Description: putative pectinesterase family protein
MKVEAFIPAVLLLCFGVMLCLKSSCALQIGNNNELKNYISWEDLRVVEDGRIERSFSIKENSNWVTTNANANANATNVRRVIVVDKNGGGDSVTVQGAVDMVPDSNSQRVKIFILPGIYREKVIVPKSKPYISFIGNESYAGDTVISWSDKASDLGCDGKELGTYRTASVSIESDFFCATAITFENTVVAEAGEQGRQAVALRIIGDKAVFYRVRVLGSQDTLFDDNGSHYFYQCYIQGNVDFIFGNAKSLYQDCDIHSTAKRYGAIAAHHRDSETEDTGFSFVNCDISGTGQIYLGRAWGNYSRTVYSNCFIADIITPVGWSDWKHPERQRKVMFGEYNCRGRGAERGGRVPWSKTLTRDEVKPFLGREFIYGDQWLRL

SEQ ID NO: 90956 - protein, 363 aa, Arabidopsis thaliana
  peptide (1)..(363): Ceres Seq. ID no. 12725852
  misc_feature (64)..(358): Pfam Name: Pectinesterase Pfam Description: Pectinesterase
  misc_feature (1)..(363): Homolog of NCBI NO: 15240544 NR Description: pectinesterase family; protein id: At5g55590.1 thaliana] >gi|9758593|dbj|BAB09226.1| contains similarity to
  misc_feature (61)..(361): Homolog of NCBI NO: 38345478 NR Description: OSJNBa0010H02.16 [Oryza sativa (japonica
  misc_feature (65)..(363): Homolog of NCBI NO: 34909402 NR Description: putative pectin methylesterase [Oryza sativa
  misc_feature (63)..(361): Homolog of NCBI NO: 15238111 NR Description: pectinesterase family; protein id: At5g47500.1, by cDNA: gi_20856814 [Arabidopsis thaliana] AT5g47500/MNJ7_9 [Arabidopsis thaliana]
  misc_feature (63)..(361): Homolog of NCBI NO: 9758778 NR Description: pectin methylesterase-like [Arabidopsis thaliana]
  misc_feature (69)..(363): Homolog of NCBI NO: 15241163 NR Description: pectinesterase family; protein id: At5g19730.1, by cDNA: gi_17529289, supported by cDNA: gi_20465498 [Arabidopsis >gi|17529290|gb|AAL38872.1| putative pectin methylesterase
  misc_feature (59)..(362): Homolog of NCBI NO: 15220471 NR Description: pectinesterase family; protein id: At1g05310.1
  misc_feature (64)..(362): Homolog of NCBI NO: 15228023 NR Description: pectinesterase family; protein id: At2g36710.1
  misc_feature (59)..(362): Homolog of NCBI NO: 25325338 NR Description: hypothetical protein [imported] - Arabidopsis >gi|2388565|gb|AAB71446.1| Similar to Prunus pectinesterase
  misc_feature (64)..(362): Homolog of NCBI NO: 27754550 NR Description: putative pectinesterase family protein
MLCLKSSCALQIGNNNELKNYISWEDLRVVEDGRIERSFSIKENSNWVTTNANANANATNVRRVIVVDKNGGGDSVTVQGAVDMVPDSNSQRVKIFILPGIYREKVIVPKSKPYISFIGNESYAGDTVISWSDKASDLGCDGKELGTYRTASVSIESDFFCATAITFENTVVAEAGEQGRQAVALRIIGDKAVFYRVRVLGSQDTLFDDNGSHYFYQCYIQGNVDFIFGNAKSLYQDCDIHSTAKRYGAIAAHHRDSETEDTGFSFVNCDISGTGQIYLGRAWGNYSRTVYSNCFIADIITPVGWSDWKHPERQRKVMFGEYNCRGRGAERGGRVPWSKTLTRDEVKPFLGREFIYGDQWLRL

SEQ ID NO: 90957 - protein, 280 aa, Arabidopsis thaliana
  peptide (1)..(280): Ceres Seq. ID no. 12725853
  misc_feature (1)..(275): Pfam Name: Pectinesterase Pfam Description: Pectinesterase
  misc_feature (1)..(280): Homolog of NCBI NO: 15240544 NR Description: pectinesterase family; protein id: At5g55590.1 thaliana] >gi|9758593|dbj|BAB09226.1| contains similarity to
  misc_feature (1)..(278): Homolog of NCBI NO: 38345478 NR Description: OSJNBa0010H02.16 [Oryza sativa (japonica
  misc_feature (1)..(280): Homolog of NCBI NO: 34909402 NR Description: putative pectin methylesterase [Oryza sativa
  misc_feature (1)..(278): Homolog of NCBI NO: 15238111 NR Description: pectinesterase family; protein id: At5g47500.1, by cDNA: gi_20856814 [Arabidopsis thaliana] AT5g47500/MNJ7_9 [Arabidopsis thaliana]
  misc_feature (1)..(278): Homolog of NCBI NO: 9758778 NR Description: pectin methylesterase-like [Arabidopsis thaliana]
  misc_feature (1)..(280): Homolog of NCBI NO: 15241163 NR Description: pectinesterase family; protein id: At5g19730.1, by cDNA: gi_17529289, supported by cDNA: gi_20465498 [Arabidopsis >gi|17529290|gb|AAL38872.1| putative pectin methylesterase
  misc_feature (1)..(279): Homolog of NCBI NO: 15220471 NR Description: pectinesterase family; protein id: At1g05310.1
  misc_feature (1)..(279): Homolog of NCBI NO: 15228023 NR Description: pectinesterase family; protein id: At2g36710.1
  misc_feature (1)..(279): Homolog of NCBI NO: 25325338 NR Description: hypothetical protein [imported] - Arabidopsis >gi|2388565|gb|AAB71446.1| Similar to Prunus pectinesterase
  misc_feature (1)..(279): Homolog of NCBI NO: 27754550 NR Description: putative pectinesterase family protein
MVPDSNSQRVKIFILPGIYREKVIVPKSKPYISFIGNESYAGDTVISWSDKASDLGCDGKELGTYRTASVSIESDFFCATAITFENTVVAEAGEQGRQAVALRIIGDKAVFYRVRVLGSQDTLFDDNGSHYFYQCYIQGNVDFIFGNAKSLYQDCDIHSTAKRYGAIAAHHRDSETEDTGFSFVNCDISGTGQIYLGRAWGNYSRTVYSNCFIADIITPVGWSDWKHPERQRKVMFGEYNCRGRGAERGGRVPWSKTLTRDEVKPFLGREFIYGDQWLRL

SEQ ID NO: 90958 - DNA, 944 bp, Arabidopsis thaliana
  misc_feature (1)..(944): Ceres Seq. ID no. 12725866
  misc_feature: MA Experiment ID: 20001557 Result: Down-regulated in Transcription
  misc_feature: MA Experiment 20001557 PARAMETER Experiment Name: At_Drought_Soil_Dry_P Parameter: Age (day) Value: 27
  misc_feature: MA Experiment 20001557 PARAMETER Experiment Name: At_Drought_Soil_Dry_P Parameter: Organism Value: A. thaliana
  misc_feature: MA Experiment 20001557 PARAMETER Experiment Name: At_Drought_Soil_Dry_P Parameter: Plant Line Value: WS
  misc_feature: MA Experiment 20001557 PARAMETER Experiment Name: At_Drought_Soil_Dry_P Parameter: Post Timepoint (hr) Value: 3
  misc_feature: MA Experiment 20001557 PARAMETER Experiment Name: At_Drought_Soil_Dry_P Parameter: Post-Treatment Value: Re-Water vs. No Drought
  misc_feature: MA Experiment 20001557 PARAMETER Experiment Name: At_Drought_Soil_Dry_P Parameter: Timepoint (day) Value: 13
  misc_feature: MA Experiment 20001557 PARAMETER Experiment Name: At_Drought_Soil_Dry_P Parameter: Treatment Value: Drought vs. No Drought
  misc_feature: MA Experiment ID: 20001558 Result: Down-regulated in Transcription
  misc_feature: MA Experiment 20001558 PARAMETER Experiment Name: At_Drought_Soil_Dry_P Parameter: Age (day) Value: 27
  misc_feature: MA Experiment 20001558 PARAMETER Experiment Name: At_Drought_Soil_Dry_P Parameter: Organism Value: A. thaliana
  misc_feature: MA Experiment 20001558 PARAMETER Experiment Name: At_Drought_Soil_Dry_P Parameter: Plant Line Value: WS
  misc_feature: MA Experiment 20001558 PARAMETER Experiment Name: At_Drought_Soil_Dry_P Parameter: Post Timepoint (hr) Value: 6
  misc_feature: MA Experiment 20001558 PARAMETER Experiment Name: At_Drought_Soil_Dry_P Parameter: Post-Treatment Value: Re-Water vs. No Drought
  misc_feature: MA Experiment 20001558 PARAMETER Experiment Name: At_Drought_Soil_Dry_P Parameter: Timepoint (day) Value: 13
  misc_feature: MA Experiment 20001558 PARAMETER Experiment Name: At_Drought_Soil_Dry_P Parameter: Treatment Value: Drought vs. No Drought
ctgatcattcgccggagctaccattaagagactgagattcaatcatcagagttcaatggatgtcccgttaccagtcgagaaattatcttatggatcaaacactgaggacaaaacttgtgtagtgcttgtggcaactgggagtttcaatcctcctactttcatgcatttacgcatgtttgagctggcgagagatgaattacgctcaaaaggatttcatgttcttggaggatatatgtctcctgttaatgatgcatataagaagaagattatgtgtagggccttttatctgcagaacatcgtttagagatgtgtaatgtatcatgtcaaagctctgactttgtaatggttgatccgtgggaggcatctcaaagcaactaccaacgaactttgacggttttatcaagggtcaagactttcttaacaacaaatcgacatgtacccgaggaatctctcaaagtcatgctactatgtggctcggatttactgctatctttctgcactcccggtgtttggatccctgaacagttaagaactatttgcaaagattatggcattgtgtgcatccgtagagaaggacaagatgttgaaaatatgatctctggtgacgaaatcttaaacgaaaactgtgctaacgtcaaaatcgttgacaatactgttcctaatcaaatcagttcgagtagattaaggcaatgcatttcgcgagggttatcggttaaatacttgactgaagatggagtaatagattatatcagacaacatcaactatacactgagctcacatgacaaacgctgagaggattattatacttcatcagatcaaatattacaacacaactcatcaaataatggtgtgataaacagatcagatatatttgttgagtctctgtattttaaggttcttatttatcaactctttgtatcatattcatatgtacaacaaatgt

SEQ ID NO: 90959 - protein, 158 aa, Arabidopsis thaliana
  peptide (1)..(158): Ceres Seq. ID no. 12725867
  misc_feature (47)..(158): Homolog of NCBI NO: 9758615 NR Description: gene_id:MDF20.25~ref|NP_011524.1~similar to
  misc_feature (1)..(158): Homolog of NCBI NO: 22327861 NR Description: putative protein; protein id: At5g55810.1, by cDNA: gi_17473554 [Arabidopsis thaliana] unknown protein [Arabidopsis thaliana]
  misc_feature (50)..(155): Homolog of NCBI NO: 20070321 NR Description: nicotinamide nucleotide adenylyltransferase; NMN [Homo sapiens] >gi|28373465|pdb|1KQN|A Chain A, Crystal Structure NmnNAMN ADENYLYLTRANSFERASE COMPLEXED With Nad NmnNAMN
  misc_feature (1)..(31): Homolog of NCBI NO: 20070321 NR Description: nicotinamide nucleotide adenylyltransferase; NMN [Homo sapiens] >gi|28373465|pdb|1KQN|A Chain A, Crystal Structure NmnNAMN ADENYLYLTRANSFERASE COMPLEXED With Nad NmnNAMN
  misc_feature (50)..(155): Homolog of NCBI NO: 18652051 NR Description: nicotinamide mononucleotide adenylyl transferase sapiens] >gi|18652057|gb|AAL76935.1| nicotinamide mononucleotide
  misc_feature (1)..(31): Homolog of NCBI NO: 18652051 NR Description: nicotinamide mononucleotide adenylyl transferase sapiens] >gi|18652057|gb|AAL76935.1| nicotinamide mononucleotide
  misc_feature (50)..(155): Homolog of NCBI NO: 10438792 NR Description: unnamed protein product [Homo sapiens]
  misc_feature (1)..(31): Homolog of NCBI NO: 10438792 NR Description: unnamed protein product [Homo sapiens]
  misc_feature (50)..(155): Homolog of NCBI NO: 21730493 NR Description: Chain A, Crystal Structure Of Nuclear Human Mononucleotide Adenylyltransferase
  misc_feature (50)..(155): Homolog of NCBI NO: 22218688 NR Description: Chain A, Crystal Structure Of Human Nicotinamide Adenylyltransferase In Complex With Nmn >gi|22218689|pdb|1GZU|B B, Crystal Structure Of Human Nicotinamide Mononucleotide
MCNVSCQSSDFVMVDPWEASQSNYQRTLTVLSRVKTFLTTNRHVPEESLKVMLLCGSDLLLSFCTPGVWIPEQLRTICKDYGIVCIRREGQDVENMISGDEILNENCANVKIVDNTVPNQISSSRLRQCISRGLSVKYLTEDGVIDYIRQHQLYTELT

SEQ ID NO: 90960 - protein, 146 aa, Arabidopsis thaliana
  peptide (1)..(146): Ceres Seq. ID no. 12725868
  misc_feature (35)..(146): Homolog of NCBI NO: 9758615 NR Description: gene_id:MDF20.25~ref|NP_011524.1~similar to
  misc_feature (1)..(146): Homolog of NCBI NO: 22327861 NR Description: putative protein; protein id: At5g55810.1, by cDNA: gi_17473554 [Arabidopsis thaliana] unknown protein [Arabidopsis thaliana]
  misc_feature (38)..(143): Homolog of NCBI NO: 20070321 NR Description: nicotinamide nucleotide adenylyltransferase; NMN [Homo sapiens] >gi|28373465|pdb|1KQN|A Chain A, Crystal Structure NmnNAMN ADENYLYLTRANSFERASE COMPLEXED With Nad NmnNAMN
  misc_feature (1)..(19): Homolog of NCBI NO: 20070321 NR Description: nicotinamide nucleotide adenylyltransferase; NMN [Homo sapiens] >gi|28373465|pdb|1KQN|A Chain A, Crystal Structure NmnNAMN ADENYLYLTRANSFERASE COMPLEXED With Nad NmnNAMN
  misc_feature (38)..(143): Homolog of NCBI NO: 18652051 NR Description: nicotinamide mononucleotide adenylyl transferase sapiens] >gi|18652057|gb|AAL76935.1| nicotinamide mononucleotide
  misc_feature (1)..(19): Homolog of NCBI NO: 18652051 NR Description: nicotinamide mononucleotide adenylyl transferase sapiens] >gi|18652057|gb|AAL76935.1| nicotinamide mononucleotide
  misc_feature (38)..(143): Homolog of NCBI NO: 10438792 NR Description: unnamed protein product [Homo sapiens]
  misc_feature (1)..(19): Homolog of NCBI NO: 10438792 NR Description: unnamed protein product [Homo sapiens]
  misc_feature (38)..(143): Homolog of NCBI NO: 21730493 NR Description: Chain A, Crystal Structure Of Nuclear Human Mononucleotide Adenylyltransferase
  misc_feature (38)..(143): Homolog of NCBI NO: 22218688 NR Description: Chain A, Crystal Structure Of Human Nicotinamide Adenylyltransferase In Complex With Nmn >gi|22218689|pdb|1GZU|B B, Crystal Structure Of Human Nicotinamide Mononucleotide
MVDPWEASQSNYQRTLTVLSRVKTFLTTNRHVPEESLKVMLLCGSDLLLSFCTPGVWIPEQLRTICKDYGIVCIRREGQDVENMISGDEILNENCANVKIVDNTVPNQISSSRLRQCISRGLSVKYLTEDGVIDYIRQHQLYTELT

SEQ ID NO: 90961 - protein, 107 aa, Arabidopsis thaliana
  peptide (1)..(107): Ceres Seq. ID no. 12725869
  misc_feature (1)..(107): Homolog of NCBI NO: 9758615 NR Description: gene_id:MDF20.25~ref|NP_011524.1~similar to
  misc_feature (1)..(107): Homolog of NCBI NO: 22327861 NR Description: putative protein; protein id: At5g55810.1, by cDNA: gi_17473554 [Arabidopsis thaliana] unknown protein [Arabidopsis thaliana]
  misc_feature (1)..(104): Homolog of NCBI NO: 20070321 NR Description: nicotinamide nucleotide adenylyltransferase; NMN [Homo sapiens] >gi|28373465|pdb|1KQN|A Chain A, Crystal Structure NmnNAMN ADENYLYLTRANSFERASE COMPLEXED With Nad NmnNAMN
  misc_feature (1)..(104): Homolog of NCBI NO: 18652051 NR Description: nicotinamide mononucleotide adenylyl transferase sapiens] >gi|18652057|gb|AAL76935.1| nicotinamide mononucleotide
  misc_feature (1)..(104): Homolog of NCBI NO: 10438792 NR Description: unnamed protein product [Homo sapiens]
  misc_feature (1)..(104): Homolog of NCBI NO: 21730493 NR Description: Chain A, Crystal Structure Of Nuclear Human Mononucleotide Adenylyltransferase
  misc_feature (1)..(104): Homolog of NCBI NO: 22218688 NR Description: Chain A, Crystal Structure Of Human Nicotinamide Adenylyltransferase In Complex With Nmn >gi|22218689|pdb|1GZU|B B, Crystal Structure Of Human Nicotinamide Mononucleotide
  misc_feature (1)..(105): Homolog of NCBI NO: 30580490 NR Description: Nicotinamide mononucleotide adenylyltransferase
  misc_feature (1)..(103): Homolog of NCBI NO: 6321447 NR Description: NAD(+) salvage pathway; Nma2p [Saccharomyces
  misc_feature (1)..(105): Homolog of NCBI NO: 10442021 NR Description: D4COLE1E [Mus musculus]
MLLCGSDLLLSFCTPGVWIPEQLRTICKDYGIVCIRREGQDVENMISGDEILNENCANVKIVDNTVPNQISSSRLRQCISRGLSVKYLTEDGVIDYIRQHQLYTELT

SEQ ID NO: 90962 - DNA, 2046 bp, Arabidopsis thaliana
  misc_feature (1)..(2046): Ceres Seq. ID no. 12725870
  misc_feature: MA Experiment ID: 20000171 Result: Up-regulated in Transcription
  misc_feature: MA Experiment 20000171 PARAMETER Experiment Name: At_42deg_Heat_P Parameter: Age (day) Value: 14
  misc_feature: MA Experiment 20000171 PARAMETER Experiment Name: At_42deg_Heat_P Parameter: Organism Value: A. thaliana
  misc_feature: MA Experiment 20000171 PARAMETER Experiment Name: At_42deg_Heat_P Parameter: Plant Line Value: WS
  misc_feature: MA Experiment 20000171 PARAMETER Experiment Name: At_42deg_Heat_P Parameter: Temperature (deg C) Value: 42 vs. 22
  misc_feature: MA Experiment 20000171 PARAMETER Experiment Name: At_42deg_Heat_P Parameter: Timepoint (hr) Value: 1
  misc_feature: MA Experiment 20000171 PARAMETER Experiment Name: At_42deg_Heat_P Parameter: Tissue Value: Aerial
atgtctctatcaagaaagcttcttgttatcttcttcacatggataacagctctatccatgtcgaaaccaatcttcgtatcatccgataacatgaatttcacattcaaatccttcacaatccgtaacctcacattcctcggagattcacatctccgaaacggtgtcgttgggctcacaagagagctaggtgttcccgatacaagctccggtacagtaatctacaacaatccgatccgtttctacgatccggattcaaacaccacggcgtctttctccactcacttctccttcaccgttcaaaacttaaacccagatccaacctccgccggtgacggactcgctttcttcctctctcacgacaacgatactttaggaagtcccggtggttacttaggtctcgtcaattcctctcagccgatgaagaatcgattcgtcgctatcgaattcgatacgaaattggatcctcatttcaacgatccaaatggtaatcacattggtttagatgttgatagtttgaactcaatctcaacttcagatcctttgctttcgtctcagattgatctcaaatctggtaaatcgataacttcttggatcgattacaagaacgatttacgtttattgaacgtgttcttgagttatacagatccagtcactacaacgaagaagccagagaagcctcttttatcggttaacatcgatctttctccgttcttgaacggtgaaatgtatgtaggattctcaggttcaacagaaggaagcacagagattcatctgatcgagaattggagtttcaagacttctggatttcttccggtgagatcgaaatctaatcatcttcacaatgtttcagatagttctgtggtgaatgatgatcctgttgtgataccgagtaagaagcggaggcatcgacacaatcttgctattggacttggtatttcttgtccggtgttaatctgtttagctctctttgtgtttgggtactttactttgaagaaatggaaaagtgtgaaagcagagaaggagcttaagactgagctaatcactggtttaagagagtttagctataaagagctttacacagctactaaagggtttcattcaagtagagtcattggaagaggagcgtttgggaatgtttacagagctatgtttgtttcctctgggacgatctctgctgtgaaaagatcgaggcataattcaaccgaaggtaaaacagagtttttggcagagttatcgattattgcttgcttgcggcacaagaatcttgttcagttgcagggttggtgtaacgagaaaggtgaattgcttcttgtctatgagttcatgcctaatggaagtcttgataagattctgtatcaagaatcacaaacaggagctgtggcgcttgactggtctcataggctgaatatagcgattggtttagcatcagctttgtcttatcttcaccatgagtgtgagcagcaagtggttcacagagatattaagacgagcaacataatgcttgacataaacttcaacgcaaggctgggagattttggtctagctagactcacggagcatgataagagccctgtctcaactttaaccgctggtacaatgggttacctcgcaccagagtatctccaatacggcacagcgactgagaaaacagatgcttttagctacggagtggtgatcctagaagttgcttgtgggagaaggccaatagataaagaaccagagagtcaaaagacagtgaatctagtggattgggtttggagattgcacagtgaaggaagagttcttgaagctgtggatgagagattgaaaggtgagtttgatgaagaaatgatgaagaaacttttgcttgtgggtcttaaatgtgcccatccagatagtaatgagagaccatctatgagacgtgttcttcagatacttaacaatgagattgagccaagtccggttccgaagatgaaacctacattgtctttctcttgtgggttaagtcttgatgacattgtttcggaagatgaagaaggagacagcatcgtgtacgttgtatcttag

SEQ ID NO: 90963 - protein, 681 aa, Arabidopsis thaliana
  peptide (1)..(681): Ceres Seq. ID no. 12725871
  misc_feature (320)..(669): Homolog of NCBI NO: 15231802 NR Description: receptor lectin kinase -like protein; protein id:
  misc_feature (25)..(267): Homolog of NCBI NO: 15231802 NR Description: receptor lectin kinase -like protein; protein id:
  misc_feature (33)..(672): Homolog of NCBI NO: 15242646 NR Description: receptor like protein kinase; protein id: supported by cDNA: gi_20260625 [Arabidopsis thaliana]
  misc_feature (295)..(650): Homolog of NCBI NO: 38112429 NR Description: lectin-like receptor kinase 7;3 [Medicago
  misc_feature (23)..(335): Homolog of NCBI NO: 38112429 NR Description: lectin-like receptor kinase 7;3 [Medicago
  misc_feature (24)..(679): Homolog of NCBI NO: 15238300 NR Description: receptor lectin kinase-like protein; protein id:
  misc_feature (338)..(675): Homolog of NCBI NO: 15289871 NR Description: putative receptor protein kinase-like protein
  misc_feature (18)..(267): Homolog of NCBI NO: 15289871 NR Description: putative receptor protein kinase-like protein
  misc_feature (6)..(681): Homolog of NCBI NO: 18411935 NR Description: contains similarity to a protein kinase domain pkinase.hmm, score: 166.20) and to legume lectins beta domain lectin_legB.hmm, score: 139.32); protein id: At4g02410.1,
  misc_feature (26)..(675): Homolog of NCBI NO: 15233300 NR Description: probable serine/threonine-specific protein protein id: At3g55550.1 [Arabidopsis thaliana]
MSLSRKLLVIFFTWITALSMSKPIFVSSDNMNFTFKSFTIRNLTFLGDSHLRNGVVGLTRELGVPDTSSGTVIYNNPIRFYDPDSNTTASFSTHFSFTVQNLNPDPTSAGDGLAFFLSHDNDTLGSPGGYLGLVNSSQPMKNRFVAIEFDTKLDPHFNDPNGNHIGLDVDSLNSISTSDPLLSSQIDLKSGKSITSWIDYKNDLRLLNVFLSYTDPVTTTKKPEKPLLSVNIDLSPFLNGEMYVGFSGSTEGSTEIHLIENWSFKTSGFLPVRSKSNHLHNVSDSSVVNDDPVVIPSKKRRHRHNLAIGLGISCPVLICLALFVFGYFTLKKWKSVKAEKELKTELITGLREFSYKELYTATKGFHSSRVIGRGAFGNVYRAMFVSSGTISAVKRSRHNSTEGKTEFLAELSIIACLRHKNLVQLQGWCNEKGELLLVYEFMPNGSLDKILYQESQTGAVALDWSHRLNIAIGLASALSYLHHECEQQVVHRDIKTSNIMLDINFNARLGDFGLARLTEHDKSPVSTLTAGTMGYLAPEYLQYGTATEKTDAFSYGVVILEVACGRRPIDKEPESQKTVNLVDWVWRLHSEGRVLEAVDERLKGEFDEEMMKKLLLVGLKCAHPDSNERPSMRRVLQILNNEIEPSPVPKMKPTLSFSCGLSLDDIVSEDEEGDSIVYVVS

SEQ ID NO: 90964 - protein, 662 aa, Arabidopsis thaliana
  peptide (1)..(662): Ceres Seq. ID no. 12725872
  misc_feature (301)..(650): Homolog of NCBI NO: 15231802 NR Description: receptor lectin kinase -like protein; protein id:
  misc_feature (6)..(248): Homolog of NCBI NO: 15231802 NR Description: receptor lectin kinase -like protein; protein id:
  misc_feature (14)..(653): Homolog of NCBI NO: 15242646 NR Description: receptor like protein kinase; protein id: supported by cDNA: gi_20260625 [Arabidopsis thaliana]
  misc_feature (276)..(631): Homolog of NCBI NO: 38112429 NR Description: lectin-like receptor kinase 7;3 [Medicago
  misc_feature (4)..(316): Homolog of NCBI NO: 38112429 NR Description: lectin-like receptor kinase 7;3 [Medicago
  misc_feature (5)..(660): Homolog of NCBI NO: 15238300 NR Description: receptor lectin kinase-like protein; protein id:
  misc_feature (319)..(656): Homolog of NCBI NO: 15289871 NR Description: putative receptor protein kinase-like protein
  misc_feature (1)..(248): Homolog of NCBI NO: 15289871 NR Description: putative receptor protein kinase-like protein
  misc_feature (1)..(662): Homolog of NCBI NO: 18411935 NR Description: contains similarity to a protein kinase domain pkinase.hmm, score: 166.20) and to legume lectins beta domain lectin_legB.hmm, score: 139.32); protein id: At4g02410.1,
  misc_feature (7)..(656): Homolog of NCBI NO: 15233300 NR Description: probable serine/threonine-specific protein protein id: At3g55550.1 [Arabidopsis thaliana]
MSKPIFVSSDNMNFTFKSFTIRNLTFLGDSHLRNGVVGLTRELGVPDTSSGTVIYNNPIRFYDPDSNTTASFSTHFSFTVQNLNPDPTSAGDGLAFFLSHDNDTLGSPGGYLGLVNSSQPMKNRFVAIEFDTKLDPHFNDPNGNHIGLDVDSLNSISTSDPLLSSQIDLKSGKSITSWIDYKNDLRLLNVFLSYTDPVTTTKKPEKPLLSVNIDLSPFLNGEMYVGFSGSTEGSTEIHLIENWSFKTSGFLPVRSKSNHLHNVSDSSVVNDDPVVIPSKKRRHRHNLAIGLGISCPVLICLALFVFGYFTLKKWKSVKAEKELKTELITGLREFSYKELYTATKGFHSSRVIGRGAFGNVYRAMFVSSGTISAVKRSRHNSTEGKTEFLAELSIIACLRHKNLVQLQGWCNEKGELLLVYEFMPNGSLDKILYQESQTGAVALDWSHRLNIAIGLASALSYLHHECEQQVVHRDIKTSNIMLDINFNARLGDFGLARLTEHDKSPVSTLTAGTMGYLAPEYLQYGTATEKTDAFSYGVVILEVACGRRPIDKEPESQKTVNLVDWVWRLHSEGRVLEAVDERLKGEFDEEMMKKLLLVGLKCAHPDSNERPSMRRVLQILNNEIEPSPVPKMKPTLSFSCGLSLDDIVSEDEEGDSIVYVVS

SEQ ID NO: 90965 - protein, 651 aa, Arabidopsis thaliana
  peptide (1)..(651): Ceres Seq. ID no. 12725873
  misc_feature (290)..(639): Homolog of NCBI NO: 15231802 NR Description: receptor lectin kinase -like protein; protein id:
  misc_feature (1)..(237): Homolog of NCBI NO: 15231802 NR Description: receptor lectin kinase -like protein; protein id:
  misc_feature (3)..(642): Homolog of NCBI NO: 15242646 NR Description: receptor like protein kinase; protein id: supported by cDNA: gi_20260625 [Arabidopsis thaliana]
  misc_feature (265)..(620): Homolog of NCBI NO: 38112429 NR Description: lectin-like receptor kinase 7;3 [Medicago
  misc_feature (1)..(305): Homolog of NCBI NO: 38112429 NR Description: lectin-like receptor kinase 7;3 [Medicago
  misc_feature (1)..(649): Homolog of NCBI NO: 15238300 NR Description: receptor lectin kinase-like protein; protein id:
  misc_feature (308)..(645): Homolog of NCBI NO: 15289871 NR Description: putative receptor protein kinase-like protein
  misc_feature (1)..(237): Homolog of NCBI NO: 15289871 NR Description: putative receptor protein kinase-like protein
  misc_feature (1)..(651): Homolog of NCBI NO: 18411935 NR Description: contains similarity to a protein kinase domain pkinase.hmm, score: 166.20) and to legume lectins beta domain lectin_legB.hmm, score: 139.32); protein id: At4g02410.1,
  misc_feature (1)..(645): Homolog of NCBI NO: 15233300 NR Description: probable serine/threonine-specific protein protein id: At3g55550.1 [Arabidopsis thaliana]
MNFTFKSFTIRNLTFLGDSHLRNGVVGLTRELGVPDTSSGTVIYNNPIRFYDPDSNTTASFSTHFSFTVQNLNPDPTSAGDGLAFFLSHDNDTLGSPGGYLGLVNSSQPMKNRFVAIEFDTKLDPHFNDPNGNHIGLDVDSLNSISTSDPLLSSQIDLKSGKSITSWIDYKNDLRLLNVFLSYTDPVTTTKKPEKPLLSVNIDLSPFLNGEMYVGFSGSTEGSTEIHLIENWSFKTSGFLPVRSKSNHLHNVSDSSVVNDDPVVIPSKKRRHRHNLAIGLGISCPVLICLALFVFGYFTLKKWKSVKAEKELKTELITGLREFSYKELYTATKGFHSSRVIGRGAFGNVYRAMFVSSGTISAVKRSRHNSTEGKTEFLAELSIIACLRHKNLVQLQGWCNEKGELLLVYEFMPNGSLDKILYQESQTGAVALDWSHRLNIAIGLASALSYLHHECEQQVVHRDIKTSNIMLDINFNARLGDFGLARLTEHDKSPVSTLTAGTMGYLAPEYLQYGTATEKTDAFSYGVVILEVACGRRPIDKEPESQKTVNLVDWVWRLHSEGRVLEAVDERLKGEFDEEMMKKLLLVGLKCAHPDSNERPSMRRVLQILNNEIEPSPVPKMKPTLSFSCGLSLDDIVSEDEEGDSIVYVVS

SEQ ID NO: 90966 - DNA, 963 bp, Arabidopsis thaliana
  misc_feature (1)..(963): Ceres Seq. ID no. 12725903
  misc_feature: MA Experiment ID: 20000171 Result: Down-regulated in Transcription
  misc_feature: MA Experiment 20000171 PARAMETER Experiment Name: At_42deg_Heat_P Parameter: Age (day) Value: 14
  misc_feature: MA Experiment 20000171 PARAMETER Experiment Name: At_42deg_Heat_P Parameter: Organism Value: A. thaliana
  misc_feature: MA Experiment 20000171 PARAMETER Experiment Name: At_42deg_Heat_P Parameter: Plant Line Value: WS
  misc_feature: MA Experiment 20000171 PARAMETER Experiment Name: At_42deg_Heat_P Parameter: Temperature (deg C) Value: 42 vs. 22
  misc_feature: MA Experiment 20000171 PARAMETER Experiment Name: At_42deg_Heat_P Parameter: Timepoint (hr) Value: 1
  misc_feature: MA Experiment 20000171 PARAMETER Experiment Name: At_42deg_Heat_P Parameter: Tissue Value: Aerial
  misc_feature: MA Experiment ID: 20000227 Result: Down-regulated in Transcription
  misc_feature: MA Experiment 20000227 PARAMETER Experiment Name: At_Root-Tips-vs-Tops_P Parameter: Tissue Value: Root Tips vs. Root Tops
  misc_feature: MA Experiment ID: 20000267 Result: Down-regulated in Transcription
  misc_feature: MA Experiment 20000267 PARAMETER Experiment Name: At_Drought_P Parameter: Age (day) Value: 7
  misc_feature: MA Experiment 20000267 PARAMETER Experiment Name: At_Drought_P Parameter: Organism Value: A. thaliana
  misc_feature: MA Experiment 20000267 PARAMETER Experiment Name: At_Drought_P Parameter: Plant Line Value: WS
  misc_feature: MA Experiment 20000267 PARAMETER Experiment Name: At_Drought_P Parameter: Timepoint (hr) Value: 6
  misc_feature: MA Experiment 20000267 PARAMETER Experiment Name: At_Drought_P Parameter: Tissue Value: Whole Plant
  misc_feature: MA Experiment 20000267 PARAMETER Experiment Name: At_Drought_P Parameter: Treatment Value: Drought vs. No Drought
  misc_feature: MA Experiment ID: 20000436 Result: Down-regulated in Transcription
  misc_feature: MA Experiment 20000436 PARAMETER Experiment Name: At_Drought_P Parameter: Age (day) Value: 7
  misc_feature: MA Experiment 20000436 PARAMETER Experiment Name: At_Drought_P Parameter: Organism Value: A. thaliana
  misc_feature: MA Experiment 20000436 PARAMETER Experiment Name: At_Drought_P Parameter: Plant Line Value: WS
  misc_feature: MA Experiment 20000436 PARAMETER Experiment Name: At_Drought_P Parameter: Timepoint (hr) Value: 12
  misc_feature: MA Experiment 20000436 PARAMETER Experiment Name: At_Drought_P Parameter: Tissue Value: Whole Plant
  misc_feature: MA Experiment 20000436 PARAMETER Experiment Name: At_Drought_P Parameter: Treatment Value: Drought vs. No Drought
  misc_feature: MA Experiment ID: 20000437 Result: Down-regulated in Transcription
  misc_feature: MA Experiment 20000437 PARAMETER Experiment Name: At_Drought_P Parameter: Age (day) Value: 8
  misc_feature: MA Experiment 20000437 PARAMETER Experiment Name: At_Drought_P Parameter: Organism Value: A. thaliana
  misc_feature: MA Experiment 20000437 PARAMETER Experiment Name: At_Drought_P Parameter: Plant Line Value: WS
  misc_feature: MA Experiment 20000437 PARAMETER Experiment Name: At_Drought_P Parameter: Timepoint (hr) Value: 24
  misc_feature: MA Experiment 20000437 PARAMETER Experiment Name: At_Drought_P Parameter: Tissue Value: Whole Plant
  misc_feature: MA Experiment 20000437 PARAMETER Experiment Name: At_Drought_P Parameter: Treatment Value: Drought vs. No Drought
  misc_feature: MA Experiment ID: 20000438 Result: Up-regulated in Transcription
  misc_feature: MA Experiment 20000438 PARAMETER Experiment Name: At_Shoots__P Parameter: Age (day) Value: 14
  misc_feature: MA Experiment 20000438 PARAMETER Experiment Name: At_Shoots__P Parameter: Tissue Value: Shoots vs. Whole Plant
  misc_feature: MA Experiment ID: 20000439 Result: Up-regulated in Transcription
  misc_feature: MA Experiment 20000439 PARAMETER Experiment Name: At_Roots__P Parameter: Age (day) Value: 14 vs. 21
  misc_feature: MA Experiment 20000439 PARAMETER Experiment Name: At_Roots__P Parameter: Organism Value: A. thaliana
  misc_feature: MA Experiment 20000439 PARAMETER Experiment Name: At_Roots__P Parameter: Tissue Value: Roots vs. Whole Plant
  misc_feature: MA Experiment ID: 20000451 Result: Up-regulated in Transcription
  misc_feature: MA Experiment 20000451 PARAMETER Experiment Name: At_CS6879_Shoots-Roots_P Parameter: Age (day) Value: 14
  misc_feature: MA Experiment 20000451 PARAMETER Experiment Name: At_CS6879_Shoots-Roots_P Parameter: Organism Value: A. thaliana
  misc_feature: MA Experiment 20000451 PARAMETER Experiment Name: At_CS6879_Shoots-Roots_P Parameter: Plant Line Value: CS6879 vs. WS
  misc_feature: MA Experiment 20000451 PARAMETER Experiment Name: At_CS6879_Shoots-Roots_P Parameter: Tissue Value: Roots
  misc_feature: MA Experiment ID: 20000452 Result: Up-regulated in Transcription
  misc_feature: MA Experiment 20000452 PARAMETER Experiment Name: At_CS6879_Shoots-Roots_P Parameter: Age (day) Value: 14
  misc_feature: MA Experiment 20000452 PARAMETER Experiment Name: At_CS6879_Shoots-Roots_P Parameter: Organism Value: A. thaliana
  misc_feature: MA Experiment 20000452 PARAMETER Experiment Name: At_CS6879_Shoots-Roots_P Parameter: Plant Line Value: CS6879 vs. WS
  misc_feature: MA Experiment 20000452 PARAMETER Experiment Name: At_CS6879_Shoots-Roots_P Parameter: Tissue Value: Shoots
  misc_feature: MA Experiment ID: 20000527 Result: Up-regulated in Transcription
  misc_feature: MA Experiment 20000527 PARAMETER Experiment Name: At_10percent_PEG_P Parameter: Age (day) Value: 20
  misc_feature: MA Experiment 20000527 PARAMETER Experiment Name: At_10percent_PEG_P Parameter: Organism Value: A. thaliana
  misc_feature: MA Experiment 20000527 PARAMETER Experiment Name: At_10percent_PEG_P Parameter: Plant Line Value: WS
  misc_feature: MA Experiment 20000527 PARAMETER Experiment Name: At_10percent_PEG_P Parameter: Timepoint (day) Value: 20
  misc_feature: MA Experiment 20000527 PARAMETER Experiment Name: At_10percent_PEG_P Parameter: Tissue Value: Whole Plant
  misc_feature: MA Experiment 20000527 PARAMETER Experiment Name: At_10percent_PEG_P Parameter: Treatment Value: 10percent PEG vs. No Treatment
  misc_feature: MA Experiment ID: 20000573 Result: Down-regulated in Transcription
  misc_feature: MA Experiment 20000573 PARAMETER Experiment Name: At_100uM_ABA_Mutants__P Parameter: Organism Value: A. thaliana
  misc_feature: MA Experiment 20000573 PARAMETER Experiment Name: At_100uM_ABA_Mutants__P Parameter: Plant Line Value: CS22 vs. Ler wt
  misc_feature: MA Experiment 20000573 PARAMETER Experiment Name: At_100uM_ABA_Mutants__P Parameter: Timepoint (hr) Value: N/A
  misc_feature: MA Experiment 20000573 PARAMETER Experiment Name: At_100uM_ABA_Mutants__P Parameter: Tissue Value: Whole Plant
  misc_feature: MA Experiment 20000573 PARAMETER Experiment Name: At_100uM_ABA_Mutants__P Parameter: Treatment Value: None
  misc_feature: MA Experiment ID: 20001248 Result: Down-regulated in Transcription
  misc_feature: MA Experiment 20001248 PARAMETER Experiment Name: At_Far-red-induction_P Parameter: Age (day) Value: 7
  misc_feature: MA Experiment 20001248 PARAMETER Experiment Name: At_Far-red-induction_P Parameter: Light Value: Far-red vs. White
  misc_feature: MA Experiment 20001248 PARAMETER Experiment Name: At_Far-red-induction_P Parameter: Organism Value: A. thaliana
  misc_feature: MA Experiment 20001248 PARAMETER Experiment Name: At_Far-red-induction_P Parameter: Plant Line Value: Columbia
  misc_feature: MA Experiment 20001248 PARAMETER Experiment Name: At_Far-red-induction_P Parameter: Timepoint (hr) Value: 4
  misc_feature: MA Experiment 20001248 PARAMETER Experiment Name: At_Far-red-induction_P Parameter: Tissue Value: Whole Plant
  misc_feature: MA Experiment ID: 20001450 Result: Down-regulated in Transcription
  misc_feature: MA Experiment 20001450 PARAMETER Experiment Name: At_Far-red-induction_P Parameter: Age (day) Value: 7
  misc_feature: MA Experiment 20001450 PARAMETER Experiment Name: At_Far-red-induction_P Parameter: Light Value: Far-red vs. White
  misc_feature: MA Experiment 20001450 PARAMETER Experiment Name: At_Far-red-induction_P Parameter: Organism Value: A. thaliana
  misc_feature: MA Experiment 20001450 PARAMETER Experiment Name: At_Far-red-induction_P Parameter: Plant Line Value: Columbia
  misc_feature: MA Experiment 20001450 PARAMETER Experiment Name: At_Far-red-induction_P Parameter: Timepoint (hr) Value: 8
  misc_feature: MA Experiment 20001450 PARAMETER Experiment Name: At_Far-red-induction_P Parameter: Tissue Value: Whole Plant
  misc_feature: MA Experiment ID: 20001451 Result: Down-regulated in Transcription
  misc_feature: MA Experiment 20001451 PARAMETER Experiment Name: At_Far-red-induction_P Parameter: Age (day) Value: 7
  misc_feature: MA Experiment 20001451 PARAMETER Experiment Name: At_Far-red-induction_P Parameter: Light Value: Far-red vs. White
  misc_feature: MA Experiment 20001451 PARAMETER Experiment Name: At_Far-red-induction_P Parameter: Organism Value: A. thaliana
  misc_feature: MA Experiment 20001451 PARAMETER Experiment Name: At_Far-red-induction_P Parameter: Plant Line Value: Columbia
  misc_feature: MA Experiment 20001451 PARAMETER Experiment Name: At_Far-red-induction_P Parameter: Timepoint (hr) Value: 24
  misc_feature: MA Experiment 20001451 PARAMETER Experiment Name: At_Far-red-induction_P Parameter: Tissue Value: Whole Plant
  misc_feature: MA Experiment ID: 20001503 Result: Up-regulated in Transcription
  misc_feature: MA Experiment 20001503 PARAMETER Experiment Name: At_Far-red-enriched_P Parameter: Age (day) Value: 7
  misc_feature: MA Experiment 20001503 PARAMETER Experiment Name: At_Far-red-enriched_P Parameter: Light Value: Far-red enriched vs. White
  misc_feature: MA Experiment 20001503 PARAMETER Experiment Name: At_Far-red-enriched_P Parameter: Organism Value: A. thaliana
  misc_feature: MA Experiment 20001503 PARAMETER Experiment Name: At_Far-red-enriched_P Parameter: Plant Line Value: Columbia
  misc_feature: MA Experiment 20001503 PARAMETER Experiment Name: At_Far-red-enriched_P Parameter: Timepoint (day) Value: 3
  misc_feature: MA Experiment 20001503 PARAMETER Experiment Name: At_Far-red-enriched_P Parameter: Tissue Value: Whole Plant
  misc_feature: MA Experiment ID: 20001554 Result: Up-regulated in Transcription
  misc_feature: MA Experiment 20001554 PARAMETER Experiment Name: At_Drought_Soil_Dry_P Parameter: Age (day) Value: 21
  misc_feature: MA Experiment 20001554 PARAMETER Experiment Name: At_Drought_Soil_Dry_P Parameter: Organism Value: A. thaliana
  misc_feature: MA Experiment 20001554 PARAMETER Experiment Name: At_Drought_Soil_Dry_P Parameter: Plant Line Value: WS
  misc_feature: MA Experiment 20001554 PARAMETER Experiment Name: At_Drought_Soil_Dry_P Parameter: Post Timepoint (hr) Value: None
  misc_feature: MA Experiment 20001554 PARAMETER Experiment Name: At_Drought_Soil_Dry_P Parameter: Post-Treatment Value: None
  misc_feature: MA Experiment 20001554 PARAMETER Experiment Name: At_Drought_Soil_Dry_P Parameter: Timepoint (day) Value: 7
  misc_feature: MA Experiment 20001554 PARAMETER Experiment Name: At_Drought_Soil_Dry_P Parameter: Treatment Value: Drought vs. No Drought
  misc_feature: MA Experiment ID: 20001757 Result: Up-regulated in Transcription
  misc_feature: MA Experiment 20001757 PARAMETER Experiment Name: At_50mM_NH4NO3_L-to-H_P Parameter: Timepoint (hr) Value: 6
  misc_feature: MA Experiment 20001757 PARAMETER Experiment Name: At_50mM_NH4NO3_L-to-H_P Parameter: Tissue Value: Leaf
  misc_feature: MA Experiment 20001757 PARAMETER Experiment Name: At_50mM_NH4NO3_L-to-H_P Parameter: Treatment Value: 50mM NH4NO3 vs 100mM Mannitol
atggcttgcgaaaacaacctcgttgtgaagcaaatcatggacttatacaaccaaatctcaaacctcgagagcttaaaaccatccaagaatgtcgacactttgttcagacaacttgtgtccacgtgcttaccaacggacacgaacatcgatgtcacagagatacacgatgaaaaagtcaaagacatgagatctcatctcatcaagctttgtggtgaagccgaaggttatttagagcaacacttttcagcaatcttaggctcttttgaagacaaccctctaaaccatttacacatcttcccctattacaacaactatctcaaactaggcaaactcgaattcgatctcctatctcaacacacaacccatgtcccgaccaaagtcgcctttattggttccggtccgatgccacttacttccatcgtcttggccaagttccacctccccaacacaacgttccacaacttcgacatcgactcacacgccaacacactcgcttcaaacctcgtttctcgtgattctgacctttccaaacgcatgattttccacacaactgatgtattaaacgctaaggaggggttagaccaatacgatgttgttttcttggcagctcttgttgggatggataaagagtcaaaggtcaaagctattgagcatttagagaagcatatggctcctggagctgtggtgatgctaagaagtgctcatggtcttagagctttcttgtatccaatcgttgactcttgtgatcttaaagggtttgaggtgttaaccatttatcatccgtctgacgacgtggttaattcggtggtcatcgcacgtaagcttggtggttcaaatggagctcgaggcagccagatcggacggtgtgtggttatgccttgtaattgctctaaggtccacgcgatcttgaacaatcgtggtatggagaagaatttgatcgaggagtatagtgccatcgagtaa

SEQ ID NO: 90967 - protein, 320 aa, Arabidopsis thaliana
  peptide (1)..(320): Ceres Seq. ID no. 12725904
  misc_feature (3)..(279): Pfam Name: Nicotianamine synthase protein Pfam Description: Nicotianamine synthase protein
  misc_feature (1)..(320): Homolog of NCBI NO: 15241120 NR Description: nicotianamine synthase, putative; protein id: [Arabidopsis thaliana] >gi|27151632|sp|Q9FKT9|NAS2_ARATH
  misc_feature (1)..(320): Homolog of NCBI NO: 4220614 NR Description: nicotianamine synathase [Arabidopsis thaliana]
  misc_feature (1)..(320): Homolog of NCBI NO: 15238376 NR Description: nicotianamine synthase, putative; protein id:
  misc_feature (1)..(320): Homolog of NCBI NO: 4220612 NR Description: nicotianamine synthase [Arabidopsis thaliana]
  misc_feature (3)..(317): Homolog of NCBI NO: 15223535 NR Description: nicotianamine synthase, putative; protein id: supported by cDNA: gi_20466583 [Arabidopsis thaliana] Probable nicotianamine synthase 4 thaliana
  misc_feature (1)..(320): Homolog of NCBI NO: 15217462 NR Description: nicotianamine synthase, putative; protein id:
  misc_feature (1)..(320): Homolog of NCBI NO: 27528464 NR Description: nicotianamine synthase [Thlaspi caerulescens]
  misc_feature (1)..(320): Homolog of NCBI NO: 40782199 NR Description: putative nicotianamine synthase [Arabidopsis
  misc_feature (1)..(320): Homolog of NCBI NO: 27151627 NR Description: Nicotianamine synthase
  misc_feature (8)..(275): Homolog of NCBI NO: 20387262 NR Description: ZmNAS3 [Zea mays]
MACENNLVVKQIMDLYNQISNLESLKPSKNVDTLFRQLVSTCLPTDTNIDVTEIHDEKVKDMRSHLIKLCGEAEGYLEQHFSAILGSFEDNPLNHLHIFPYYNNYLKLGKLEFDLLSQHTTHVPTKVAFIGSGPMPLTSIVLAKFHLPNTTFHNFDIDSHANTLASNLVSRDSDLSKRMIFHTTDVLNAKEGLDQYDVVFLAALVGMDKESKVKAIEHLEKHMAPGAVVMLRSAHGLRAFLYPIVDSCDLKGFEVLTIYHPSDDVVNSVVIARKLGGSNGARGSQIGRCVVMPCNCSKVHAILNNRGMEKNLIEEYSAIE

SEQ ID NO: 90968 - protein, 308 aa, Arabidopsis thaliana
  peptide (1)..(308): Ceres Seq. ID no. 12725905
  misc_feature (1)..(267): Pfam Name: Nicotianamine synthase protein Pfam Description: Nicotianamine synthase protein
  misc_feature (1)..(308): Homolog of NCBI NO: 15241120 NR Description: nicotianamine synthase, putative; protein id: [Arabidopsis thaliana] >gi|27151632|sp|Q9FKT9|NAS2_ARATH
  misc_feature (1)..(308): Homolog of NCBI NO: 4220614 NR Description: nicotianamine synathase [Arabidopsis thaliana]
  misc_feature (1)..(308): Homolog of NCBI NO: 15238376 NR Description: nicotianamine synthase, putative; protein id:
  misc_feature (1)..(308): Homolog of NCBI NO: 4220612 NR Description: nicotianamine synthase [Arabidopsis thaliana]
  misc_feature (1)..(305): Homolog of NCBI NO: 15223535 NR Description: nicotianamine synthase, putative; protein id: supported by cDNA: gi_20466583 [Arabidopsis thaliana] Probable nicotianamine synthase 4 thaliana
  misc_feature (1)..(308): Homolog of NCBI NO: 15217462 NR Description: nicotianamine synthase, putative; protein id:
  misc_feature (1)..(308): Homolog of NCBI NO: 27528464 NR Description: nicotianamine synthase [Thlaspi caerulescens]
  misc_feature (1)..(308): Homolog of NCBI NO: 40782199 NR Description: putative nicotianamine synthase [Arabidopsis
  misc_feature (1)..(308): Homolog of NCBI NO: 27151627 NR Description: Nicotianamine synthase
  misc_feature (1)..(263): Homolog of NCBI NO: 20387262 NR Description: ZmNAS3 [Zea mays]
MDLYNQISNLESLKPSKNVDTLFRQLVSTCLPTDTNIDVTEIHDEKVKDMRSHLIKLCGEAEGYLEQHFSAILGSFEDNPLNHLHIFPYYNNYLKLGKLEFDLLSQHTTHVPTKVAFIGSGPMPLTSIVLAKFHLPNTTFHNFDIDSHANTLASNLVSRDSDLSKRMIFHTTDVLNAKEGLDQYDVVFLAALVGMDKESKVKAIEHLEKHMAPGAVVMLRSAHGLRAFLYPIVDSCDLKGFEVLTIYHPSDDVVNSVVIARKLGGSNGARGSQIGRCVVMPCNCSKVHAILNNRGMEKNLIEEYSAIE

SEQ ID NO: 90969 - protein, 259 aa, Arabidopsis thaliana
  peptide (1)..(259): Ceres Seq. ID no. 12725906
  misc_feature (1)..(218): Pfam Name: Nicotianamine synthase protein Pfam Description: Nicotianamine synthase protein
  misc_feature (1)..(259): Homolog of NCBI NO: 15241120 NR Description: nicotianamine synthase, putative; protein id: [Arabidopsis thaliana] >gi|27151632|sp|Q9FKT9|NAS2_ARATH
  misc_feature (1)..(259): Homolog of NCBI NO: 4220614 NR Description: nicotianamine synathase [Arabidopsis thaliana]
  misc_feature (1)..(259): Homolog of NCBI NO: 15238376 NR Description: nicotianamine synthase, putative; protein id:
  misc_feature (1)..(259): Homolog of NCBI NO: 4220612 NR Description: nicotianamine synthase [Arabidopsis thaliana]
  misc_feature (1)..(256): Homolog of NCBI NO: 15223535 NR Description: nicotianamine synthase, putative; protein id: supported by cDNA: gi_20466583 [Arabidopsis thaliana] Probable nicotianamine synthase 4 thaliana
  misc_feature (1)..(259): Homolog of NCBI NO: 15217462 NR Description: nicotianamine synthase, putative; protein id:
  misc_feature (1)..(259): Homolog of NCBI NO: 27528464 NR Description: nicotianamine synthase [Thlaspi caerulescens]
  misc_feature (1)..(259): Homolog of NCBI NO: 40782199 NR Description: putative nicotianamine synthase [Arabidopsis
  misc_feature (1)..(259): Homolog of NCBI NO: 27151627 NR Description: Nicotianamine synthase
  misc_feature (1)..(214): Homolog of NCBI NO: 20387262 NR Description: ZmNAS3 [Zea mays]
MRSHLIKLCGEAEGYLEQHFSAILGSFEDNPLNHLHIFPYYNNYLKLGKLEFDLLSQHTTHVPTKVAFIGSGPMPLTSIVLAKFHLPNTTFHNFDIDSHANTLASNLVSRDSDLSKRMIFHTTDVLNAKEGLDQYDVVFLAALVGMDKESKVKAIEHLEKHMAPGAVVMLRSAHGLRAFLYPIVDSCDLKGFEVLTIYHPSDDVVNSVVIARKLGGSNGARGSQIGRCVVMPCNCSKVHAILNNRGMEKNLIEEYSAIE

SEQ ID NO: 90970 - DNA, 2723 bp, Arabidopsis thaliana
  misc_feature (1)..(2723): Ceres Seq. ID no. 12725923
  misc_feature: MA Experiment ID: 20000171 Result: Down-regulated in Transcription
  misc_feature: MA Experiment 20000171 PARAMETER Experiment Name: At_42deg_Heat_P Parameter: Age (day) Value: 14
  misc_feature: MA Experiment 20000171 PARAMETER Experiment Name: At_42deg_Heat_P Parameter: Organism Value: A. thaliana
  misc_feature: MA Experiment 20000171 PARAMETER Experiment Name: At_42deg_Heat_P Parameter: Plant Line Value: WS
  misc_feature: MA Experiment 20000171 PARAMETER Experiment Name: At_42deg_Heat_P Parameter: Temperature (deg C) Value: 42 vs. 22
  misc_feature: MA Experiment 20000171 PARAMETER Experiment Name: At_42deg_Heat_P Parameter: Timepoint (hr) Value: 1
  misc_feature: MA Experiment 20000171 PARAMETER Experiment Name: At_42deg_Heat_P Parameter: Tissue Value: Aerial
  misc_feature: MA Experiment ID: 20000173 Result: Down-regulated in Transcription
  misc_feature: MA Experiment 20000173 PARAMETER Experiment Name: At_42deg_Heat_P Parameter: Age (day) Value: 14
  misc_feature: MA Experiment 20000173 PARAMETER Experiment Name: At_42deg_Heat_P Parameter: Organism Value: A. thaliana
  misc_feature: MA Experiment 20000173 PARAMETER Experiment Name: At_42deg_Heat_P Parameter: Plant Line Value: WS
  misc_feature: MA Experiment 20000173 PARAMETER Experiment Name: At_42deg_Heat_P Parameter: Temperature (deg C) Value: 42 vs. 22
  misc_feature: MA Experiment 20000173 PARAMETER Experiment Name: At_42deg_Heat_P Parameter: Timepoint (hr) Value: 6
  misc_feature: MA Experiment 20000173 PARAMETER Experiment Name: At_42deg_Heat_P Parameter: Tissue Value: Aerial
  misc_feature: MA Experiment ID: 20000184 Result: Down-regulated in Transcription
  misc_feature: MA Experiment 20000184 PARAMETER Experiment Name: At_Shoots__P Parameter: Age (day) Value: 7
  misc_feature: MA Experiment 20000184 PARAMETER Experiment Name: At_Shoots__P Parameter: Tissue Value: Shoots vs. Whole Plant
  misc_feature: MA Experiment ID: 20000264 Result: Up-regulated in Transcription
  misc_feature: MA Experiment 20000264 PARAMETER Experiment Name: At_Open_Flower_P Parameter: Age (day) Value: 21
  misc_feature: MA Experiment 20000264 PARAMETER Experiment Name: At_Open_Flower_P Parameter: Plant Line Value: WS
  misc_feature: MA Experiment 20000264 PARAMETER Experiment Name: At_Open_Flower_P Parameter: Tissue Value: Open Flower vs. Whole Plant
  misc_feature: MA Experiment ID: 20000794 Result: Up-regulated in Transcription
  misc_feature: MA Experiment 20000794 PARAMETER Experiment Name: At_Petals_P Parameter: Age (day) Value: 23-25 days
  misc_feature: MA Experiment 20000794 PARAMETER Experiment Name: At_Petals_P Parameter: Plant Line Value: WS
  misc_feature: MA Experiment 20000794 PARAMETER Experiment Name: At_Petals_P Parameter: Tissue Value: Petals vs. Whole plant
accatttctcctgcaaaaacttttttattccttcttcctctttagtaaacaaatcgatcaaaaatggtctcataattctctctatatcttttatcactttcgaagattcctcttctcgcccacaaatcaaaatcatttcttttgccgactaattgaatttcttagaattcaacatacgcaatgaaaatgttctcgtcacaaagattagactaatccgactgtgtttttaatcaatcatcattttatttaggggagagaagttgtaaagttttgatttttttttctgggttttttctgtgagacccagaagaagaacagagagaggaagaaggagaagaaaaaaatatctctttctctccggctttcaacaaaatctctcttttttccttcatcagtgttaaattcggatccgggtcgggtgggttttcggtttttggtgttcggatcagagcacagttggatgttagcgacggaactgaggatttcagtttgcggctgcggcggctgtgacggtgtttgtgtgtcgtcttcttttatcaatcaggagtttcatcacagtttgatcagagattcagccaaattcttggatactaaatggctggttttgatgaaaatgttgctgtgatgggagaatgggtgcctcgtagtcctagtcccgggacacttttctcctctgctattggagaagagaagagctcgaaacgtgttcttgaaagagagttatctttgaatcatggtcaagttattggtttagaagaagacactagtagtaatcataacaaggattcttcacaaagcaatgtttttcgaggtggtctcagtgaaagaattgctgcaagagctggatttaatgctccaaggttgaacactgagaatatccgcaccaacaccgacttttccattgactctaaccttcgatctccttgcttaaccatctcttctcctggccttagccctgcaacactcttggaatctcctgttttcctttctaacccattggctcaaccttctccaactaccgggaaatttccatttcttcctggtgttaatggtaatgcattgtcttctgagaaagcgaaagacgagttctttgatgatattggagcatcattcagcttccatcctgtttcaagatcatcttcctctttcttccaaggcacaacagagatgatgtcagttgattatggtaactacaacaatagatcttcttctcatcaatccgcagaagaagtaaaacctggctctgaaaacatagaaagctccaatctttatgggattgaaactgacaatcaaaacgggcagaacaagacatctgatgtcactacaaacaccagtcttgaaaccgtggatcatcaagaggaagaagaagagcaaagacgcggtgattcgatggctggtggtgcgcctgcagaggatggatataactggaggaaatacggacaaaagttggtcaaaggaagtgagtatccgcgaagctattacaagtgcacaaacccgaattgtcaggtgaagaagaaagttgagagatcaagggaaggtcacatcacagagattatatacaaaggagctcataatcatcttaaacctccacctaatcgccgctcagggatgcaagtagatggaactgaacaagttgaacaacaacaacaacagagagattctgctgcaacgtgggttagttgtaataacactcaacaacaaggtggaagcaatgagaacaatgtcgaagagggatctacgagattcgagtatggaaaccaatctggatcaattcaagctcaaaccggaggtcaatacgagtcaggtgatcctgtggttgtggttgatgcttcttcaacattctctaatgatgaagatgaagatgatcgagggacacatggaagtgtttctttgggttacgatggaggaggaggaggtgggggaggagaaggagatgaatcagagtcgaaaagaaggaaactagaagcttttgcagcagagatgagtggatcaacaagagccatacgtgagccaagagttgttgtgcagacaacgagtgatgttgacattcttgatgatggttatcgctggcgaaaatatggtcagaaagttgtcaaaggcaatccaaatccaaggagttattacaaatgcacagctccaggatgtacagtgaggaaacatgttgaaagagcttctcatgatctcaaatccgttataacaacttacgaaggcaaacataaccatgacgtccccgctgcacgcaacagcagccacggaggcggtggtgatagtggtaacggtaacagcggcggttcagccgcagtttctcaccattaccacaacggtcatcactcagagccgccacgtgggagattcgacagacaagtcacaactaacaatcagtctccttttagccgtccctttagctttcagccacatttgggtcctccttctggtttctccttcggtttaggacaaaccggtttggttaatctttcaatgcctggtttagcgtatggtcaagggaaaatgccgggtttgcctcacccgtatatgacacaaccggttgggatgagtgaagcaatgatgcagagagggatggaaccaaaggttgaaccggtttcagattcaggacaatcggtatataaccagatcatgagtagattacctcagatttgaaatttactcttcttcttcttcttctgcatttggtcactccttataataacttttaatttctgctt

SEQ ID NO: 90971 - protein, 687 aa, Arabidopsis thaliana
  peptide (1)..(687): Ceres Seq. ID no. 12725924
  misc_feature (486)..(545): Pfam Name: WRKY DNA -binding domain Pfam Description: WRKY DNA -binding domain
  misc_feature (199)..(684): Homolog of NCBI NO: 13620227 NR Description: hypothetical protein [Lycopersicon esculentum]
  misc_feature (1)..(241): Homolog of NCBI NO: 13620227 NR Description: hypothetical protein [Lycopersicon esculentum]
  misc_feature (199)..(684): Homolog of NCBI NO: 13620220 NR Description: hypothetical protein [Lycopersicon esculentum]
  misc_feature (1)..(241): Homolog of NCBI NO: 13620220 NR Description: hypothetical protein [Lycopersicon esculentum]
  misc_feature (97)..(685): Homolog of NCBI NO: 14530687 NR Description: WRKY DNA-binding protein [Nicotiana tabacum]
  misc_feature (207)..(685): Homolog of NCBI NO: 6174838 NR Description: transcription factor NtWRKY4 [Nicotiana tabacum]
  misc_feature (366)..(687): Homolog of NCBI NO: 15236195 NR Description: WRKY family transcription factor; protein id: supported by cDNA: gi_15990591 [Arabidopsis thaliana]
  misc_feature (51)..(181): Homolog of NCBI NO: 15236195 NR Description: WRKY family transcription factor; protein id: supported by cDNA: gi_15990591 [Arabidopsis thaliana]
  misc_feature (73)..(336): Homolog of NCBI NO: 38344754 NR Description: OSJNBa0089K21.12 [Oryza sativa (japonica
  misc_feature (385)..(612): Homolog of NCBI NO: 38344754 NR Description: OSJNBa0089K21.12 [Oryza sativa (japonica
MAGFDENVAVMGEWVPRSPSPGTLFSSAIGEEKSSKRVLERELSLNHGQVIGLEEDTSSNHNKDSSQSNVFRGGLSERIAARAGFNAPRLNTENIRTNTDFSIDSNLRSPCLTISSPGLSPATLLESPVFLSNPLAQPSPTTGKFPFLPGVNGNALSSEKAKDEFFDDIGASFSFHPVSRSSSSFFQGTTEMMSVDYGNYNNRSSSHQSAEEVKPGSENIESSNLYGIETDNQNGQNKTSDVTTNTSLETVDHQEEEEEQRRGDSMAGGAPAEDGYNWRKYGQKLVKGSEYPRSYYKCTNPNCQVKKKVERSREGHITEIIYKGAHNHLKPPPNRRSGMQVDGTEQVEQQQQQRDSAATWVSCNNTQQQGGSNENNVEEGSTRFEYGNQSGSIQAQTGGQYESGDPVVVVDASSTFSNDEDEDDRGTHGSVSLGYDGGGGGGGGEGDESESKRRKLEAFAAEMSGSTRAIREPRVVVQTTSDVDILDDGYRWRKYGQKVVKGNPNPRSYYKCTAPGCTVRKHVERASHDLKSVITTYEGKHNHDVPAARNSSHGGGGDSGNGNSGGSAAVSHHYHNGHHSEPPRGRFDRQVTTNNQSPFSRPFSFQPHLGPPSGFSFGLGQTGLVNLSMPGLAYGQGKMPGLPHPYMTQPVGMSEAMMQRGMEPKVEPVSDSGQSVYNQIMSRLPQI

SEQ ID NO: 90972 - protein, 677 aa, Arabidopsis thaliana
  peptide (1)..(677): Ceres Seq. ID no. 12725925
  misc_feature (476)..(535): Pfam Name: WRKY DNA -binding domain Pfam Description: WRKY DNA -binding domain
  misc_feature (189)..(674): Homolog of NCBI NO: 13620227 NR Description: hypothetical protein [Lycopersicon esculentum]
  misc_feature (1)..(231): Homolog of NCBI NO: 13620227 NR Description: hypothetical protein [Lycopersicon esculentum]
  misc_feature (189)..(674): Homolog of NCBI NO: 13620220 NR Description: hypothetical protein [Lycopersicon esculentum]
  misc_feature (1)..(231): Homolog of NCBI NO: 13620220 NR Description: hypothetical protein [Lycopersicon esculentum]
  misc_feature (87)..(675): Homolog of NCBI NO: 14530687 NR Description: WRKY DNA-binding protein [Nicotiana tabacum]
  misc_feature (197)..(675): Homolog of NCBI NO: 6174838 NR Description: transcription factor NtWRKY4 [Nicotiana tabacum]
  misc_feature (356)..(677): Homolog of NCBI NO: 15236195 NR Description: WRKY family transcription factor; protein id: supported by cDNA: gi_15990591 [Arabidopsis thaliana]
  misc_feature (41)..(171): Homolog of NCBI NO: 15236195 NR Description: WRKY family transcription factor; protein id: supported by cDNA: gi_15990591 [Arabidopsis thaliana]
  misc_feature (63)..(326): Homolog of NCBI NO: 38344754 NR Description: OSJNBa0089K21.12 [Oryza sativa (japonica
  misc_feature (375)..(602): Homolog of NCBI NO: 38344754 NR Description: OSJNBa0089K21.12 [Oryza sativa (japonica
MGEWVPRSPSPGTLFSSAIGEEKSSKRVLERELSLNHGQVIGLEEDTSSNHNKDSSQSNVFRGGLSERIAARAGFNAPRLNTENIRTNTDFSIDSNLRSPCLTISSPGLSPATLLESPVFLSNPLAQPSPTTGKFPFLPGVNGNALSSEKAKDEFFDDIGASFSFHPVSRSSSSFFQGTTEMMSVDYGNYNNRSSSHQSAEEVKPGSENIESSNLYGIETDNQNGQNKTSDVTTNTSLETVDHQEEEEEQRRGDSMAGGAPAEDGYNWRKYGQKLVKGSEYPRSYYKCTNPNCQVKKKVERSREGHITEIIYKGAHNHLKPPPNRRSGMQVDGTEQVEQQQQQRDSAATWVSCNNTQQQGGSNENNVEEGSTRFEYGNQSGSIQAQTGGQYESGDPVVVVDASSTFSNDEDEDDRGTHGSVSLGYDGGGGGGGGEGDESESKRRKLEAFAAEMSGSTRAIREPRVVVQTTSDVDILDDGYRWRKYGQKVVKGNPNPRSYYKCTAPGCTVRKHVERASHDLKSVITTYEGKHNHDVPAARNSSHGGGGDSGNGNSGGSAAVSHHYHNGHHSEPPRGRFDRQVTTNNQSPFSRPFSFQPHLGPPSGFSFGLGQTGLVNLSMPGLAYGQGKMPGLPHPYMTQPVGMSEAMMQRGMEPKVEPVSDSGQSVYNQIMSRLPQI

SEQ ID NO: 90973 - protein, 496 aa, Arabidopsis thaliana
  peptide (1)..(496): Ceres Seq. ID no. 12725926
  misc_feature (295)..(354): Pfam Name: WRKY DNA -binding domain Pfam Description: WRKY DNA -binding domain
  misc_feature (8)..(493): Homolog of NCBI NO: 13620227 NR Description: hypothetical protein [Lycopersicon esculentum]
  misc_feature (1)..(50): Homolog of NCBI NO: 13620227 NR Description: hypothetical protein [Lycopersicon esculentum]
  misc_feature (8)..(493): Homolog of NCBI NO: 13620220 NR Description: hypothetical protein [Lycopersicon esculentum]
  misc_feature (1)..(50): Homolog of NCBI NO: 13620220 NR Description: hypothetical protein [Lycopersicon esculentum]
  misc_feature (1)..(494): Homolog of NCBI NO: 14530687 NR Description: WRKY DNA-binding protein [Nicotiana tabacum]
  misc_feature (16)..(494): Homolog of NCBI NO: 6174838 NR Description: transcription factor NtWRKY4 [Nicotiana tabacum]
  misc_feature (175)..(496): Homolog of NCBI NO: 15236195 NR Description: WRKY family transcription factor; protein id: supported by cDNA: gi_15990591 [Arabidopsis thaliana]
  misc_feature (1)..(145): Homolog of NCBI NO: 38344754 NR Description: OSJNBa0089K21.12 [Oryza sativa (japonica
  misc_feature (194)..(421): Homolog of NCBI NO: 38344754 NR Description: OSJNBa0089K21.12 [Oryza sativa (japonica
  misc_feature (1)..(145): Homolog of NCBI NO: 33519174 NR Description: WRKY2 [Oryza sativa (japonica cultivar-group)]
MMSVDYGNYNNRSSSHQSAEEVKPGSENIESSNLYGIETDNQNGQNKTSDVTTNTSLETVDHQEEEEEQRRGDSMAGGAPAEDGYNWRKYGQKLVKGSEYPRSYYKCTNPNCQVKKKVERSREGHITEIIYKGAHNHLKPPPNRRSGMQVDGTEQVEQQQQQRDSAATWVSCNNTQQQGGSNENNVEEGSTRFEYGNQSGSIQAQTGGQYESGDPVVVVDASSTFSNDEDEDDRGTHGSVSLGYDGGGGGGGGEGDESESKRRKLEAFAAEMSGSTRAIREPRVVVQTTSDVDILDDGYRWRKYGQKVVKGNPNPRSYYKCTAPGCTVRKHVERASHDLKSVITTYEGKHNHDVPAARNSSHGGGGDSGNGNSGGSAAVSHHYHNGHHSEPPRGRFDRQVTTNNQSPFSRPFSFQPHLGPPSGFSFGLGQTGLVNLSMPGLAYGQGKMPGLPHPYMTQPVGMSEAMMQRGMEPKVEPVSDSGQSVYNQIMSRLPQI

SEQ ID NO: 90974 - DNA, 1593 bp, Arabidopsis thaliana
  misc_feature (1)..(1593): Ceres Seq. ID no. 12725931
  misc_feature: MA Experiment ID: 20000180 Result: Down-regulated in Transcription
  misc_feature: MA Experiment 20000180 PARAMETER Experiment Name: At_Germinating_Seeds_P Parameter: Age (hr) Value: 24 vs. 0
  misc_feature: MA Experiment 20000180 PARAMETER Experiment Name: At_Germinating_Seeds_P Parameter: Tissue Value: Germinating Seeds
  misc_feature: MA Experiment ID: 20001556 Result: Up-regulated in Transcription
  misc_feature: MA Experiment 20001556 PARAMETER Experiment Name: At_Drought_Soil_Dry_P Parameter: Age (day) Value: 26
  misc_feature: MA Experiment 20001556 PARAMETER Experiment Name: At_Drought_Soil_Dry_P Parameter: Organism Value: A. thaliana
  misc_feature: MA Experiment 20001556 PARAMETER Experiment Name: At_Drought_Soil_Dry_P Parameter: Plant Line Value: WS
  misc_feature: MA Experiment 20001556 PARAMETER Experiment Name: At_Drought_Soil_Dry_P Parameter: Post Timepoint (hr) Value: None
  misc_feature: MA Experiment 20001556 PARAMETER Experiment Name: At_Drought_Soil_Dry_P Parameter: Post-Treatment Value: None
  misc_feature: MA Experiment 20001556 PARAMETER Experiment Name: At_Drought_Soil_Dry_P Parameter: Timepoint (day) Value: 12
  misc_feature: MA Experiment 20001556 PARAMETER Experiment Name: At_Drought_Soil_Dry_P Parameter: Treatment Value: Drought vs. No Drought
  misc_feature: MA Experiment ID: 20001558 Result: Up-regulated in Transcription
  misc_feature: MA Experiment 20001558 PARAMETER Experiment Name: At_Drought_Soil_Dry_P Parameter: Age (day) Value: 27
  misc_feature: MA Experiment 20001558 PARAMETER Experiment Name: At_Drought_Soil_Dry_P Parameter: Organism Value: A. thaliana
  misc_feature: MA Experiment 20001558 PARAMETER Experiment Name: At_Drought_Soil_Dry_P Parameter: Plant Line Value: WS
  misc_feature: MA Experiment 20001558 PARAMETER Experiment Name: At_Drought_Soil_Dry_P Parameter: Post Timepoint (hr) Value: 6
  misc_feature: MA Experiment 20001558 PARAMETER Experiment Name: At_Drought_Soil_Dry_P Parameter: Post-Treatment Value: Re-Water vs. No Drought
  misc_feature: MA Experiment 20001558 PARAMETER Experiment Name: At_Drought_Soil_Dry_P Parameter: Timepoint (day) Value: 13
  misc_feature: MA Experiment 20001558 PARAMETER Experiment Name: At_Drought_Soil_Dry_P Parameter: Treatment Value: Drought vs. No Drought
atgattcagagaatcaatgccttgagcttaagctctggtctaaattggttcgttacctcattgaaaatccatggaaataacctcaaaacattaaagcaatctcattgttacatgatcataaccggtttaaacagagacaacctcaacgttgccaaattcatcgaagcatgttcaaatgcaggacatctccgatatgcttactctgtattcacccaccagccatgtcccaatacttatctccacaacaccatgattagagctttgtctctcctcgacgaacccaatgcgcattcgattgcgatcacggtttatagaaagttatgggctttgtgtgctaagcctgacacgtttactttcccgtttgtgttgaagattgctgttagggtttctgatgtttggtttgggagacagattcatggacaagttgtggtttttgggtttgattcgagcgttcatgttgtaacaggtttgattcagatgtatttttcgtgtggtggtttgggagatgcacgtaagatgttcgatgaaatgcttgtcaaggatgtgaatgtttggaatgcgttgttagcagggtatgggaaagttggtgagatggatgaagctaggagtttgcttgagatgatgccttgttgggtaaggaatgaggtttcttggacttgtgtgatctctggatatgcgaaaagtggacgagctagcgaagctattgaagtgtttcagagaatgctgatggagaatgttgagcctgatgaagttacgcttttggctgtgctctcagcttgtgctgatcttggttcacttgaattgggtgaaagaatatgtagctatgttgatcaccgagggatgaacagagcggtttcattgaacaatgcggtcattgatatgtatgcgaaatcagggaatataacaaaggcgttggatgtgtttgagtgtgttaatgagagaaatgttgttacttggacgactataatcgcagggctagctacgcacgggcacggagctgaagccttagcgatgtttaaccgtatggttaaagctggcgtgagaccgaacgatgttactttcattgcaatcctttcagcttgcagtcatgtcggttgggttgatcttggaaaacgtttgtttaactcaatgagatcgaaatacgggattcatccaaacattgagcattacggatgcatgattgatttgctaggacgagcaggtaaactccgagaggcggatgaagttattaaaagcatgccctttaaggccaatgctgcaatatggggatctcttcttgctgcttcaaatgttcatcatgatcttgagcttggagaaagagctttgagtgagctgattaagttagaaccgaataacagcggtaactatatgcttttagctaatttatactcgaatttaggaaggtgggatgagtcgaggatgatgaggaacatgatgaaagggattggtgtgaagaagatggctggtgaaagctccatagaagttgaaaacagagtatacaaattcatttcaggggatcttacgcatcctcaagtcgaaaggattcatgaaattctacaagagatggatttgcaaatacagagcaaagtttga

SEQ ID NO: 90975 - protein, 530 aa, Arabidopsis thaliana
  peptide (1)..(530): Ceres Seq. ID no. 12725932
  misc_feature (152)..(186): Pfam Name: PPR repeat Pfam Description: PPR repeat
  misc_feature (1)..(530): Homolog of NCBI NO: 15241180 NR Description: putative protein; protein id: At5g56310.1 thaliana] >gi|10177829|dbj|BAB11258.1|
  misc_feature (137)..(528): Homolog of NCBI NO: 34902972 NR Description: unnamed protein product [Oryza sativa (japonica group)] >gi|9558518|dbj|BAB03436.1| unnamed protein product
  misc_feature (15)..(520): Homolog of NCBI NO: 15225375 NR Description: unknown protein; protein id: At2g20540.1
  misc_feature (5)..(515): Homolog of NCBI NO: 15239979 NR Description: selenium-binding protein-like; protein id:
  misc_feature (26)..(522): Homolog of NCBI NO: 15240085 NR Description: selenium-binding protein-like; protein id:
  misc_feature (28)..(522): Homolog of NCBI NO: 15239745 NR Description: selenium-binding protein-like; protein id:
  misc_feature (27)..(529): Homolog of NCBI NO: 9759241 NR Description: gene_id:MNC17.11~pir||T04732~strong similarity to
  misc_feature (27)..(529): Homolog of NCBI NO: 15237835 NR Description: putative protein; protein id: At5g59200.1
  misc_feature (14)..(522): Homolog of NCBI NO: 15217517 NR Description: PPR-repeat protein, putative; protein id:
  misc_feature (23)..(493): Homolog of NCBI NO: 25402522 NR Description: hypothetical protein [imported] - Arabidopsis
MIQRINALSLSSGLNWFVTSLKIHGNNLKTLKQSHCYMIITGLNRDNLNVAKFIEACSNAGHLRYAYSVFTHQPCPNTYLHNTMIRALSLLDEPNAHSIAITVYRKLWALCAKPDTFTFPFVLKIAVRVSDVWFGRQIHGQVVVFGFDSSVHVVTGLIQMYFSCGGLGDARKMFDEMLVKDVNVWNALLAGYGKVGEMDEARSLLEMMPCWVRNEVSWTCVISGYAKSGRASEAIEVFQRMLMENVEPDEVTLLAVLSACADLGSLELGERICSYVDHRGMNRAVSLNNAVIDMYAKSGNITKALDVFECVNERNVVTWTTIIAGLATHGHGAEALAMFNRMVKAGVRPNDVTFIAILSACSHVGWVDLGKRLFNSMRSKYGIHPNIEHYGCMIDLLGRAGKLREADEVIKSMPFKANAAIWGSLLAASNVHHDLELGERALSELIKLEPNNSGNYMLLANLYSNLGRWDESRMMRNMMKGIGVKKMAGESSIEVENRVYKFISGDLTHPQVERIHEILQEMDLQIQSKV

SEQ ID NO: 90976 - protein, 493 aa, Arabidopsis thaliana
  peptide (1)..(493): Ceres Seq. ID no. 12725933
  misc_feature (115)..(149): Pfam Name: PPR repeat Pfam Description: PPR repeat
  misc_feature (1)..(493): Homolog of NCBI NO: 15241180 NR Description: putative protein; protein id: At5g56310.1 thaliana] >gi|10177829|dbj|BAB11258.1|
  misc_feature (100)..(491): Homolog of NCBI NO: 34902972 NR Description: unnamed protein product [Oryza sativa (japonica group)] >gi|9558518|dbj|BAB03436.1| unnamed protein product
  misc_feature (1)..(483): Homolog of NCBI NO: 15225375 NR Description: unknown protein; protein id: At2g20540.1
  misc_feature (1)..(478): Homolog of NCBI NO: 15239979 NR Description: selenium-binding protein-like; protein id:
  misc_feature (1)..(485): Homolog of NCBI NO: 15240085 NR Description: selenium-binding protein-like; protein id:
  misc_feature (1)..(485): Homolog of NCBI NO: 15239745 NR Description: selenium-binding protein-like; protein id:
  misc_feature (1)..(492): Homolog of NCBI NO: 9759241 NR Description: gene_id:MNC17.11~pir||T04732~strong similarity to
  misc_feature (1)..(492): Homolog of NCBI NO: 15237835 NR Description: putative protein; protein id: At5g59200.1
  misc_feature (1)..(485): Homolog of NCBI NO: 15217517 NR Description: PPR-repeat protein, putative; protein id:
  misc_feature (1)..(456): Homolog of NCBI NO: 25402522 NR Description: hypothetical protein [imported] - Arabidopsis
MIITGLNRDNLNVAKFIEACSNAGHLRYAYSVFTHQPCPNTYLHNTMIRALSLLDEPNAHSIAITVYRKLWALCAKPDTFTFPFVLKIAVRVSDVWFGRQIHGQVVVFGFDSSVHVVTGLIQMYFSCGGLGDARKMFDEMLVKDVNVWNALLAGYGKVGEMDEARSLLEMMPCWVRNEVSWTCVISGYAKSGRASEAIEVFQRMLMENVEPDEVTLLAVLSACADLGSLELGERICSYVDHRGMNRAVSLNNAVIDMYAKSGNITKALDVFECVNERNVVTWTTIIAGLATHGHGAEALAMFNRMVKAGVRPNDVTFIAILSACSHVGWVDLGKRLFNSMRSKYGIHPNIEHYGCMIDLLGRAGKLREADEVIKSMPFKANAAIWGSLLAASNVHHDLELGERALSELIKLEPNNSGNYMLLANLYSNLGRWDESRMMRNMMKGIGVKKMAGESSIEVENRVYKFISGDLTHPQVERIHEILQEMDLQIQSKV

SEQ ID NO: 90977 - protein, 447 aa, Arabidopsis thaliana
  peptide (1)..(447): Ceres Seq. ID no. 12725934
  misc_feature (69)..(103): Pfam Name: PPR repeat Pfam Description: PPR repeat
  misc_feature (1)..(447): Homolog of NCBI NO: 15241180 NR Description: putative protein; protein id: At5g56310.1 thaliana] >gi|10177829|dbj|BAB11258.1|
  misc_feature (54)..(445): Homolog of NCBI NO: 34902972 NR Description: unnamed protein product [Oryza sativa (japonica group)] >gi|9558518|dbj|BAB03436.1| unnamed protein product
  misc_feature (1)..(437): Homolog of NCBI NO: 15225375 NR Description: unknown protein; protein id: At2g20540.1
  misc_feature (1)..(432): Homolog of NCBI NO: 15239979 NR Description: selenium-binding protein-like; protein id:
  misc_feature (1)..(439): Homolog of NCBI NO: 15240085 NR Description: selenium-binding protein-like; protein id:
  misc_feature (1)..(439): Homolog of NCBI NO: 15239745 NR Description: selenium-binding protein-like; protein id:
  misc_feature (1)..(446): Homolog of NCBI NO: 9759241 NR Description: gene_id:MNC17.11~pir||T04732~strong similarity to
  misc_feature (1)..(446): Homolog of NCBI NO: 15237835 NR Description: putative protein; protein id: At5g59200.1
  misc_feature (1)..(439): Homolog of NCBI NO: 15217517 NR Description: PPR-repeat protein, putative; protein id:
  misc_feature (1)..(410): Homolog of NCBI NO: 25402522 NR Description: hypothetical protein [imported] - Arabidopsis
MIRALSLLDEPNAHSIAITVYRKLWALCAKPDTFTFPFVLKIAVRVSDVWFGRQIHGQVVVFGFDSSVHVVTGLIQMYFSCGGLGDARKMFDEMLVKDVNVWNALLAGYGKVGEMDEARSLLEMMPCWVRNEVSWTCVISGYAKSGRASEAIEVFQRMLMENVEPDEVTLLAVLSACADLGSLELGERICSYVDHRGMNRAVSLNNAVIDMYAKSGNITKALDVFECVNERNVVTWTTIIAGLATHGHGAEALAMFNRMVKAGVRPNDVTFIAILSACSHVGWVDLGKRLFNSMRSKYGIHPNIEHYGCMIDLLGRAGKLREADEVIKSMPFKANAAIWGSLLAASNVHHDLELGERALSELIKLEPNNSGNYMLLANLYSNLGRWDESRMMRNMMKGIGVKKMAGESSIEVENRVYKFISGDLTHPQVERIHEILQEMDLQIQSKV

SEQ ID NO: 90978 - DNA, 1455 bp, Arabidopsis thaliana
  misc_feature (1)..(1455): Ceres Seq. ID no. 12725939
  misc_feature: MA Experiment ID: 20001451 Result: Up-regulated in Transcription
  misc_feature: MA Experiment 20001451 PARAMETER Experiment Name: At_Far-red-induction_P Parameter: Age (day) Value: 7
  misc_feature: MA Experiment 20001451 PARAMETER Experiment Name: At_Far-red-induction_P Parameter: Light Value: Far-red vs. White
  misc_feature: MA Experiment 20001451 PARAMETER Experiment Name: At_Far-red-induction_P Parameter: Organism Value: A. thaliana
  misc_feature: MA Experiment 20001451 PARAMETER Experiment Name: At_Far-red-induction_P Parameter: Plant Line Value: Columbia
  misc_feature: MA Experiment 20001451 PARAMETER Experiment Name: At_Far-red-induction_P Parameter: Timepoint (hr) Value: 24
  misc_feature: MA Experiment 20001451 PARAMETER Experiment Name: At_Far-red-induction_P Parameter: Tissue Value: Whole Plant
  misc_feature: MA Experiment ID: 20001905 Result: Up-regulated in Transcription
  misc_feature: MA Experiment 20001905 PARAMETER Experiment Name: At_Drought_Reproduction_P Parameter: Age (day) Value: 40
  misc_feature: MA Experiment 20001905 PARAMETER Experiment Name: At_Drought_Reproduction_P Parameter: Organism Value: A. thaliana
  misc_feature: MA Experiment 20001905 PARAMETER Experiment Name: At_Drought_Reproduction_P Parameter: Plant Line Value: WS
  misc_feature: MA Experiment 20001905 PARAMETER Experiment Name: At_Drought_Reproduction_P Parameter: Timepoint (day) Value: 10
  misc_feature: MA Experiment 20001905 PARAMETER Experiment Name: At_Drought_Reproduction_P Parameter: Tissue Value: Rosettes
  misc_feature: MA Experiment 20001905 PARAMETER Experiment Name: At_Drought_Reproduction_P Parameter: Treatment Value: Drought vs. No Drought
aaaaaaaaaatcttgggttttcaagaaaaagtagagacattttaaagaatcaatagatttgtgggggtgaagtaaggaacatggaggaaacaatggcagctaggtattggtgtcacatgtgttcacaaatggtgaatccagtaatggaatctgagatcaaatgtcccttttgccaaagcggattcatcgaagaaatgagcggtaatggcggtggaggtggtggcagaggcataagagatgttcaagattcagaaaccgattttggaacagaccgtgcattgtctctatgggcaccaatcttgcttggaatgatgagtagtcctcgaagacgaagaaggtttagaagatcagagtttggtgaagagaatgatgataatggtgatgacttgactactaatgctgatgggaatgggaatgatagtaacaacagtaataataacgtgtatcgtcatcatcgagctaggagacatggtggagagattgatttagatagagagtttgaatctatcttgaggagaagacgaagaagctcagggaatatattgcagttgcttcaagggattcgtgcagggattgcttctgagtatgaaagctctgataacaattgggataattctcgagagagggatagagttataatgattaatccgtataaccaatcgctagttgttccttcggatcagaatcagaatcatccttcattgacttcacttggagattacttcattggacctggtttagatcttttgcttcagcatttggctgagaatgatcctaataggcaagggactccacctgctcgtaaagaagctgttgaagctttaccaacggttaagataatggaacctttgcaatgttctgtttgtttggatgattttgagaaaggtacggaagctaaagagatgccttgtaagcataagtttcatgttcggtgtattgttccctggcttgagcttcatagttcttgtcctgtgtgtcgttttgagcttccttctagtgctgatgatgatgatgagactaagactgattccgagagagtgctgagaacaagaaatgttcgggaaacgagtaacggaaacgttgttgagaatgtgggaaatgcggatagaggaagagaggatgaggtgaggagtggaaatgggagacggttttcgtttccatggccgtttagtggattgttctcgtcttcttcttcttcgtcttcttcaacctctggatctcaatctggtgagaacaatttcttctcaagatcttctggttcttctcgctgagagcaaaacaatcaaaaactaaaacatcttggattttgttattgttcttcatcttttgttgttctctcatttttctagctattgaacttgttatttcctctgcatttcattctctgctttactgtacatagaaatgatgttctttcactcagactgttgaaaaacaaatatccattgttggtgt

SEQ ID NO: 90979 - protein, 396 aa, Arabidopsis thaliana
  peptide (1)..(396): Ceres Seq. ID no. 12725940
  misc_feature (259)..(299): Pfam Name: Zinc finger, C3HC4 type (RING finger) Pfam Description: Zinc finger, C3HC4 type (RING finger)
  misc_feature (1)..(396): Homolog of NCBI NO: 15241188 NR Description: putative protein; protein id: At5g56340.1, by cDNA: gi_17380897, supported by cDNA: gi_20259580 [Arabidopsis >gi|10177832|dbj|BAB11261.1| gene_id:MCD7.7~pir||T05064~similar
  misc_feature (5)..(386): Homolog of NCBI NO: 22328949 NR Description: putative protein; protein id: At4g26400.1, by cDNA: gi_20466681 [Arabidopsis thaliana] putative protein [Arabidopsis thaliana]
  misc_feature (17)..(386): Homolog of NCBI NO: 7486783 NR Description: hypothetical protein M3E9.170 - Arabidopsis >gi|2982466|emb|CAA18230.1| putative protein [Arabidopsis >gi|7269492|emb|CAB79495.1| putative protein [Arabidopsis
  misc_feature (96)..(342): Homolog of NCBI NO: 15231238 NR Description: unknown protein; protein id: At3g13430.1 thaliana] >gi|9280292|dbj|BAB01747.1| gene_id:MRP15.6~unknown
  misc_feature (1)..(42): Homolog of NCBI NO: 15231238 NR Description: unknown protein; protein id: At3g13430.1 thaliana] >gi|9280292|dbj|BAB01747.1| gene_id:MRP15.6~unknown
  misc_feature (96)..(342): Homolog of NCBI NO: 38454178 NR Description: At3g13430 [Arabidopsis thaliana]
  misc_feature (1)..(42): Homolog of NCBI NO: 38454178 NR Description: At3g13430 [Arabidopsis thaliana]
  misc_feature (132)..(380): Homolog of NCBI NO: 18405411 NR Description: expressed protein; protein id: At1g55530.1, by cDNA: gi_14517545, supported by cDNA: gi_15983407 [Arabidopsis
  misc_feature (210)..(376): Homolog of NCBI NO: 34903272 NR Description: unnamed protein product [Oryza sativa (japonica group)] >gi|6539567|dbj|BAA88184.1| unnamed protein product
  misc_feature (2)..(98): Homolog of NCBI NO: 34903272 NR Description: unnamed protein product [Oryza sativa (japonica group)] >gi|6539567|dbj|BAA88184.1| unnamed protein product
MEETMAARYWCHMCSQMVNPVMESEIKCPFCQSGFIEEMSGNGGGGGGRGIRDVQDSETDFGTDRALSLWAPILLGMMSSPRRRRRFRRSEFGEENDDNGDDLTTNADGNGNDSNNSNNNVYRHHRARRHGGEIDLDREFESILRRRRRSSGNILQLLQGIRAGIASEYESSDNNWDNSRERDRVIMINPYNQSLVVPSDQNQNHPSLTSLGDYFIGPGLDLLLQHLAENDPNRQGTPPARKEAVEALPTVKIMEPLQCSVCLDDFEKGTEAKEMPCKHKFHVRCIVPWLELHSSCPVCRFELPSSADDDDETKTDSERVLRTRNVRETSNGNVVENVGNADRGREDEVRSGNGRRFSFPWPFSGLFSSSSSSSSSTSGSQSGENNFFSRSSGSSR

SEQ ID NO: 90980 - protein, 392 aa, Arabidopsis thaliana
  peptide (1)..(392): Ceres Seq. ID no. 12725941
  misc_feature (255)..(295): Pfam Name: Zinc finger, C3HC4 type (RING finger) Pfam Description: Zinc finger, C3HC4 type (RING finger)
  misc_feature (1)..(392): Homolog of NCBI NO: 15241188 NR Description: putative protein; protein id: At5g56340.1, by cDNA: gi_17380897, supported by cDNA: gi_20259580 [Arabidopsis >gi|10177832|dbj|BAB11261.1| gene_id:MCD7.7~pir||T05064~similar
  misc_feature (1)..(382): Homolog of NCBI NO: 22328949 NR Description: putative protein; protein id: At4g26400.1, by cDNA: gi_20466681 [Arabidopsis thaliana] putative protein [Arabidopsis thaliana]
  misc_feature (13)..(382): Homolog of NCBI NO: 7486783 NR Description: hypothetical protein M3E9.170 - Arabidopsis >gi|2982466|emb|CAA18230.1| putative protein [Arabidopsis >gi|7269492|emb|CAB79495.1| putative protein [Arabidopsis
  misc_feature (92)..(338): Homolog of NCBI NO: 15231238 NR Description: unknown protein; protein id: At3g13430.1 thaliana] >gi|9280292|dbj|BAB01747.1| gene_id:MRP15.6~unknown
  misc_feature (1)..(38): Homolog of NCBI NO: 15231238 NR Description: unknown protein; protein id: At3g13430.1 thaliana] >gi|9280292|dbj|BAB01747.1| gene_id:MRP15.6~unknown
  misc_feature (92)..(338): Homolog of NCBI NO: 38454178 NR Description: At3g13430 [Arabidopsis thaliana]
  misc_feature (1)..(38): Homolog of NCBI NO: 38454178 NR Description: At3g13430 [Arabidopsis thaliana]
  misc_feature (128)..(376): Homolog of NCBI NO: 18405411 NR Description: expressed protein; protein id: At1g55530.1, by cDNA: gi_14517545, supported by cDNA: gi_15983407 [Arabidopsis
  misc_feature (206)..(372): Homolog of NCBI NO: 34903272 NR Description: unnamed protein product [Oryza sativa (japonica group)] >gi|6539567|dbj|BAA88184.1| unnamed protein product
  misc_feature (1)..(94): Homolog of NCBI NO: 34903272 NR Description: unnamed protein product [Oryza sativa (japonica group)] >gi|6539567|dbj|BAA88184.1| unnamed protein product
MAARYWCHMCSQMVNPVMESEIKCPFCQSGFIEEMSGNGGGGGGRGIRDVQDSETDFGTDRALSLWAPILLGMMSSPRRRRRFRRSEFGEENDDNGDDLTTNADGNGNDSNNSNNNVYRHHRARRHGGEIDLDREFESILRRRRRSSGNILQLLQGIRAGIASEYESSDNNWDNSRERDRVIMINPYNQSLVVPSDQNQNHPSLTSLGDYFIGPGLDLLLQHLAENDPNRQGTPPARKEAVEALPTVKIMEPLQCSVCLDDFEKGTEAKEMPCKHKFHVRCIVPWLELHSSCPVCRFELPSSADDDDETKTDSERVLRTRNVRETSNGNVVENVGNADRGREDEVRSGNGRRFSFPWPFSGLFSSSSSSSSSTSGSQSGENNFFSRSSGSSR

SEQ ID NO: 90981 - protein, 384 aa, Arabidopsis thaliana
  peptide (1)..(384): Ceres Seq. ID no. 12725942
  misc_feature (247)..(287): Pfam Name: Zinc finger, C3HC4 type (RING finger) Pfam Description: Zinc finger, C3HC4 type (RING finger)
  misc_feature (1)..(384): Homolog of NCBI NO: 15241188 NR Description: putative protein; protein id: At5g56340.1, by cDNA: gi_17380897, supported by cDNA: gi_20259580 [Arabidopsis >gi|10177832|dbj|BAB11261.1| gene_id:MCD7.7~pir||T05064~similar
  misc_feature (1)..(374): Homolog of NCBI NO: 22328949 NR Description: putative protein; protein id: At4g26400.1, by cDNA: gi_20466681 [Arabidopsis thaliana] putative protein [Arabidopsis thaliana]
  misc_feature (5)..(374): Homolog of NCBI NO: 7486783 NR Description: hypothetical protein M3E9.170 - Arabidopsis >gi|2982466|emb|CAA18230.1| putative protein [Arabidopsis >gi|7269492|emb|CAB79495.1| putative protein [Arabidopsis
  misc_feature (84)..(330): Homolog of NCBI NO: 15231238 NR Description: unknown protein; protein id: At3g13430.1 thaliana] >gi|9280292|dbj|BAB01747.1| gene_id:MRP15.6~unknown
  misc_feature (1)..(30): Homolog of NCBI NO: 15231238 NR Description: unknown protein; protein id: At3g13430.1 thaliana] >gi|9280292|dbj|BAB01747.1| gene_id:MRP15.6~unknown
  misc_feature (84)..(330): Homolog of NCBI NO: 38454178 NR Description: At3g13430 [Arabidopsis thaliana]
  misc_feature (1)..(30): Homolog of NCBI NO: 38454178 NR Description: At3g13430 [Arabidopsis thaliana]
  misc_feature (120)..(368): Homolog of NCBI NO: 18405411 NR Description: expressed protein; protein id: At1g55530.1, by cDNA: gi_14517545, supported by cDNA: gi_15983407 [Arabidopsis
  misc_feature (198)..(364): Homolog of NCBI NO: 34903272 NR Description: unnamed protein product [Oryza sativa (japonica group)] >gi|6539567|dbj|BAA88184.1| unnamed protein product
  misc_feature (1)..(86): Homolog of NCBI NO: 34903272 NR Description: unnamed protein product [Oryza sativa (japonica group)] >gi|6539567|dbj|BAA88184.1| unnamed protein product
MCSQMVNPVMESEIKCPFCQSGFIEEMSGNGGGGGGRGIRDVQDSETDFGTDRALSLWAPILLGMMSSPRRRRRFRRSEFGEENDDNGDDLTTNADGNGNDSNNSNNNVYRHHRARRHGGEIDLDREFESILRRRRRSSGNILQLLQGIRAGIASEYESSDNNWDNSRERDRVIMINPYNQSLVVPSDQNQNHPSLTSLGDYFIGPGLDLLLQHLAENDPNRQGTPPARKEAVEALPTVKIMEPLQCSVCLDDFEKGTEAKEMPCKHKFHVRCIVPWLELHSSCPVCRFELPSSADDDDETKTDSERVLRTRNVRETSNGNVVENVGNADRGREDEVRSGNGRRFSFPWPFSGLFSSSSSSSSSTSGSQSGENNFFSRSSGSSR

SEQ ID NO: 90982 - DNA, 1791 bp, Arabidopsis thaliana
  misc_feature (1)..(1791): Ceres Seq. ID no. 12725975
  misc_feature: MA Experiment ID: 20000171 Result: Up-regulated in Transcription
  misc_feature: MA Experiment 20000171 PARAMETER Experiment Name: At_42deg_Heat_P Parameter: Age (day) Value: 14
  misc_feature: MA Experiment 20000171 PARAMETER Experiment Name: At_42deg_Heat_P Parameter: Organism Value: A. thaliana
  misc_feature: MA Experiment 20000171 PARAMETER Experiment Name: At_42deg_Heat_P Parameter: Plant Line Value: WS
  misc_feature: MA Experiment 20000171 PARAMETER Experiment Name: At_42deg_Heat_P Parameter: Temperature (deg C) Value: 42 vs. 22
  misc_feature: MA Experiment 20000171 PARAMETER Experiment Name: At_42deg_Heat_P Parameter: Timepoint (hr) Value: 1
  misc_feature: MA Experiment 20000171 PARAMETER Experiment Name: At_42deg_Heat_P Parameter: Tissue Value: Aerial
  misc_feature: MA Experiment ID: 20000173 Result: Up-regulated in Transcription
  misc_feature: MA Experiment 20000173 PARAMETER Experiment Name: At_42deg_Heat_P Parameter: Age (day) Value: 14
  misc_feature: MA Experiment 20000173 PARAMETER Experiment Name: At_42deg_Heat_P Parameter: Organism Value: A. thaliana
  misc_feature: MA Experiment 20000173 PARAMETER Experiment Name: At_42deg_Heat_P Parameter: Plant Line Value: WS
  misc_feature: MA Experiment 20000173 PARAMETER Experiment Name: At_42deg_Heat_P Parameter: Temperature (deg C) Value: 42 vs. 22
  misc_feature: MA Experiment 20000173 PARAMETER Experiment Name: At_42deg_Heat_P Parameter: Timepoint (hr) Value: 6
  misc_feature: MA Experiment 20000173 PARAMETER Experiment Name: At_42deg_Heat_P Parameter: Tissue Value: Aerial
  misc_feature: MA Experiment ID: 20000185 Result: Up-regulated in Transcription
  misc_feature: MA Experiment 20000185 PARAMETER Experiment Name: At_Roots__P Parameter: Age (day) Value: 7 vs. 21
  misc_feature: MA Experiment 20000185 PARAMETER Experiment Name: At_Roots__P Parameter: Organism Value: A. thaliana
  misc_feature: MA Experiment 20000185 PARAMETER Experiment Name: At_Roots__P Parameter: Tissue Value: Roots vs. Whole Plant
  misc_feature: MA Experiment ID: 20000265 Result: Up-regulated in Transcription
  misc_feature: MA Experiment 20000265 PARAMETER Experiment Name: At_Open_Flower_P Parameter: Age (day) Value: 21
  misc_feature: MA Experiment 20000265 PARAMETER Experiment Name: At_Open_Flower_P Parameter: Plant Line Value: WS
  misc_feature: MA Experiment 20000265 PARAMETER Experiment Name: At_Open_Flower_P Parameter: Tissue Value: Closed Flower vs. Whole Plant
  misc_feature: MA Experiment ID: 20000439 Result: Up-regulated in Transcription
  misc_feature: MA Experiment 20000439 PARAMETER Experiment Name: At_Roots__P Parameter: Age (day) Value: 14 vs. 21
  misc_feature: MA Experiment 20000439 PARAMETER Experiment Name: At_Roots__P Parameter: Organism Value: A. thaliana
  misc_feature: MA Experiment 20000439 PARAMETER Experiment Name: At_Roots__P Parameter: Tissue Value: Roots vs. Whole Plant
  misc_feature: MA Experiment ID: 20001248 Result: Down-regulated in Transcription
  misc_feature: MA Experiment 20001248 PARAMETER Experiment Name: At_Far-red-induction_P Parameter: Age (day) Value: 7
  misc_feature: MA Experiment 20001248 PARAMETER Experiment Name: At_Far-red-induction_P Parameter: Light Value: Far-red vs. White
  misc_feature: MA Experiment 20001248 PARAMETER Experiment Name: At_Far-red-induction_P Parameter: Organism Value: A. thaliana
  misc_feature: MA Experiment 20001248 PARAMETER Experiment Name: At_Far-red-induction_P Parameter: Plant Line Value: Columbia
  misc_feature: MA Experiment 20001248 PARAMETER Experiment Name: At_Far-red-induction_P Parameter: Timepoint (hr) Value: 4
  misc_feature: MA Experiment 20001248 PARAMETER Experiment Name: At_Far-red-induction_P Parameter: Tissue Value: Whole Plant
  misc_feature: MA Experiment ID: 20001450 Result: Down-regulated in Transcription
  misc_feature: MA Experiment 20001450 PARAMETER Experiment Name: At_Far-red-induction_P Parameter: Age (day) Value: 7
  misc_feature: MA Experiment 20001450 PARAMETER Experiment Name: At_Far-red-induction_P Parameter: Light Value: Far-red vs. White
  misc_feature: MA Experiment 20001450 PARAMETER Experiment Name: At_Far-red-induction_P Parameter: Organism Value: A. thaliana
  misc_feature: MA Experiment 20001450 PARAMETER Experiment Name: At_Far-red-induction_P Parameter: Plant Line Value: Columbia
  misc_feature: MA Experiment 20001450 PARAMETER Experiment Name: At_Far-red-induction_P Parameter: Timepoint (hr) Value: 8
  misc_feature: MA Experiment 20001450 PARAMETER Experiment Name: At_Far-red-induction_P Parameter: Tissue Value: Whole Plant
  misc_feature: MA Experiment ID: 20001451 Result: Down-regulated in Transcription
  misc_feature: MA Experiment 20001451 PARAMETER Experiment Name: At_Far-red-induction_P Parameter: Age (day) Value: 7
  misc_feature: MA Experiment 20001451 PARAMETER Experiment Name: At_Far-red-induction_P Parameter: Light Value: Far-red vs. White
  misc_feature: MA Experiment 20001451 PARAMETER Experiment Name: At_Far-red-induction_P Parameter: Organism Value: A. thaliana
  misc_feature: MA Experiment 20001451 PARAMETER Experiment Name: At_Far-red-induction_P Parameter: Plant Line Value: Columbia
  misc_feature: MA Experiment 20001451 PARAMETER Experiment Name: At_Far-red-induction_P Parameter: Timepoint (hr) Value: 24
  misc_feature: MA Experiment 20001451 PARAMETER Experiment Name: At_Far-red-induction_P Parameter: Tissue Value: Whole Plant
atggcatcaacctttagcgcaacgtcgtcaatgggttcatctttggctcctccttcgaatcgattgtcatcttttgtttcgatctcatcaagctcttttggaaggactcagagtattgctcagaggaaagcaaggtttcctaaaatatatgcggctaagcaattgcatttcaataaggacgggactgcgattaagaagcttcaagctggtgtgaataaacttgcggatttagttggggttactttaggtcctaaaggcaggaatgttgttctagagagcaaatacggttcccctagaatcgttaatgatggtgttacggtcgctagagaggttgagcttgaggatccagttgagaacattggtgctaagctagtgagacaagctgcttccaagactaatgacttagctggtgatggaacaacgacttctgttgttcttgctcaaggtcttattgctgaaggtgtaaaggtggtagctgctggtgcaaatcctgttttgattaccagaggtattgagaaaaccaccaaagctcttgtggctgagttgaagaaaatgtcaaaggaggttgaagacagtgaactagcagatgttgcagcagttagtgcaggaaacaattacgaagtaggcaatatgattgcagaagcaatggcaaaagttggtcgtaaaggtgttgtcactctagaggaaggcaaaagcgctgagaacagcctttacgttgttgaaggaatgcaatttgatcgtggttatatctctccttactttgtcaccgacagtgagaaaatgtgtgcagaatatgagaactgcaagttgtttcttgttgacaaaaagataacaaatgctagagatattattagcattctggaagatgcgattaaaggtggatacccgcttttgatcattgctgaagatattgagcaagagccattagcgactcttgttgttaacaagcttcgtgggacaataaaagttgctgctttgaaagctcctggatttggagagaggaaaagccagtaccttgatgacattgctgcgcttacaggagctactgtgattagggaagaagttggacttcagttggagaaagttggaccagaagttttgggtaatgctggtaaagtggttctcacaaaagatactacaacgatagttggtgatggaagtactgaagaagttgtgaagaagagagttgaacagatcaagaatcttatcgaggctgctgaacaagactatgaaaaggaaaagcttaatgagagaattgctaaattatcaggcggtgttgctgtaattcaggttggagcacaaactgagacagagcttaaggagaagaaattaagagttgaagatgctcttaatgctacaaaggctgctgtggaagaaggtattgttgttggcggaggatgtactctgctaagacttgcatcgaaagtggacgctattaaagagactctagcaaacgatgaagaaaaggttggagctgacattgttaagaaagcattgagctacccactgaagttaatcgccaagaacgctggtgtcaatggcagcgttgtcagtgagaaggttctttctagtgacaaccctaaacatggttacaatgctgcaactggcaaatacgaagatctcatggctgcaggaatcattgatccaaccaaagttgtgagatgttgcctagagcatgcttcatctgtggcaaagacattcttgatgtctgattgtgttgttgtggagatcaaggagcctgaatcagcagctcctgctggtaaccctatggacaattcaggtatctcttag

SEQ ID NO: 90983 - protein, 596 aa, Arabidopsis thaliana
  peptide (1)..(596): Ceres Seq. ID no. 12725976
  misc_feature (74)..(578): Pfam Name: TCP-1/cpn60 chaperonin family Pfam Description: TCP-1/cpn60 chaperonin family
  misc_feature (1)..(594): Homolog of NCBI NO: 30696748 NR Description: chaperonin, putative [Arabidopsis thaliana]
  misc_feature (1)..(594): Homolog of NCBI NO: 15231255 NR Description: chaperonin 60 beta, putative; protein id: [Arabidopsis thaliana] >gi|9280299|dbj|BAB01754.1| GloEL protein;
  misc_feature (1)..(594): Homolog of NCBI NO: 15222729 NR Description: Rubisco subunit binding-protein beta subunit; id: At1g55490.1, supported by cDNA: gi_14423415, supported by gi_20148344 [Arabidopsis thaliana]
  misc_feature (1)..(594): Homolog of NCBI NO: 7443855 NR Description: probable chaperonin 60 beta chain precursor,
  misc_feature (1)..(595): Homolog of NCBI NO: 81601 NR Description: chaperonin 60 beta precursor - Arabidopsis
  misc_feature (1)..(594): Homolog of NCBI NO: 2506277 NR Description: RuBisCO subunit binding-protein beta subunit,
  misc_feature (1)..(581): Homolog of NCBI NO: 134104 NR Description: RuBisCO subunit binding-protein beta subunit,
  misc_feature (1)..(594): Homolog of NCBI NO: 34897924 NR Description: ESTs C99033(E4350),C99032(E4350),D46006(S10372), correspond to a region of the predicted gene.~Similar to thaliana chromosome I BAC T5A14 genomic sequence; 60 KD
  misc_feature (98)..(594): Homolog of NCBI NO: 2493650 NR Description: RUBISCO SUBUNIT BINDING-PROTEIN BETA SUBUNIT (60
  misc_feature (51)..(589): Homolog of NCBI NO: 15222666 NR Description: chaperonin precursor, putative; protein id: [Arabidopsis thaliana] >gi|25300350|pir||E86388 probable
MASTFSATSSMGSSLAPPSNRLSSFVSISSSSFGRTQSIAQRKARFPKIYAAKQLHFNKDGTAIKKLQAGVNKLADLVGVTLGPKGRNVVLESKYGSPRIVNDGVTVAREVELEDPVENIGAKLVRQAASKTNDLAGDGTTTSVVLAQGLIAEGVKVVAAGANPVLITRGIEKTTKALVAELKKMSKEVEDSELADVAAVSAGNNYEVGNMIAEAMAKVGRKGVVTLEEGKSAENSLYVVEGMQFDRGYISPYFVTDSEKMCAEYENCKLFLVDKKITNARDIISILEDAIKGGYPLLIIAEDIEQEPLATLVVNKLRGTIKVAALKAPGFGERKSQYLDDIAALTGATVIREEVGLQLEKVGPEVLGNAGKVVLTKDTTTIVGDGSTEEVVKKRVEQIKNLIEAAEQDYEKEKLNERIAKLSGGVAVIQVGAQTETELKEKKLRVEDALNATKAAVEEGIVVGGGCTLLRLASKVDAIKETLANDEEKVGADIVKKALSYPLKLIAKNAGVNGSVVSEKVLSSDNPKHGYNAATGKYEDLMAAGIIDPTKVVRCCLEHASSVAKTFLMSDCVVVEIKEPESAAPAGNPMDNSGIS

SEQ ID NO: 90984 - protein, 586 aa, Arabidopsis thaliana
  peptide (1)..(586): Ceres Seq. ID no. 12725977
  misc_feature (64)..(568): Pfam Name: TCP-1/cpn60 chaperonin family Pfam Description: TCP-1/cpn60 chaperonin family
  misc_feature (1)..(584): Homolog of NCBI NO: 30696748 NR Description: chaperonin, putative [Arabidopsis thaliana]
  misc_feature (1)..(584): Homolog of NCBI NO: 15231255 NR Description: chaperonin 60 beta, putative; protein id: [Arabidopsis thaliana] >gi|9280299|dbj|BAB01754.1| GloEL protein;
  misc_feature (1)..(584): Homolog of NCBI NO: 15222729 NR Description: Rubisco subunit binding-protein beta subunit; id: At1g55490.1, supported by cDNA: gi_14423415, supported by gi_20148344 [Arabidopsis thaliana]
  misc_feature (1)..(584): Homolog of NCBI NO: 7443855 NR Description: probable chaperonin 60 beta chain precursor,
  misc_feature (1)..(585): Homolog of NCBI NO: 81601 NR Description: chaperonin 60 beta precursor - Arabidopsis
  misc_feature (1)..(584): Homolog of NCBI NO: 2506277 NR Description: RuBisCO subunit binding-protein beta subunit,
  misc_feature (1)..(571): Homolog of NCBI NO: 134104 NR Description: RuBisCO subunit binding-protein beta subunit,
  misc_feature (1)..(584): Homolog of NCBI NO: 34897924 NR Description: ESTs C99033(E4350),C99032(E4350),D46006(S10372), correspond to a region of the predicted gene.~Similar to thaliana chromosome I BAC T5A14 genomic sequence; 60 KD
  misc_feature (88)..(584): Homolog of NCBI NO: 2493650 NR Description: RUBISCO SUBUNIT BINDING-PROTEIN BETA SUBUNIT (60
  misc_feature (41)..(579): Homolog of NCBI NO: 15222666 NR Description: chaperonin precursor, putative; protein id: [Arabidopsis thaliana] >gi|25300350|pir||E86388 probable
MGSSLAPPSNRLSSFVSISSSSFGRTQSIAQRKARFPKIYAAKQLHFNKDGTAIKKLQAGVNKLADLVGVTLGPKGRNVVLESKYGSPRIVNDGVTVAREVELEDPVENIGAKLVRQAASKTNDLAGDGTTTSVVLAQGLIAEGVKVVAAGANPVLITRGIEKTTKALVAELKKMSKEVEDSELADVAAVSAGNNYEVGNMIAEAMAKVGRKGVVTLEEGKSAENSLYVVEGMQFDRGYISPYFVTDSEKMCAEYENCKLFLVDKKITNARDIISILEDAIKGGYPLLIIAEDIEQEPLATLVVNKLRGTIKVAALKAPGFGERKSQYLDDIAALTGATVIREEVGLQLEKVGPEVLGNAGKVVLTKDTTTIVGDGSTEEVVKKRVEQIKNLIEAAEQDYEKEKLNERIAKLSGGVAVIQVGAQTETELKEKKLRVEDALNATKAAVEEGIVVGGGCTLLRLASKVDAIKETLANDEEKVGADIVKKALSYPLKLIAKNAGVNGSVVSEKVLSSDNPKHGYNAATGKYEDLMAAGIIDPTKVVRCCLEHASSVAKTFLMSDCVVVEIKEPESAAPAGNPMDNSGIS

SEQ ID NO: 90985 - protein, 412 aa, Arabidopsis thaliana
  peptide (1)..(412): Ceres Seq. ID no. 12725978
  misc_feature (1)..(394): Pfam Name: TCP-1/cpn60 chaperonin family Pfam Description: TCP-1/cpn60 chaperonin family
  misc_feature (1)..(410): Homolog of NCBI NO: 30696748 NR Description: chaperonin, putative [Arabidopsis thaliana]
  misc_feature (1)..(410): Homolog of NCBI NO: 15231255 NR Description: chaperonin 60 beta, putative; protein id: [Arabidopsis thaliana] >gi|9280299|dbj|BAB01754.1| GloEL protein;
  misc_feature (1)..(410): Homolog of NCBI NO: 15222729 NR Description: Rubisco subunit binding-protein beta subunit; id: At1g55490.1, supported by cDNA: gi_14423415, supported by gi_20148344 [Arabidopsis thaliana]
  misc_feature (1)..(410): Homolog of NCBI NO: 7443855 NR Description: probable chaperonin 60 beta chain precursor,
  misc_feature (1)..(411): Homolog of NCBI NO: 81601 NR Description: chaperonin 60 beta precursor - Arabidopsis
  misc_feature (1)..(410): Homolog of NCBI NO: 2506277 NR Description: RuBisCO subunit binding-protein beta subunit,
  misc_feature (1)..(397): Homolog of NCBI NO: 134104 NR Description: RuBisCO subunit binding-protein beta subunit,
  misc_feature (1)..(410): Homolog of NCBI NO: 34897924 NR Description: ESTs C99033(E4350),C99032(E4350),D46006(S10372), correspond to a region of the predicted gene.~Similar to thaliana chromosome I BAC T5A14 genomic sequence; 60 KD
  misc_feature (1)..(410): Homolog of NCBI NO: 2493650 NR Description: RUBISCO SUBUNIT BINDING-PROTEIN BETA SUBUNIT (60
  misc_feature (1)..(405): Homolog of NCBI NO: 15222666 NR Description: chaperonin precursor, putative; protein id: [Arabidopsis thaliana] >gi|25300350|pir||E86388 probable
MSKEVEDSELADVAAVSAGNNYEVGNMIAEAMAKVGRKGVVTLEEGKSAENSLYVVEGMQFDRGYISPYFVTDSEKMCAEYENCKLFLVDKKITNARDIISILEDAIKGGYPLLIIAEDIEQEPLATLVVNKLRGTIKVAALKAPGFGERKSQYLDDIAALTGATVIREEVGLQLEKVGPEVLGNAGKVVLTKDTTTIVGDGSTEEVVKKRVEQIKNLIEAAEQDYEKEKLNERIAKLSGGVAVIQVGAQTETELKEKKLRVEDALNATKAAVEEGIVVGGGCTLLRLASKVDAIKETLANDEEKVGADIVKKALSYPLKLIAKNAGVNGSVVSEKVLSSDNPKHGYNAATGKYEDLMAAGIIDPTKVVRCCLEHASSVAKTFLMSDCVVVEIKEPESAAPAGNPMDNSGIS

SEQ ID NO: 90986 - DNA, 1632 bp, Arabidopsis thaliana
  misc_feature (1)..(1632): Ceres Seq. ID no. 12725998
  misc_feature: MA Experiment ID: 20000185 Result: Up-regulated in Transcription
  misc_feature: MA Experiment 20000185 PARAMETER Experiment Name: At_Roots__P Parameter: Age (day) Value: 7 vs. 21
  misc_feature: MA Experiment 20000185 PARAMETER Experiment Name: At_Roots__P Parameter: Organism Value: A. thaliana
  misc_feature: MA Experiment 20000185 PARAMETER Experiment Name: At_Roots__P Parameter: Tissue Value: Roots vs. Whole Plant
  misc_feature: MA Experiment ID: 20000439 Result: Up-regulated in Transcription
  misc_feature: MA Experiment 20000439 PARAMETER Experiment Name: At_Roots__P Parameter: Age (day) Value: 14 vs. 21
  misc_feature: MA Experiment 20000439 PARAMETER Experiment Name: At_Roots__P Parameter: Organism Value: A. thaliana
  misc_feature: MA Experiment 20000439 PARAMETER Experiment Name: At_Roots__P Parameter: Tissue Value: Roots vs. Whole Plant
  misc_feature: MA Experiment ID: 20001558 Result: Down-regulated in Transcription
  misc_feature: MA Experiment 20001558 PARAMETER Experiment Name: At_Drought_Soil_Dry_P Parameter: Age (day) Value: 27
  misc_feature: MA Experiment 20001558 PARAMETER Experiment Name: At_Drought_Soil_Dry_P Parameter: Organism Value: A. thaliana
  misc_feature: MA Experiment 20001558 PARAMETER Experiment Name: At_Drought_Soil_Dry_P Parameter: Plant Line Value: WS
  misc_feature: MA Experiment 20001558 PARAMETER Experiment Name: At_Drought_Soil_Dry_P Parameter: Post Timepoint (hr) Value: 6
  misc_feature: MA Experiment 20001558 PARAMETER Experiment Name: At_Drought_Soil_Dry_P Parameter: Post-Treatment Value: Re-Water vs. No Drought
  misc_feature: MA Experiment 20001558 PARAMETER Experiment Name: At_Drought_Soil_Dry_P Parameter: Timepoint (day) Value: 13
  misc_feature: MA Experiment 20001558 PARAMETER Experiment Name: At_Drought_Soil_Dry_P Parameter: Treatment Value: Drought vs. No Drought
  misc_feature: MA Experiment ID: 20001560 Result: Down-regulated in Transcription
  misc_feature: MA Experiment 20001560 PARAMETER Experiment Name: At_Drought_Soil_Dry_P Parameter: Age (day) Value: 28
  misc_feature: MA Experiment 20001560 PARAMETER Experiment Name: At_Drought_Soil_Dry_P Parameter: Organism Value: A. thaliana
  misc_feature: MA Experiment 20001560 PARAMETER Experiment Name: At_Drought_Soil_Dry_P Parameter: Plant Line Value: WS
  misc_feature: MA Experiment 20001560 PARAMETER Experiment Name: At_Drought_Soil_Dry_P Parameter: Post Timepoint (hr) Value: None
  misc_feature: MA Experiment 20001560 PARAMETER Experiment Name: At_Drought_Soil_Dry_P Parameter: Post-Treatment Value: None
  misc_feature: MA Experiment 20001560 PARAMETER Experiment Name: At_Drought_Soil_Dry_P Parameter: Timepoint (day) Value: 14
  misc_feature: MA Experiment 20001560 PARAMETER Experiment Name: At_Drought_Soil_Dry_P Parameter: Treatment Value: Drought vs. No Drought
  misc_feature: MA Experiment ID: 20001905 Result: Down-regulated in Transcription
  misc_feature: MA Experiment 20001905 PARAMETER Experiment Name: At_Drought_Reproduction_P Parameter: Age (day) Value: 40
  misc_feature: MA Experiment 20001905 PARAMETER Experiment Name: At_Drought_Reproduction_P Parameter: Organism Value: A. thaliana
  misc_feature: MA Experiment 20001905 PARAMETER Experiment Name: At_Drought_Reproduction_P Parameter: Plant Line Value: WS
  misc_feature: MA Experiment 20001905 PARAMETER Experiment Name: At_Drought_Reproduction_P Parameter: Timepoint (day) Value: 10
  misc_feature: MA Experiment 20001905 PARAMETER Experiment Name: At_Drought_Reproduction_P Parameter: Tissue Value: Rosettes
  misc_feature: MA Experiment 20001905 PARAMETER Experiment Name: At_Drought_Reproduction_P Parameter: Treatment Value: Drought vs. No Drought
atcttcctccatggctctaaacaagctcctcagtttgactttccaactactcctttttctacttagtgtttcatcggaatctccatggatcgccgaagatacgtctcaaatccagacgaagctcctcgaattcgcgaagagtccggaggtcttcgattggatggtgaaaatcagaaggaaaatccacgagaatccggagcttggttacgaagaactcgagaccagtaaactcattaggtcggagctggaacttatcggaatcaagtataggtatcctgtagctatcaccggtgttatcggatatatcggcaccggagaaccgccattcgtcgccctgagagctgatatggatgctttgcctattcaggaaggtgttgagtgggagcacaagagcaaaatcgctggtaaaatgcatgcttgcggacatgatggtcatgttactatgcttcttggggctgcaaagatacttcatgaacatcgccaccatttgcagggaactgtggtgcttatctttcaaccagctgaggaaggtttgagtggagcaaagaagatgagagaagaaggagcgttgaagaacgtcgaagctattttcgggatacatctttctgcccggattccctttgggaaagccgcttcacgtgcaggttcatttttggctggagctggagtcttcgaggctgtaatcactgggaaaggaggtcatgctgccatccctcagcatactatagatcctgttgttgcagcctcaagcatcgtcctcagtcttcaacaattggtttcacgtgaaactgaccctttggattcaaaggtggtcacagtttctaaggttaatggaggcaatgcttttaatgtcatccctgattcaatcaccataggaggaactcttcgagcctttaccggatttactcagcttcaacagagagtcaaagaggtgattaccaagcaagcagccgttcaccgatgcaatgcgtccgttaatctaacaccaaacggtagagaaccaatgccaccaacagtgaacaacaaggacttgtacaagcaattcaagaaggtggttagagatttgttgggtcaagaagcttttgtggaagcagcacctgtaatgggatccgaagacttctcatactttgcagaaacaatcccgggccatttctctctactgggaatgcaagatgagaccaacgggtatgcatcgtctcattcaccactctatagaatcaacgaggatgtgcttccgtacggtgctgcaatccatgcatcgatggcagtacagtacctcaaagagaaggcttctaaaggttctgtctcaggctttcatgaagaactctaaaccttggttgtagacaggttgttcatcggttattggttcagattcagaagcacaaacctaacactccattgaattaatcaagtgttatcgtacaagatccttgcaagtgttatagaatgatgaaaatgtatttaatagctaattttcaattggcaaattatcaacttttaatagtctgtgtaaaagtattgacagaaacttagaacacgaattatgatcattggtcttgttgtaatgtattggcaaaaatcatatcttatgtttaattgaccaaaatcataagtgaaaaaacagtatttcat

SEQ ID NO: 90987 - protein, 442 aa, Arabidopsis thaliana
  peptide (1)..(442): Ceres Seq. ID no. 12725999
  misc_feature (51)..(425): Pfam Name: Peptidase family M20/M25/M40 Pfam Description: Peptidase family M20/M25/M40
  misc_feature (4)..(442): Homolog of NCBI NO: 15241894 NR Description: IAA-amino acid hydrolase (gb|AAC04866.1); protein At5g56660.1, supported by cDNA: gi_18175666, supported by cDNA:
  misc_feature (4)..(442): Homolog of NCBI NO: 18175667 NR Description: IAA-amino acid hydrolase [Arabidopsis thaliana]
  misc_feature (4)..(442): Homolog of NCBI NO: 902791 NR Description: ILL2
  misc_feature (4)..(442): Homolog of NCBI NO: 15241892 NR Description: IAA-amino acid hydrolase homolog 1 precursor protein id: At5g56650.1, supported by cDNA: gi_902788
  misc_feature (12)..(442): Homolog of NCBI NO: 15218027 NR Description: IAA-Ala hydrolase (IAR3); protein id:
  misc_feature (12)..(442): Homolog of NCBI NO: 2181184 NR Description: JR3 protein [Arabidopsis thaliana]
  misc_feature (4)..(431): Homolog of NCBI NO: 15218029 NR Description: auxin conjugate hydrolase (ILL5); protein id: [Arabidopsis thaliana] >gi|25319490|pir||H96556 auxin conjugate
  misc_feature (41)..(442): Homolog of NCBI NO: 34914096 NR Description: putative IAA-Ala hydrolase [Oryza sativa
  misc_feature (41)..(442): Homolog of NCBI NO: 27948556 NR Description: IAA-amino acid hydrolase [Oryza sativa (indica
  misc_feature (41)..(442): Homolog of NCBI NO: 34910396 NR Description: putative IAA-Ala hydrolase [Oryza sativa
SSSMALNKLLSLTFQLLLFLLSVSSESPWIAEDTSQIQTKLLEFAKSPEVFDWMVKIRRKIHENPELGYEELETSKLIRSELELIGIKYRYPVAITGVIGYIGTGEPPFVALRADMDALPIQEGVEWEHKSKIAGKMHACGHDGHVTMLLGAAKILHEHRHHLQGTVVLIFQPAEEGLSGAKKMREEGALKNVEAIFGIHLSARIPFGKAASRAGSFLAGAGVFEAVITGKGGHAAIPQHTIDPVVAASSIVLSLQQLVSRETDPLDSKVVTVSKVNGGNAFNVIPDSITIGGTLRAFTGFTQLQQRVKEVITKQAAVHRCNASVNLTPNGREPMPPTVNNKDLYKQFKKVVRDLLGQEAFVEAAPVMGSEDFSYFAETIPGHFSLLGMQDETNGYASSHSPLYRINEDVLPYGAAIHASMAVQYLKEKASKGSVSGFHEEL

SEQ ID NO: 90988 - protein, 439 aa, Arabidopsis thaliana
  peptide (1)..(439): Ceres Seq. ID no. 12726000
  misc_feature (48)..(422): Pfam Name: Peptidase family M20/M25/M40 Pfam Description: Peptidase family M20/M25/M40
  misc_feature (1)..(439): Homolog of NCBI NO: 15241894 NR Description: IAA-amino acid hydrolase (gb|AAC04866.1); protein At5g56660.1, supported by cDNA: gi_18175666, supported by cDNA:
  misc_feature (1)..(439): Homolog of NCBI NO: 18175667 NR Description: IAA-amino acid hydrolase [Arabidopsis thaliana]
  misc_feature (1)..(439): Homolog of NCBI NO: 902791 NR Description: ILL2
  misc_feature (1)..(439): Homolog of NCBI NO: 15241892 NR Description: IAA-amino acid hydrolase homolog 1 precursor protein id: At5g56650.1, supported by cDNA: gi_902788
  misc_feature (9)..(439): Homolog of NCBI NO: 15218027 NR Description: IAA-Ala hydrolase (IAR3); protein id:
  misc_feature (9)..(439): Homolog of NCBI NO: 2181184 NR Description: JR3 protein [Arabidopsis thaliana]
  misc_feature (1)..(428): Homolog of NCBI NO: 15218029 NR Description: auxin conjugate hydrolase (ILL5); protein id: [Arabidopsis thaliana] >gi|25319490|pir||H96556 auxin conjugate
  misc_feature (38)..(439): Homolog of NCBI NO: 34914096 NR Description: putative IAA-Ala hydrolase [Oryza sativa
  misc_feature (38)..(439): Homolog of NCBI NO: 27948556 NR Description: IAA-amino acid hydrolase [Oryza sativa (indica
  misc_feature (38)..(439): Homolog of NCBI NO: 34910396 NR Description: putative IAA-Ala hydrolase [Oryza sativa
MALNKLLSLTFQLLLFLLSVSSESPWIAEDTSQIQTKLLEFAKSPEVFDWMVKIRRKIHENPELGYEELETSKLIRSELELIGIKYRYPVAITGVIGYIGTGEPPFVALRADMDALPIQEGVEWEHKSKIAGKMHACGHDGHVTMLLGAAKILHEHRHHLQGTVVLIFQPAEEGLSGAKKMREEGALKNVEAIFGIHLSARIPFGKAASRAGSFLAGAGVFEAVITGKGGHAAIPQHTIDPVVAASSIVLSLQQLVSRETDPLDSKVVTVSKVNGGNAFNVIPDSITIGGTLRAFTGFTQLQQRVKEVITKQAAVHRCNASVNLTPNGREPMPPTVNNKDLYKQFKKVVRDLLGQEAFVEAAPVMGSEDFSYFAETIPGHFSLLGMQDETNGYASSHSPLYRINEDVLPYGAAIHASMAVQYLKEKASKGSVSGFHEEL

SEQ ID NO: 90989 - protein, 389 aa, Arabidopsis thaliana
  peptide (1)..(389): Ceres Seq. ID no. 12726001
  misc_feature (1)..(372): Pfam Name: Peptidase family M20/M25/M40 Pfam Description: Peptidase family M20/M25/M40
  misc_feature (1)..(389): Homolog of NCBI NO: 15241894 NR Description: IAA-amino acid hydrolase (gb|AAC04866.1); protein At5g56660.1, supported by cDNA: gi_18175666, supported by cDNA:
  misc_feature (1)..(389): Homolog of NCBI NO: 18175667 NR Description: IAA-amino acid hydrolase [Arabidopsis thaliana]
  misc_feature (1)..(389): Homolog of NCBI NO: 902791 NR Description: ILL2
  misc_feature (1)..(389): Homolog of NCBI NO: 15241892 NR Description: IAA-amino acid hydrolase homolog 1 precursor protein id: At5g56650.1, supported by cDNA: gi_902788
  misc_feature (1)..(389): Homolog of NCBI NO: 15218027 NR Description: IAA-Ala hydrolase (IAR3); protein id:
  misc_feature (1)..(389): Homolog of NCBI NO: 2181184 NR Description: JR3 protein [Arabidopsis thaliana]
  misc_feature (1)..(378): Homolog of NCBI NO: 15218029 NR Description: auxin conjugate hydrolase (ILL5); protein id: [Arabidopsis thaliana] >gi|25319490|pir||H96556 auxin conjugate
  misc_feature (1)..(389): Homolog of NCBI NO: 34914096 NR Description: putative IAA-Ala hydrolase [Oryza sativa
  misc_feature (1)..(389): Homolog of NCBI NO: 27948556 NR Description: IAA-amino acid hydrolase [Oryza sativa (indica
  misc_feature (1)..(389): Homolog of NCBI NO: 34910396 NR Description: putative IAA-Ala hydrolase [Oryza sativa
MVKIRRKIHENPELGYEELETSKLIRSELELIGIKYRYPVAITGVIGYIGTGEPPFVALRADMDALPIQEGVEWEHKSKIAGKMHACGHDGHVTMLLGAAKILHEHRHHLQGTVVLIFQPAEEGLSGAKKMREEGALKNVEAIFGIHLSARIPFGKAASRAGSFLAGAGVFEAVITGKGGHAAIPQHTIDPVVAASSIVLSLQQLVSRETDPLDSKVVTVSKVNGGNAFNVIPDSITIGGTLRAFTGFTQLQQRVKEVITKQAAVHRCNASVNLTPNGREPMPPTVNNKDLYKQFKKVVRDLLGQEAFVEAAPVMGSEDFSYFAETIPGHFSLLGMQDETNGYASSHSPLYRINEDVLPYGAAIHASMAVQYLKEKASKGSVSGFHEEL

SEQ ID NO: 90990 - DNA, 1949 bp, Arabidopsis thaliana
  misc_feature (1)..(1949): Ceres Seq. ID no. 12726002
  misc_feature: MA Experiment ID: 20000307 Result: Down-regulated in Transcription
  misc_feature: MA Experiment 20000307 PARAMETER Experiment Name: At_Germinating_Seeds_Sub_P Parameter: Age (hr) Value: 24 vs. 0
  misc_feature: MA Experiment 20000307 PARAMETER Experiment Name: At_Germinating_Seeds_Sub_P Parameter: Organism Value: A. thaliana
  misc_feature: MA Experiment 20000307 PARAMETER Experiment Name: At_Germinating_Seeds_Sub_P Parameter: Plant Line Value: WS
  misc_feature: MA Experiment 20000307 PARAMETER Experiment Name: At_Germinating_Seeds_Sub_P Parameter: Tissue Value: Germinating Seeds
aatacgcagccaaatacactctctctgaaacctctcctcttttagggtttaatatcaacgcctccaaaatttccgtgcttttgttttcgtagataacgaacaatggctgatgagattgtgccgccggcgactcaattagccgccgtatccttagaaaacgatggatctacggtgcaaagagctcaattctctaaccgggttttgattcgaacgattttggatcgacctgacggcggagctggactcgccggtcaaacggttcgaatcggtggttgggtaaaatccggaagagatcaagggaaaagaacgttttctttccttgcggttaacgatggatcttgtccagcgaatcttcaggttatggtggatccgtctctctatgatgtctctaacttggttgctacgggaacttgtgtgactgttgatggagttttgaaggttccaccgaaaggtaaaggtacgcagcagcagattgagcttaacgttgtgaaggtgattgatgttggaacggtggatgcgtctaagtatccacttcctaagactaagttgactcttgagactttgagagatgtgcttcatcttcgttctagaactaactcgatctcagctgttgcaagaattcgtaatgctcttgcttttgcgactcacagtttctttcaagagcatagtttcctttacattcacactcctatcatcacgacaagtgattgtgaaggtgctggtgaaatgttccaagcaacaactttgatcaattacactgagaggttggagcaggatctcattgataaccctccgcctactgaggctgatgttgaagctgcgaggctcattgtcattgagagaggtaatgttgtagcggaactgaaagctgccaaagcaagcaaggaagcgatcactgctgctgttgctgaacttaaaatagcaaaggagacttttgctcatattgatgagaggtcgaggcttagacctggactacctaagaaagatggaaacattgattattccaaggatttctttggtcgtcaagctttcttgacagtttccggtcaattacaagtggagacctatgcttgtgctcttagcaatgtgtatacatttggcccgactttccgggcagagaactctcacacttcaaggcatcttgctgaattctggatggttgagcctgagattgcttttgcagatctagaggacgacatgaactgtgcagaggcgtatgtgaaatacatgtgcaactggttgcttgagaaatgttacgctgacatggaacttatggctaagaatttcgactcaggatgcattgacaggctaaaattggttgcctctactccgtttgggcgtataacatacactaaagcaatagagctacttgaggaagctgtggctaaaggaaaggaatttgataacaatgtggagtggggaatcgacttagcctcggagcatgaaagatacttgacagaggttctgtttcaaaagccacttattgtctataactacccgaaaggaatcaaagctttttacatgagacttaacgatgatgagaagacagttgctgccatggatgtcctcgttccaaaggttggagaactcattggtggaagccaaagggaagaacgatatgatgtcatcaaaaagaggattgaggagatgggtcttccaatagagccatatgagtggtacctagacttgcgccgttatggaacagtgaagcattgtgggtttggacttggcttcgaacgtatgattctcttcgctactggacttgataacatcagagacgttattcctttccctcgctatcctggaaaagctgatctttgattcctcttctttacaccatttacatacacaatttcgcttttattagctggtctggtttccataaccgacttggtttagtttactttttaagttggttaaaggaaaattgtattgacttttgatttttt

SEQ ID NO: 90991 - protein, 572 aa, Arabidopsis thaliana
  peptide (1)..(572): Ceres Seq. ID no. 12726003
  misc_feature (303)..(568): Pfam Name: tRNA synthetases class II (D, K and N) Pfam Description: tRNA synthetases class II (D, K and N)
  misc_feature (1)..(572): Homolog of NCBI NO: 15241897 NR Description: SYNC1 protein (gb|AAD46681.1); protein id:
  misc_feature (1)..(572): Homolog of NCBI NO: 15223302 NR Description: asparaginyl-tRNA synthetase(SYNC1) protein id: At1g70980.1 [Arabidopsis thaliana]
  misc_feature (1)..(572): Homolog of NCBI NO: 34914792 NR Description: putative asparaginyl-tRNA synthetase [Oryza
  misc_feature (291)..(571): Homolog of NCBI NO: 2664210 NR Description: asparaginyl-tRNA synthetase [Arabidopsis thaliana]
  misc_feature (291)..(571): Homolog of NCBI NO: 20139977 NR Description: Asparaginyl-tRNA synthetase,
  misc_feature (21)..(234): Homolog of NCBI NO: 2664210 NR Description: asparaginyl-tRNA synthetase [Arabidopsis thaliana]
  misc_feature (21)..(234): Homolog of NCBI NO: 20139977 NR Description: Asparaginyl-tRNA synthetase,
  misc_feature (291)..(571): Homolog of NCBI NO: 15236037 NR Description: asparagine--tRNA ligase; protein id: At4g17300.1, by cDNA: gi_19310457 [Arabidopsis thaliana]
  misc_feature (21)..(234): Homolog of NCBI NO: 15236037 NR Description: asparagine--tRNA ligase; protein id: At4g17300.1, by cDNA: gi_19310457 [Arabidopsis thaliana]
  misc_feature (291)..(571): Homolog of NCBI NO: 16332045 NR Description: asparaginyl-tRNA synthetase [Synechocystis sp.
MADEIVPPATQLAAVSLENDGSTVQRAQFSNRVLIRTILDRPDGGAGLAGQTVRIGGWVKSGRDQGKRTFSFLAVNDGSCPANLQVMVDPSLYDVSNLVATGTCVTVDGVLKVPPKGKGTQQQIELNVVKVIDVGTVDASKYPLPKTKLTLETLRDVLHLRSRTNSISAVARIRNALAFATHSFFQEHSFLYIHTPIITTSDCEGAGEMFQATTLINYTERLEQDLIDNPPPTEADVEAARLIVIERGNVVAELKAAKASKEAITAAVAELKIAKETFAHIDERSRLRPGLPKKDGNIDYSKDFFGRQAFLTVSGQLQVETYACALSNVYTFGPTFRAENSHTSRHLAEFWMVEPEIAFADLEDDMNCAEAYVKYMCNWLLEKCYADMELMAKNFDSGCIDRLKLVASTPFGRITYTKAIELLEEAVAKGKEFDNNVEWGIDLASEHERYLTEVLFQKPLIVYNYPKGIKAFYMRLNDDEKTVAAMDVLVPKVGELIGGSQREERYDVIKKRIEEMGLPIEPYEWYLDLRRYGTVKHCGFGLGFERMILFATGLDNIRDVIPFPRYPGKADL

SEQ ID NO: 90992 - protein, 486 aa, Arabidopsis thaliana
  peptide (1)..(486): Ceres Seq. ID no. 12726004
  misc_feature (217)..(482): Pfam Name: tRNA synthetases class II (D, K and N) Pfam Description: tRNA synthetases class II (D, K and N)
  misc_feature (1)..(486): Homolog of NCBI NO: 15241897 NR Description: SYNC1 protein (gb|AAD46681.1); protein id:
  misc_feature (1)..(486): Homolog of NCBI NO: 15223302 NR Description: asparaginyl-tRNA synthetase(SYNC1) protein id: At1g70980.1 [Arabidopsis thaliana]
  misc_feature (1)..(486): Homolog of NCBI NO: 34914792 NR Description: putative asparaginyl-tRNA synthetase [Oryza
  misc_feature (205)..(485): Homolog of NCBI NO: 2664210 NR Description: asparaginyl-tRNA synthetase [Arabidopsis thaliana]
  misc_feature (205)..(485): Homolog of NCBI NO: 20139977 NR Description: Asparaginyl-tRNA synthetase,
  misc_feature (1)..(148): Homolog of NCBI NO: 2664210 NR Description: asparaginyl-tRNA synthetase [Arabidopsis thaliana]
  misc_feature (1)..(148): Homolog of NCBI NO: 20139977 NR Description: Asparaginyl-tRNA synthetase,
  misc_feature (205)..(485): Homolog of NCBI NO: 15236037 NR Description: asparagine--tRNA ligase; protein id: At4g17300.1, by cDNA: gi_19310457 [Arabidopsis thaliana]
  misc_feature (1)..(148): Homolog of NCBI NO: 15236037 NR Description: asparagine--tRNA ligase; protein id: At4g17300.1, by cDNA: gi_19310457 [Arabidopsis thaliana]
  misc_feature (205)..(485): Homolog of NCBI NO: 16332045 NR Description: asparaginyl-tRNA synthetase [Synechocystis sp.
MVDPSLYDVSNLVATGTCVTVDGVLKVPPKGKGTQQQIELNVVKVIDVGTVDASKYPLPKTKLTLETLRDVLHLRSRTNSISAVARIRNALAFATHSFFQEHSFLYIHTPIITTSDCEGAGEMFQATTLINYTERLEQDLIDNPPPTEADVEAARLIVIERGNVVAELKAAKASKEAITAAVAELKIAKETFAHIDERSRLRPGLPKKDGNIDYSKDFFGRQAFLTVSGQLQVETYACALSNVYTFGPTFRAENSHTSRHLAEFWMVEPEIAFADLEDDMNCAEAYVKYMCNWLLEKCYADMELMAKNFDSGCIDRLKLVASTPFGRITYTKAIELLEEAVAKGKEFDNNVEWGIDLASEHERYLTEVLFQKPLIVYNYPKGIKAFYMRLNDDEKTVAAMDVLVPKVGELIGGSQREERYDVIKKRIEEMGLPIEPYEWYLDLRRYGTVKHCGFGLGFERMILFATGLDNIRDVIPFPRYPGKADL

SEQ ID NO: 90993 - protein, 364 aa, Arabidopsis thaliana
  peptide (1)..(364): Ceres Seq. ID no. 12726005
  misc_feature (95)..(360): Pfam Name: tRNA synthetases class II (D, K and N) Pfam Description: tRNA synthetases class II (D, K and N)
  misc_feature (1)..(364): Homolog of NCBI NO: 15241897 NR Description: SYNC1 protein (gb|AAD46681.1); protein id:
  misc_feature (1)..(364): Homolog of NCBI NO: 15223302 NR Description: asparaginyl-tRNA synthetase(SYNC1) protein id: At1g70980.1 [Arabidopsis thaliana]
  misc_feature (1)..(364): Homolog of NCBI NO: 34914792 NR Description: putative asparaginyl-tRNA synthetase [Oryza
  misc_feature (83)..(363): Homolog of NCBI NO: 2664210 NR Description: asparaginyl-tRNA synthetase [Arabidopsis thaliana]
  misc_feature (83)..(363): Homolog of NCBI NO: 20139977 NR Description: Asparaginyl-tRNA synthetase,
  misc_feature (1)..(26): Homolog of NCBI NO: 2664210 NR Description: asparaginyl-tRNA synthetase [Arabidopsis thaliana]
  misc_feature (1)..(26): Homolog of NCBI NO: 20139977 NR Description: Asparaginyl-tRNA synthetase,
  misc_feature (83)..(363): Homolog of NCBI NO: 15236037 NR Description: asparagine--tRNA ligase; protein id: At4g17300.1, by cDNA: gi_19310457 [Arabidopsis thaliana]
  misc_feature (1)..(26): Homolog of NCBI NO: 15236037 NR Description: asparagine--tRNA ligase; protein id: At4g17300.1, by cDNA: gi_19310457 [Arabidopsis thaliana]
  misc_feature (83)..(363): Homolog of NCBI NO: 16332045 NR Description: asparaginyl-tRNA synthetase [Synechocystis sp.
MFQATTLINYTERLEQDLIDNPPPTEADVEAARLIVIERGNVVAELKAAKASKEAITAAVAELKIAKETFAHIDERSRLRPGLPKKDGNIDYSKDFFGRQAFLTVSGQLQVETYACALSNVYTFGPTFRAENSHTSRHLAEFWMVEPEIAFADLEDDMNCAEAYVKYMCNWLLEKCYADMELMAKNFDSGCIDRLKLVASTPFGRITYTKAIELLEEAVAKGKEFDNNVEWGIDLASEHERYLTEVLFQKPLIVYNYPKGIKAFYMRLNDDEKTVAAMDVLVPKVGELIGGSQREERYDVIKKRIEEMGLPIEPYEWYLDLRRYGTVKHCGFGLGFERMILFATGLDNIRDVIPFPRYPGKADL

SEQ ID NO: 90994 - DNA, 1020 bp, Arabidopsis thaliana
  misc_feature (1)..(1020): Ceres Seq. ID no. 12726013
  misc_feature: MA Experiment ID: 20000185 Result: Up-regulated in Transcription
  misc_feature: MA Experiment 20000185 PARAMETER Experiment Name: At_Roots__P Parameter: Age (day) Value: 7 vs. 21
  misc_feature: MA Experiment 20000185 PARAMETER Experiment Name: At_Roots__P Parameter: Organism Value: A. thaliana
  misc_feature: MA Experiment 20000185 PARAMETER Experiment Name: At_Roots__P Parameter: Tissue Value: Roots vs. Whole Plant
  misc_feature: MA Experiment ID: 20000439 Result: Up-regulated in Transcription
  misc_feature: MA Experiment 20000439 PARAMETER Experiment Name: At_Roots__P Parameter: Age (day) Value: 14 vs. 21
  misc_feature: MA Experiment 20000439 PARAMETER Experiment Name: At_Roots__P Parameter: Organism Value: A. thaliana
  misc_feature: MA Experiment 20000439 PARAMETER Experiment Name: At_Roots__P Parameter: Tissue Value: Roots vs. Whole Plant
  misc_feature: MA Experiment ID: 20000496 Result: Up-regulated in Transcription
  misc_feature: MA Experiment 20000496 PARAMETER Experiment Name: At_Guard_Cells_P Parameter: Harvest Date Value: 7/19/2002
  misc_feature: MA Experiment 20000496 PARAMETER Experiment Name: At_Guard_Cells_P Parameter: Organism Value: Canola
  misc_feature: MA Experiment 20000496 PARAMETER Experiment Name: At_Guard_Cells_P Parameter: Tissue Value: Guard Cells vs. Leaves
atgtgtaatttgttaaacattgagaaagatcctataagggttttgattaccggtgcagcaggaaacataggatatgcaattgctccaatgattgcaagaggtattatgctaggtccagatcaacccatgattctgcatttacttgatatagagccagcttcaagttcactagaagctgtgaaaatggagcttcaagattcagctttccctcttctcaaaggcgttatcgcgacaacaaatgttgttgaagcatgtaaagatgtgaatatcgtgataatgatcggcggattcccaaggatagcaggcatggaaagaaaagatgtgatgtcgaaaaatgttgtgatatataaagctcaagcttcggctttagagcgttatgcatcagatgattgcaaggttcttgttgtcgcaaaccctgcaaacactaatgctctgatcttaaaagagtttgcgccatcaatcccggaagaaaatatcacttgcctgacacgactcgaccataatcgagctctagctcagcttgcagataagctaagtgttcccgtgagcagtgtaaagaacgtgatcgtttggggtaaccattcttcaactcaatatcccgacaccaatcacgcaacagtctctacaaaaactggagacagaccgttaaaagaactagtcacagatcacaactggctgaagaacgagtttatcgtggaagttcagcaacgcggtgcagctgttttaagagcacggaaacagtcgagtgctttttccgctgctggtgcagcttgtgaccatatccgtgattggtttcttggaacccctaaaggaacttgggtttctatgggtgtttgttctgacggctcatatggtataccacctggtttggtttactcgtttccggttatctgtgagaaagggagttggaagatcgtacaaggactcagtatagacgagttttcgagggagaaaatggatgactctgcacgagagctagctgaagagaaggatttagcttattcctgtctcaatgtatag

SEQ ID NO: 90995 - protein, 339 aa, Arabidopsis thaliana
  peptide (1)..(339): Ceres Seq. ID no. 12726014
  misc_feature (163)..(337): Pfam Name: lactate/malate dehydrogenase, alpha/beta Pfam Description: lactate/malate dehydrogenase, alpha/beta
  misc_feature (1)..(339): Homolog of NCBI NO: 15241923 NR Description: cytosolic malate dehydrogenase; protein id: [Arabidopsis thaliana] >gi|10176776|dbj|BAB09890.1| cytosolic
  misc_feature (9)..(338): Homolog of NCBI NO: 10334493 NR Description: cytosolic malate dehydrogenase [Cicer arietinum]
  misc_feature (9)..(338): Homolog of NCBI NO: 11133373 NR Description: Malate dehydrogenase, cytoplasmic
  misc_feature (9)..(338): Homolog of NCBI NO: 37535388 NR Description: cytoplasmic malate dehydrogenase [Oryza sativa
  misc_feature (9)..(337): Homolog of NCBI NO: 18202485 NR Description: Malate dehydrogenase, cytoplasmic
  misc_feature (9)..(338): Homolog of NCBI NO: 27462764 NR Description: malate dehydrogenase [Lupinus albus]
  misc_feature (9)..(338): Homolog of NCBI NO: 15982948 NR Description: NAD-dependent malate dehydrogenase [Prunus
  misc_feature (9)..(337): Homolog of NCBI NO: 10798652 NR Description: malate dehydrogenase [Nicotiana tabacum]
  misc_feature (9)..(337): Homolog of NCBI NO: 27462762 NR Description: malate dehydrogenase [Lupinus albus]
  misc_feature (9)..(338): Homolog of NCBI NO: 39939491 NR Description: malate dehydrogenase [Pinus pinaster]
MCNLLNIEKDPIRVLITGAAGNIGYAIAPMIARGIMLGPDQPMILHLLDIEPASSSLEAVKMELQDSAFPLLKGVIATTNVVEACKDVNIVIMIGGFPRIAGMERKDVMSKNVVIYKAQASALERYASDDCKVLVVANPANTNALILKEFAPSIPEENITCLTRLDHNRALAQLADKLSVPVSSVKNVIVWGNHSSTQYPDTNHATVSTKTGDRPLKELVTDHNWLKNEFIVEVQQRGAAVLRARKQSSAFSAAGAACDHIRDWFLGTPKGTWVSMGVCSDGSYGIPPGLVYSFPVICEKGSWKIVQGLSIDEFSREKMDDSARELAEEKDLAYSCLNV

SEQ ID NO: 90996 - protein, 310 aa, Arabidopsis thaliana
  peptide (1)..(310): Ceres Seq. ID no. 12726015
  misc_feature (134)..(308): Pfam Name: lactate/malate dehydrogenase, alpha/beta Pfam Description: lactate/malate dehydrogenase, alpha/beta
  misc_feature (1)..(310): Homolog of NCBI NO: 15241923 NR Description: cytosolic malate dehydrogenase; protein id: [Arabidopsis thaliana] >gi|10176776|dbj|BAB09890.1| cytosolic
  misc_feature (1)..(309): Homolog of NCBI NO: 10334493 NR Description: cytosolic malate dehydrogenase [Cicer arietinum]
  misc_feature (1)..(309): Homolog of NCBI NO: 11133373 NR Description: Malate dehydrogenase, cytoplasmic
  misc_feature (1)..(309): Homolog of NCBI NO: 37535388 NR Description: cytoplasmic malate dehydrogenase [Oryza sativa
  misc_feature (1)..(308): Homolog of NCBI NO: 18202485 NR Description: Malate dehydrogenase, cytoplasmic
  misc_feature (1)..(309): Homolog of NCBI NO: 27462764 NR Description: malate dehydrogenase [Lupinus albus]
  misc_feature (1)..(309): Homolog of NCBI NO: 15982948 NR Description: NAD-dependent malate dehydrogenase [Prunus
  misc_feature (1)..(308): Homolog of NCBI NO: 10798652 NR Description: malate dehydrogenase [Nicotiana tabacum]
  misc_feature (1)..(308): Homolog of NCBI NO: 27462762 NR Description: malate dehydrogenase [Lupinus albus]
  misc_feature (1)..(309): Homolog of NCBI NO: 39939491 NR Description: malate dehydrogenase [Pinus pinaster]
MIARGIMLGPDQPMILHLLDIEPASSSLEAVKMELQDSAFPLLKGVIATTNVVEACKDVNIVIMIGGFPRIAGMERKDVMSKNVVIYKAQASALERYASDDCKVLVVANPANTNALILKEFAPSIPEENITCLTRLDHNRALAQLADKLSVPVSSVKNVIVWGNHSSTQYPDTNHATVSTKTGDRPLKELVTDHNWLKNEFIVEVQQRGAAVLRARKQSSAFSAAGAACDHIRDWFLGTPKGTWVSMGVCSDGSYGIPPGLVYSFPVICEKGSWKIVQGLSIDEFSREKMDDSARELAEEKDLAYSCLNV

SEQ ID NO: 90997 - protein, 304 aa, Arabidopsis thaliana
  peptide (1)..(304): Ceres Seq. ID no. 12726016
  misc_feature (128)..(302): Pfam Name: lactate/malate dehydrogenase, alpha/beta Pfam Description: lactate/malate dehydrogenase, alpha/beta
  misc_feature (1)..(304): Homolog of NCBI NO: 15241923 NR Description: cytosolic malate dehydrogenase; protein id: [Arabidopsis thaliana] >gi|10176776|dbj|BAB09890.1| cytosolic
  misc_feature (1)..(303): Homolog of NCBI NO: 10334493 NR Description: cytosolic malate dehydrogenase [Cicer arietinum]
  misc_feature (1)..(303): Homolog of NCBI NO: 11133373 NR Description: Malate dehydrogenase, cytoplasmic
  misc_feature (1)..(303): Homolog of NCBI NO: 37535388 NR Description: cytoplasmic malate dehydrogenase [Oryza sativa
  misc_feature (1)..(302): Homolog of NCBI NO: 18202485 NR Description: Malate dehydrogenase, cytoplasmic
  misc_feature (1)..(303): Homolog of NCBI NO: 27462764 NR Description: malate dehydrogenase [Lupinus albus]
  misc_feature (1)..(303): Homolog of NCBI NO: 15982948 NR Description: NAD-dependent malate dehydrogenase [Prunus
  misc_feature (1)..(302): Homolog of NCBI NO: 10798652 NR Description: malate dehydrogenase [Nicotiana tabacum]
  misc_feature (1)..(302): Homolog of NCBI NO: 27462762 NR Description: malate dehydrogenase [Lupinus albus]
  misc_feature (1)..(303): Homolog of NCBI NO: 39939491 NR Description: malate dehydrogenase [Pinus pinaster]
MLGPDQPMILHLLDIEPASSSLEAVKMELQDSAFPLLKGVIATTNVVEACKDVNIVIMIGGFPRIAGMERKDVMSKNVVIYKAQASALERYASDDCKVLVVANPANTNALILKEFAPSIPEENITCLTRLDHNRALAQLADKLSVPVSSVKNVIVWGNHSSTQYPDTNHATVSTKTGDRPLKELVTDHNWLKNEFIVEVQQRGAAVLRARKQSSAFSAAGAACDHIRDWFLGTPKGTWVSMGVCSDGSYGIPPGLVYSFPVICEKGSWKIVQGLSIDEFSREKMDDSARELAEEKDLAYSCLNV

SEQ ID NO: 90998 - DNA, 2818 bp, Arabidopsis thaliana
  misc_feature (1)..(2818): Ceres Seq. ID no. 12726025
  misc_feature: MA Experiment ID: 20000173 Result: Down-regulated in Transcription
  misc_feature: MA Experiment 20000173 PARAMETER Experiment Name: At_42deg_Heat_P Parameter: Age (day) Value: 14
  misc_feature: MA Experiment 20000173 PARAMETER Experiment Name: At_42deg_Heat_P Parameter: Organism Value: A. thaliana
  misc_feature: MA Experiment 20000173 PARAMETER Experiment Name: At_42deg_Heat_P Parameter: Plant Line Value: WS
  misc_feature: MA Experiment 20000173 PARAMETER Experiment Name: At_42deg_Heat_P Parameter: Temperature (deg C) Value: 42 vs. 22
  misc_feature: MA Experiment 20000173 PARAMETER Experiment Name: At_42deg_Heat_P Parameter: Timepoint (hr) Value: 6
  misc_feature: MA Experiment 20000173 PARAMETER Experiment Name: At_42deg_Heat_P Parameter: Tissue Value: Aerial
  misc_feature: MA Experiment ID: 20000265 Result: Up-regulated in Transcription
  misc_feature: MA Experiment 20000265 PARAMETER Experiment Name: At_Open_Flower_P Parameter: Age (day) Value: 21
  misc_feature: MA Experiment 20000265 PARAMETER Experiment Name: At_Open_Flower_P Parameter: Plant Line Value: WS
  misc_feature: MA Experiment 20000265 PARAMETER Experiment Name: At_Open_Flower_P Parameter: Tissue Value: Closed Flower vs. Whole Plant
  misc_feature: MA Experiment ID: 20000286 Result: Up-regulated in Transcription
  misc_feature: MA Experiment 20000286 PARAMETER Experiment Name: At_Open_Flower_P Parameter: Age (day) Value: 21
  misc_feature: MA Experiment 20000286 PARAMETER Experiment Name: At_Open_Flower_P Parameter: Plant Line Value: WS
  misc_feature: MA Experiment 20000286 PARAMETER Experiment Name: At_Open_Flower_P Parameter: Tissue Value: Half Open vs. Whole Plant
  misc_feature: MA Experiment ID: 20000794 Result: Up-regulated in Transcription
  misc_feature: MA Experiment 20000794 PARAMETER Experiment Name: At_Petals_P Parameter: Age (day) Value: 23-25 days
  misc_feature: MA Experiment 20000794 PARAMETER Experiment Name: At_Petals_P Parameter: Plant Line Value: WS
  misc_feature: MA Experiment 20000794 PARAMETER Experiment Name: At_Petals_P Parameter: Tissue Value: Petals vs. Whole plant
  misc_feature: MA Experiment ID: 20001451 Result: Down-regulated in Transcription
  misc_feature: MA Experiment 20001451 PARAMETER Experiment Name: At_Far-red-induction_P Parameter: Age (day) Value: 7
  misc_feature: MA Experiment 20001451 PARAMETER Experiment Name: At_Far-red-induction_P Parameter: Light Value: Far-red vs. White
  misc_feature: MA Experiment 20001451 PARAMETER Experiment Name: At_Far-red-induction_P Parameter: Organism Value: A. thaliana
  misc_feature: MA Experiment 20001451 PARAMETER Experiment Name: At_Far-red-induction_P Parameter: Plant Line Value: Columbia
  misc_feature: MA Experiment 20001451 PARAMETER Experiment Name: At_Far-red-induction_P Parameter: Timepoint (hr) Value: 24
  misc_feature: MA Experiment 20001451 PARAMETER Experiment Name: At_Far-red-induction_P Parameter: Tissue Value: Whole Plant
  misc_feature: MA Experiment ID: 20001757 Result: Down-regulated in Transcription
  misc_feature: MA Experiment 20001757 PARAMETER Experiment Name: At_50mM_NH4NO3_L-to-H_P Parameter: Timepoint (hr) Value: 6
  misc_feature: MA Experiment 20001757 PARAMETER Experiment Name: At_50mM_NH4NO3_L-to-H_P Parameter: Tissue Value: Leaf
  misc_feature: MA Experiment 20001757 PARAMETER Experiment Name: At_50mM_NH4NO3_L-to-H_P Parameter: Treatment Value: 50mM NH4NO3 vs 100mM Mannitol
agagctacaaatccaaaatacttcttatttgtcatctttctctgtttatattttaattgtttggatatttgcttttatcttctaccaaattcctctgattttgtcgaagaaattagtagctgaaaatccaaaaatcggacttacttcatcagctttttggccccactttacaaagtatgagcaagtttttcttgttttctacagcaaagcaatgctcacaccattttcgtggagcttaaagtcttcaaacccaaactaaaagctttgaaatttctctgcaagaaacagagagagagatctagggattggctattaagagagagagagtagagtactacactattggttcctgtgctgttgtgttttgtgcatctgttcttgtgtttctcagataaaatattagtttcagtctttcaaagacattgaatctcacacacttactaacacacactcacacacgcgttaatttctcaactttttttctatttatttcttttagcttctagggtcacttgagaaagcatcttggattgcgtgatacttccactttctcatttcagaagaaaaatgggtttagattgagtgaagtgttaaaagtatatgtaagcaagggttgaagaagaagttctttcaatttctgtatttgtgatttccttaatcttagctagagaatgaagcagaagggttttaaagagagaggtgttgtagtggggaagaaagtaatggttgctgttagagcttcaaaggagatcccaaaagcagctcttttatggactttaactcatgttgttcaacctggagatcgaattagacttcttgttgttgttccttctaattacacaagtaaaaagatttggggattttcgaggttcactagtgactgtgcatcaggttatggaagatttcttgctggaacgaattcggataggaaagatgatattcatgagtcatgttctcagatgatgtttcagttacacaatgtttatgatgcagagaagataaatgtcagaatcaaaattgtttttgcttcacttgatggagttattgctgctgaagctaagaaatccaactcaaactgggtgattttagacaggggactgaagtatgagaagaaatgctgtattgagcaattggagtgcaatcttgtagtaatcaagaagtcacagccaaaggttcttcgtctcaatttggtgaaaaatgcagatacagagcatccagaagctatatcaaggttagcttcaaagtctgtcgagtctcggagaagctcaagaactggaaaaaagttgagggaaccgtttgtgactccagctagcagtccagaccaagaagtttcttcacatactgatatagggacttcatcaatatctagctctgatgctggagcctcaccgtttttagcttctcgagtctttgagggtctcaagaaagagaatttgtgggtcaatgatggaagcaagagtttctttgaatccgattctgactcggatggtgaaaagtggagtcctttatcaatggcatcctcatcttctcatcctgtgacaacagctgatcttctgagtcctagtggggatttatcgaaagctcataccgaaactccgagaaaatcaagatttgcggttcttaggctcgctttatcgaggaaagaacctgaagcaggaaaggaaatacgtaaacctgattcatgcttaaacaaaagcgtgagggaagtggtttctttatctagaaagccagctcctggaccgcctccactatgtactatatgtcaacacaaggcacctaaatttggaaaccctccaagatggttcacttacagcgaactggagaccgcaacaaaaggtttttctaaagggagtttcttggctgaaggtggttttggttcggttcacctaggaactttaccagatggtcaaattattgctgtcaaacaatataaaattgctagtacacaaggagaccgagaattctgctctgaagttgaagtcttgagctgtgcacagcatcgaaatgttgttatgcttattgggctatgtgttgaggatgggaaaagattgcttgtttatgagtatatctgcaatggatcattgcattctcatctttatggtatggggagagagccattgggatggtcagcacgacaaaagattgcggtaggagcagctcgtgggttgagataccttcatgaagaatgcagagtcggttgcatcgtgcatagggatatgcgtcctaacaatattctcctcactcatgattttgagcctttggttggagatttcggactagcgagatggcaaccagaaggagataaaggagtggaaacccgagtgattggaactttcgggtacttggcacctgaatacgcacaaagcggacagattacagagaaagcagatgtttactcatttggggtagtcttagttgagcttatcacaggaagaaaagctatggacataaaacgtcctaaaggtcaacaatgtctcaccgaatgggcaagaccattgttgcagaaacaagccattaacgaacttcttgatccgcgtctaatgaattgctactgtgagcaagaagtttattgtatggcactatgtgcttacctctgcattcgccgtgaccctaactcaaggccacgaatgtctcaggtgttgcggatgttagaaggagacgttgtcatgaatccaatatagaagaagcttcacaaggaaaattcttcttagggagtttgtacactatttagggttactattacagctttttaaatgagttttgcttttgtatatgtaaaaatttgttaatgagacaaagattcaactaaagtttgttg

SEQ ID NO: 90999 - protein, 669 aa, Arabidopsis thaliana
  peptide (1)..(669): Ceres Seq. ID no. 12726026
  misc_feature (14)..(133): Pfam Name: Universal stress protein family Pfam Description: Universal stress protein family
  misc_feature (2)..(667): Homolog of NCBI NO: 34912394 NR Description: putative protein kinase APK1B, Serine/Threonine
  misc_feature (15)..(667): Homolog of NCBI NO: 15231330 NR Description: protein kinase, putative; protein id: At3g13690.1 thaliana] >gi|9294015|dbj|BAB01918.1| contains similarity to
  misc_feature (15)..(667): Homolog of NCBI NO: 22655010 NR Description: AT3g13690/MMM17_12 [Arabidopsis thaliana]
  misc_feature (2)..(669): Homolog of NCBI NO: 15222672 NR Description: protein kinase, putative; protein id: supported by cDNA: gi_17381013, supported by cDNA: gi_20465878
  misc_feature (130)..(662): Homolog of NCBI NO: 10880466 NR Description: dual-specific kinase DSK1 [Nicotiana tabacum]
  misc_feature (372)..(664): Homolog of NCBI NO: 15223161 NR Description: putative protein kinase; protein id: At1g70460.1
  misc_feature (378)..(669): Homolog of NCBI NO: 29367569 NR Description: putative receptor protein kinase [Oryza sativa
  misc_feature (373)..(661): Homolog of NCBI NO: 15240947 NR Description: putative protein; protein id: At5g38560.1, by cDNA: gi_15983496, supported by cDNA: gi_18700152 [Arabidopsis >gi|10176824|dbj|BAB10146.1| contains similarity to protein
  misc_feature (367)..(669): Homolog of NCBI NO: 30690042 NR Description: serine threonine protein kinase -related thaliana] >gi|26452004|dbj|BAC43092.1| putative serine/threonine kinase [Arabidopsis thaliana] >gi|29029022|gb|AAO64890.1|
  misc_feature (378)..(669): Homolog of NCBI NO: 13447449 NR Description: receptor protein kinase PERK1 [Brassica napus]
MKQKGFKERGVVVGKKVMVAVRASKEIPKAALLWTLTHVVQPGDRIRLLVVVPSNYTSKKIWGFSRFTSDCASGYGRFLAGTNSDRKDDIHESCSQMMFQLHNVYDAEKINVRIKIVFASLDGVIAAEAKKSNSNWVILDRGLKYEKKCCIEQLECNLVVIKKSQPKVLRLNLVKNADTEHPEAISRLASKSVESRRSSRTGKKLREPFVTPASSPDQEVSSHTDIGTSSISSSDAGASPFLASRVFEGLKKENLWVNDGSKSFFESDSDSDGEKWSPLSMASSSSHPVTTADLLSPSGDLSKAHTETPRKSRFAVLRLALSRKEPEAGKEIRKPDSCLNKSVREVVSLSRKPAPGPPPLCTICQHKAPKFGNPPRWFTYSELETATKGFSKGSFLAEGGFGSVHLGTLPDGQIIAVKQYKIASTQGDREFCSEVEVLSCAQHRNVVMLIGLCVEDGKRLLVYEYICNGSLHSHLYGMGREPLGWSARQKIAVGAARGLRYLHEECRVGCIVHRDMRPNNILLTHDFEPLVGDFGLARWQPEGDKGVETRVIGTFGYLAPEYAQSGQITEKADVYSFGVVLVELITGRKAMDIKRPKGQQCLTEWARPLLQKQAINELLDPRLMNCYCEQEVYCMALCAYLCIRRDPNSRPRMSQVLRMLEGDVVMNPI

SEQ ID NO: 91000 - protein, 652 aa, Arabidopsis thaliana
  peptide (1)..(652): Ceres Seq. ID no. 12726027
  misc_feature (1)..(116): Pfam Name: Universal stress protein family Pfam Description: Universal stress protein family
  misc_feature (1)..(650): Homolog of NCBI NO: 34912394 NR Description: putative protein kinase APK1B, Serine/Threonine
  misc_feature (1)..(650): Homolog of NCBI NO: 15231330 NR Description: protein kinase, putative; protein id: At3g13690.1 thaliana] >gi|9294015|dbj|BAB01918.1| contains similarity to
  misc_feature (1)..(650): Homolog of NCBI NO: 22655010 NR Description: AT3g13690/MMM17_12 [Arabidopsis thaliana]
  misc_feature (1)..(652): Homolog of NCBI NO: 15222672 NR Description: protein kinase, putative; protein id: supported by cDNA: gi_17381013, supported by cDNA: gi_20465878
  misc_feature (113)..(645): Homolog of NCBI NO: 10880466 NR Description: dual-specific kinase DSK1 [Nicotiana tabacum]
  misc_feature (355)..(647): Homolog of NCBI NO: 15223161 NR Description: putative protein kinase; protein id: At1g70460.1
  misc_feature (361)..(652): Homolog of NCBI NO: 29367569 NR Description: putative receptor protein kinase [Oryza sativa
  misc_feature (356)..(644): Homolog of NCBI NO: 15240947 NR Description: putative protein; protein id: At5g38560.1, by cDNA: gi_15983496, supported by cDNA: gi_18700152 [Arabidopsis >gi|10176824|dbj|BAB10146.1| contains similarity to protein
  misc_feature (350)..(652): Homolog of NCBI NO: 30690042 NR Description: serine threonine protein kinase -related thaliana] >gi|26452004|dbj|BAC43092.1| putative serine/threonine kinase [Arabidopsis thaliana] >gi|29029022|gb|AAO64890.1|
  misc_feature (361)..(652): Homolog of NCBI NO: 13447449 NR Description: receptor protein kinase PERK1 [Brassica napus]
MVAVRASKEIPKAALLWTLTHVVQPGDRIRLLVVVPSNYTSKKIWGFSRFTSDCASGYGRFLAGTNSDRKDDIHESCSQMMFQLHNVYDAEKINVRIKIVFASLDGVIAAEAKKSNSNWVILDRGLKYEKKCCIEQLECNLVVIKKSQPKVLRLNLVKNADTEHPEAISRLASKSVESRRSSRTGKKLREPFVTPASSPDQEVSSHTDIGTSSISSSDAGASPFLASRVFEGLKKENLWVNDGSKSFFESDSDSDGEKWSPLSMASSSSHPVTTADLLSPSGDLSKAHTETPRKSRFAVLRLALSRKEPEAGKEIRKPDSCLNKSVREVVSLSRKPAPGPPPLCTICQHKAPKFGNPPRWFTYSELETATKGFSKGSFLAEGGFGSVHLGTLPDGQIIAVKQYKIASTQGDREFCSEVEVLSCAQHRNVVMLIGLCVEDGKRLLVYEYICNGSLHSHLYGMGREPLGWSARQKIAVGAARGLRYLHEECRVGCIVHRDMRPNNILLTHDFEPLVGDFGLARWQPEGDKGVETRVIGTFGYLAPEYAQSGQITEKADVYSFGVVLVELITGRKAMDIKRPKGQQCLTEWARPLLQKQAINELLDPRLMNCYCEQEVYCMALCAYLCIRRDPNSRPRMSQVLRMLEGDVVMNPI

SEQ ID NO: 91001 - protein, 573 aa, Arabidopsis thaliana
  peptide (1)..(573): Ceres Seq. ID no. 12726028
  misc_feature (1)..(571): Homolog of NCBI NO: 34912394 NR Description: putative protein kinase APK1B, Serine/Threonine
  misc_feature (1)..(571): Homolog of NCBI NO: 15231330 NR Description: protein kinase, putative; protein id: At3g13690.1 thaliana] >gi|9294015|dbj|BAB01918.1| contains similarity to
  misc_feature (1)..(571): Homolog of NCBI NO: 22655010 NR Description: AT3g13690/MMM17_12 [Arabidopsis thaliana]
  misc_feature (1)..(573): Homolog of NCBI NO: 15222672 NR Description: protein kinase, putative; protein id: supported by cDNA: gi_17381013, supported by cDNA: gi_20465878
  misc_feature (34)..(566): Homolog of NCBI NO: 10880466 NR Description: dual-specific kinase DSK1 [Nicotiana tabacum]
  misc_feature (276)..(568): Homolog of NCBI NO: 15223161 NR Description: putative protein kinase; protein id: At1g70460.1
  misc_feature (282)..(573): Homolog of NCBI NO: 29367569 NR Description: putative receptor protein kinase [Oryza sativa
  misc_feature (277)..(565): Homolog of NCBI NO: 15240947 NR Description: putative protein; protein id: At5g38560.1, by cDNA: gi_15983496, supported by cDNA: gi_18700152 [Arabidopsis >gi|10176824|dbj|BAB10146.1| contains similarity to protein
  misc_feature (271)..(573): Homolog of NCBI NO: 30690042 NR Description: serine threonine protein kinase -related thaliana] >gi|26452004|dbj|BAC43092.1| putative serine/threonine kinase [Arabidopsis thaliana] >gi|29029022|gb|AAO64890.1|
  misc_feature (282)..(573): Homolog of NCBI NO: 13447449 NR Description: receptor protein kinase PERK1 [Brassica napus]
MMFQLHNVYDAEKINVRIKIVFASLDGVIAAEAKKSNSNWVILDRGLKYEKKCCIEQLECNLVVIKKSQPKVLRLNLVKNADTEHPEAISRLASKSVESRRSSRTGKKLREPFVTPASSPDQEVSSHTDIGTSSISSSDAGASPFLASRVFEGLKKENLWVNDGSKSFFESDSDSDGEKWSPLSMASSSSHPVTTADLLSPSGDLSKAHTETPRKSRFAVLRLALSRKEPEAGKEIRKPDSCLNKSVREVVSLSRKPAPGPPPLCTICQHKAPKFGNPPRWFTYSELETATKGFSKGSFLAEGGFGSVHLGTLPDGQIIAVKQYKIASTQGDREFCSEVEVLSCAQHRNVVMLIGLCVEDGKRLLVYEYICNGSLHSHLYGMGREPLGWSARQKIAVGAARGLRYLHEECRVGCIVHRDMRPNNILLTHDFEPLVGDFGLARWQPEGDKGVETRVIGTFGYLAPEYAQSGQITEKADVYSFGVVLVELITGRKAMDIKRPKGQQCLTEWARPLLQKQAINELLDPRLMNCYCEQEVYCMALCAYLCIRRDPNSRPRMSQVLRMLEGDVVMNPI

SEQ ID NO: 91002 - DNA, 894 bp, Arabidopsis thaliana
  misc_feature (1)..(894): Ceres Seq. ID no. 12726064
  misc_feature: MA Experiment ID: 20000180 Result: Down-regulated in Transcription
  misc_feature: MA Experiment 20000180 PARAMETER Experiment Name: At_Germinating_Seeds_P Parameter: Age (hr) Value: 24 vs. 0
  misc_feature: MA Experiment 20000180 PARAMETER Experiment Name: At_Germinating_Seeds_P Parameter: Tissue Value: Germinating Seeds
  misc_feature: MA Experiment ID: 20000182 Result: Up-regulated in Transcription
  misc_feature: MA Experiment 20000182 PARAMETER Experiment Name: At_2mM_SA_P Parameter: Age (day) Value: 14
  misc_feature: MA Experiment 20000182 PARAMETER Experiment Name: At_2mM_SA_P Parameter: Organism Value: A. thaliana
  misc_feature: MA Experiment 20000182 PARAMETER Experiment Name: At_2mM_SA_P Parameter: Plant Line Value: WS
  misc_feature: MA Experiment 20000182 PARAMETER Experiment Name: At_2mM_SA_P Parameter: Timepoint (hr) Value: 6
  misc_feature: MA Experiment 20000182 PARAMETER Experiment Name: At_2mM_SA_P Parameter: Tissue Value: Aerial
  misc_feature: MA Experiment 20000182 PARAMETER Experiment Name: At_2mM_SA_P Parameter: Treatment Value: 2mM SA vs. No Treatment
  misc_feature: MA Experiment ID: 20000265 Result: Up-regulated in Transcription
  misc_feature: MA Experiment 20000265 PARAMETER Experiment Name: At_Open_Flower_P Parameter: Age (day) Value: 21
  misc_feature: MA Experiment 20000265 PARAMETER Experiment Name: At_Open_Flower_P Parameter: Plant Line Value: WS
  misc_feature: MA Experiment 20000265 PARAMETER Experiment Name: At_Open_Flower_P Parameter: Tissue Value: Closed Flower vs. Whole Plant
  misc_feature: MA Experiment ID: 20001451 Result: Down-regulated in Transcription
  misc_feature: MA Experiment 20001451 PARAMETER Experiment Name: At_Far-red-induction_P Parameter: Age (day) Value: 7
  misc_feature: MA Experiment 20001451 PARAMETER Experiment Name: At_Far-red-induction_P Parameter: Light Value: Far-red vs. White
  misc_feature: MA Experiment 20001451 PARAMETER Experiment Name: At_Far-red-induction_P Parameter: Organism Value: A. thaliana
  misc_feature: MA Experiment 20001451 PARAMETER Experiment Name: At_Far-red-induction_P Parameter: Plant Line Value: Columbia
  misc_feature: MA Experiment 20001451 PARAMETER Experiment Name: At_Far-red-induction_P Parameter: Timepoint (hr) Value: 24
  misc_feature: MA Experiment 20001451 PARAMETER Experiment Name: At_Far-red-induction_P Parameter: Tissue Value: Whole Plant
atgaagatgaagcggactgcgtcatcgaactcggaagcacagagttacaacgaatcacctcactctcctcttcgatttcattctccgttatcagatgccggagatttacctgaaagccgttacgtttctcctgagggatctccgttcaaaatcgagaatccgaagtcgatcgtagctggtaataagctcacacagttttcgcctcttccctcgccgattccgcctcctcctcctcagtttccgccgccgcggcgtcagaggaatgcgagagttccgatgaattcttcttcggataagtctccgtcgtctatggtggtgcacaatagctgggtgagagaagacggtggacaaactacgacgagaaaagctggagctccgataaacggagaagaatcgacgaggacgacggtgaacagagcgagaggagacgatttagtaagtttgacggcgctagggtttagaattaccgaagtaattttgtgtgtgatttcgttttcaatcatggcggctgataaaactcaaggatggagtggcgattcttatgatcgctacaaagagtacaggtattgtttggctgtgaacgttatagcattcgtttactctgcatttgaagcttgtgacgctgcttgctacatcgcaaaagagagttatatgatcaactgtggatttcatgacttattcgttttctccatggatcaacttcttgcatatcttctaatgtcggcttcttcatgtgctgcgactcgagttgatgattgggtatctaattggggcaaagatgagtttactcaaatggcaaccgcttccatcgcggtttcctttttagcgtttggagcgttcgcggtcagcgcgttgatttcttcttacaggctcttcactcatgcttcctcctag

SEQ ID NO: 91003 - protein, 297 aa, Arabidopsis thaliana
  peptide (1)..(297): Ceres Seq. ID no. 12726065
  misc_feature (143)..(236): Pfam Name: Domain of unknown function (DUF588) Pfam Description: Domain of unknown function (DUF588)
  misc_feature (1)..(297): Homolog of NCBI NO: 15241975 NR Description: putative protein; protein id: At5g62820.1
  misc_feature (1)..(236): Homolog of NCBI NO: 10177460 NR Description: gene_id:MQB2.14~unknown protein [Arabidopsis
  misc_feature (42)..(296): Homolog of NCBI NO: 27754604 NR Description: unknown protein [Arabidopsis thaliana]
  misc_feature (203)..(297): Homolog of NCBI NO: 10177460 NR Description: gene_id:MQB2.14~unknown protein [Arabidopsis
  misc_feature (132)..(291): Homolog of NCBI NO: 15242642 NR Description: putative protein; protein id: At5g40300.1 thaliana] >gi|10178139|dbj|BAB11584.1| gene_id:MPO12.1~unknown
  misc_feature (23)..(236): Homolog of NCBI NO: 15227628 NR Description: hypothetical protein; protein id: At2g36330.1
  misc_feature (142)..(297): Homolog of NCBI NO: 34898210 NR Description: P0034A04.16 [Oryza sativa (japonica >gi|29837176|dbj|BAC75558.1| hypothetical protein [Oryza sativa
  misc_feature (67)..(92): Homolog of NCBI NO: 34898210 NR Description: P0034A04.16 [Oryza sativa (japonica >gi|29837176|dbj|BAC75558.1| hypothetical protein [Oryza sativa
  misc_feature (200)..(296): Homolog of NCBI NO: 15227628 NR Description: hypothetical protein; protein id: At2g36330.1
  misc_feature (183)..(287): Homolog of NCBI NO: 2598569 NR Description: putative start codon [Medicago truncatula]
MKMKRTASSNSEAQSYNESPHSPLRFHSPLSDAGDLPESRYVSPEGSPFKIENPKSIVAGNKLTQFSPLPSPIPPPPPQFPPPRRQRNARVPMNSSSDKSPSSMVVHNSWVREDGGQTTTRKAGAPINGEESTRTTVNRARGDDLVSLTALGFRITEVILCVISFSIMAADKTQGWSGDSYDRYKEYRYCLAVNVIAFVYSAFEACDAACYIAKESYMINCGFHDLFVFSMDQLLAYLLMSASSCAATRVDDWVSNWGKDEFTQMATASIAVSFLAFGAFAVSALISSYRLFTHASS

SEQ ID NO: 91004 - protein, 295 aa, Arabidopsis thaliana
  peptide (1)..(295): Ceres Seq. ID no. 12726066
  misc_feature (141)..(234): Pfam Name: Domain of unknown function (DUF588) Pfam Description: Domain of unknown function (DUF588)
  misc_feature (1)..(295): Homolog of NCBI NO: 15241975 NR Description: putative protein; protein id: At5g62820.1
  misc_feature (1)..(234): Homolog of NCBI NO: 10177460 NR Description: gene_id:MQB2.14~unknown protein [Arabidopsis
  misc_feature (40)..(294): Homolog of NCBI NO: 27754604 NR Description: unknown protein [Arabidopsis thaliana]
  misc_feature (201)..(295): Homolog of NCBI NO: 10177460 NR Description: gene_id:MQB2.14~unknown protein [Arabidopsis
  misc_feature (130)..(289): Homolog of NCBI NO: 15242642 NR Description: putative protein; protein id: At5g40300.1 thaliana] >gi|10178139|dbj|BAB11584.1| gene_id:MPO12.1~unknown
  misc_feature (21)..(234): Homolog of NCBI NO: 15227628 NR Description: hypothetical protein; protein id: At2g36330.1
  misc_feature (140)..(295): Homolog of NCBI NO: 34898210 NR Description: P0034A04.16 [Oryza sativa (japonica >gi|29837176|dbj|BAC75558.1| hypothetical protein [Oryza sativa
  misc_feature (65)..(90): Homolog of NCBI NO: 34898210 NR Description: P0034A04.16 [Oryza sativa (japonica >gi|29837176|dbj|BAC75558.1| hypothetical protein [Oryza sativa
  misc_feature (198)..(294): Homolog of NCBI NO: 15227628 NR Description: hypothetical protein; protein id: At2g36330.1
  misc_feature (181)..(285): Homolog of NCBI NO: 2598569 NR Description: putative start codon [Medicago truncatula]
MKRTASSNSEAQSYNESPHSPLRFHSPLSDAGDLPESRYVSPEGSPFKIENPKSIVAGNKLTQFSPLPSPIPPPPPQFPPPRRQRNARVPMNSSSDKSPSSMVVHNSWVREDGGQTTTRKAGAPINGEESTRTTVNRARGDDLVSLTALGFRITEVILCVISFSIMAADKTQGWSGDSYDRYKEYRYCLAVNVIAFVYSAFEACDAACYIAKESYMINCGFHDLFVFSMDQLLAYLLMSASSCAATRVDDWVSNWGKDEFTQMATASIAVSFLAFGAFAVSALISSYRLFTHASS

SEQ ID NO: 91005 - protein, 205 aa, Arabidopsis thaliana
  peptide (1)..(205): Ceres Seq. ID no. 12726067
  misc_feature (51)..(144): Pfam Name: Domain of unknown function (DUF588) Pfam Description: Domain of unknown function (DUF588)
  misc_feature (1)..(205): Homolog of NCBI NO: 15241975 NR Description: putative protein; protein id: At5g62820.1
  misc_feature (1)..(144): Homolog of NCBI NO: 10177460 NR Description: gene_id:MQB2.14~unknown protein [Arabidopsis
  misc_feature (1)..(204): Homolog of NCBI NO: 27754604 NR Description: unknown protein [Arabidopsis thaliana]
  misc_feature (111)..(205): Homolog of NCBI NO: 10177460 NR Description: gene_id:MQB2.14~unknown protein [Arabidopsis
  misc_feature (40)..(199): Homolog of NCBI NO: 15242642 NR Description: putative protein; protein id: At5g40300.1 thaliana] >gi|10178139|dbj|BAB11584.1| gene_id:MPO12.1~unknown
  misc_feature (1)..(144): Homolog of NCBI NO: 15227628 NR Description: hypothetical protein; protein id: At2g36330.1
  misc_feature (50)..(205): Homolog of NCBI NO: 34898210 NR Description: P0034A04.16 [Oryza sativa (japonica >gi|29837176|dbj|BAC75558.1| hypothetical protein [Oryza sativa
  misc_feature (108)..(204): Homolog of NCBI NO: 15227628 NR Description: hypothetical protein; protein id: At2g36330.1
  misc_feature (91)..(195): Homolog of NCBI NO: 2598569 NR Description: putative start codon [Medicago truncatula]
  misc_feature (1)..(113): Homolog of NCBI NO: 34911616 NR Description: P0039G05.10 [Oryza sativa (japonica
MNSSSDKSPSSMVVHNSWVREDGGQTTTRKAGAPINGEESTRTTVNRARGDDLVSLTALGFRITEVILCVISFSIMAADKTQGWSGDSYDRYKEYRYCLAVNVIAFVYSAFEACDAACYIAKESYMINCGFHDLFVFSMDQLLAYLLMSASSCAATRVDDWVSNWGKDEFTQMATASIAVSFLAFGAFAVSALISSYRLFTHASS

SEQ ID NO: 91006 - DNA, 942 bp, Arabidopsis thaliana
  misc_feature (1)..(942): Ceres Seq. ID no. 12726068
  misc_feature: MA Experiment ID: 20000185 Result: Up-regulated in Transcription
  misc_feature: MA Experiment 20000185 PARAMETER Experiment Name: At_Roots__P Parameter: Age (day) Value: 7 vs. 21
  misc_feature: MA Experiment 20000185 PARAMETER Experiment Name: At_Roots__P Parameter: Organism Value: A. thaliana
  misc_feature: MA Experiment 20000185 PARAMETER Experiment Name: At_Roots__P Parameter: Tissue Value: Roots vs. Whole Plant
  misc_feature: MA Experiment ID: 20000213 Result: Up-regulated in Transcription
  misc_feature: MA Experiment 20000213 PARAMETER Experiment Name: At_4deg_Cold_P Parameter: Timepoint (hr) Value: 2
  misc_feature: MA Experiment ID: 20000227 Result: Down-regulated in Transcription
  misc_feature: MA Experiment 20000227 PARAMETER Experiment Name: At_Root-Tips-vs-Tops_P Parameter: Tissue Value: Root Tips vs. Root Tops
  misc_feature: MA Experiment ID: 20000264 Result: Down-regulated in Transcription
  misc_feature: MA Experiment 20000264 PARAMETER Experiment Name: At_Open_Flower_P Parameter: Age (day) Value: 21
  misc_feature: MA Experiment 20000264 PARAMETER Experiment Name: At_Open_Flower_P Parameter: Plant Line Value: WS
  misc_feature: MA Experiment 20000264 PARAMETER Experiment Name: At_Open_Flower_P Parameter: Tissue Value: Open Flower vs. Whole Plant
  misc_feature: MA Experiment ID: 20000439 Result: Up-regulated in Transcription
  misc_feature: MA Experiment 20000439 PARAMETER Experiment Name: At_Roots__P Parameter: Age (day) Value: 14 vs. 21
  misc_feature: MA Experiment 20000439 PARAMETER Experiment Name: At_Roots__P Parameter: Organism Value: A. thaliana
  misc_feature: MA Experiment 20000439 PARAMETER Experiment Name: At_Roots__P Parameter: Tissue Value: Roots vs. Whole Plant
  misc_feature: MA Experiment ID: 20000453 Result: Down-regulated in Transcription
  misc_feature: MA Experiment 20000453 PARAMETER Experiment Name: At_100uM_ABA_P Parameter: Age (day) Value: 15
  misc_feature: MA Experiment 20000453 PARAMETER Experiment Name: At_100uM_ABA_P Parameter: Organism Value: A. thaliana
  misc_feature: MA Experiment 20000453 PARAMETER Experiment Name: At_100uM_ABA_P Parameter: Plant Line Value: WS
  misc_feature: MA Experiment 20000453 PARAMETER Experiment Name: At_100uM_ABA_P Parameter: Timepoint (hr) Value: 24
  misc_feature: MA Experiment 20000453 PARAMETER Experiment Name: At_100uM_ABA_P Parameter: Tissue Value: Aerial
  misc_feature: MA Experiment 20000453 PARAMETER Experiment Name: At_100uM_ABA_P Parameter: Treatment Value: 100uM ABA vs. No Treatment
  misc_feature: MA Experiment ID: 20000456 Result: Up-regulated in Transcription
  misc_feature: MA Experiment 20000456 PARAMETER Experiment Name: At_100uM_BA_P Parameter: Age (day) Value: 14
  misc_feature: MA Experiment 20000456 PARAMETER Experiment Name: At_100uM_BA_P Parameter: Organism Value: A. thaliana
  misc_feature: MA Experiment 20000456 PARAMETER Experiment Name: At_100uM_BA_P Parameter: Plant Line Value: WS
  misc_feature: MA Experiment 20000456 PARAMETER Experiment Name: At_100uM_BA_P Parameter: Timepoint (hr) Value: 6
  misc_feature: MA Experiment 20000456 PARAMETER Experiment Name: At_100uM_BA_P Parameter: Tissue Value: Aerial
  misc_feature: MA Experiment 20000456 PARAMETER Experiment Name: At_100uM_BA_P Parameter: Treatment Value: 100uM BA vs. No Treatment
  misc_feature: MA Experiment ID: 20000573 Result: Up-regulated in Transcription
  misc_feature: MA Experiment 20000573 PARAMETER Experiment Name: At_100uM_ABA_Mutants__P Parameter: Organism Value: A. thaliana
  misc_feature: MA Experiment 20000573 PARAMETER Experiment Name: At_100uM_ABA_Mutants__P Parameter: Plant Line Value: CS22 vs. Ler wt
  misc_feature: MA Experiment 20000573 PARAMETER Experiment Name: At_100uM_ABA_Mutants__P Parameter: Timepoint (hr) Value: N/A
  misc_feature: MA Experiment 20000573 PARAMETER Experiment Name: At_100uM_ABA_Mutants__P Parameter: Tissue Value: Whole Plant
  misc_feature: MA Experiment 20000573 PARAMETER Experiment Name: At_100uM_ABA_Mutants__P Parameter: Treatment Value: None
  misc_feature: MA Experiment ID: 20000709 Result: Up-regulated in Transcription
  misc_feature: MA Experiment 20000709 PARAMETER Experiment Name: At_15mM_NH4NO3_L-to-H_P Parameter: Age (hr) Value: 14
  misc_feature: MA Experiment 20000709 PARAMETER Experiment Name: At_15mM_NH4NO3_L-to-H_P Parameter: Organism Value: A. thaliana
  misc_feature: MA Experiment 20000709 PARAMETER Experiment Name: At_15mM_NH4NO3_L-to-H_P Parameter: Plant Line Value: WS
  misc_feature: MA Experiment 20000709 PARAMETER Experiment Name: At_15mM_NH4NO3_L-to-H_P Parameter: Timepoint (hr) Value: 4
  misc_feature: MA Experiment 20000709 PARAMETER Experiment Name: At_15mM_NH4NO3_L-to-H_P Parameter: Tissue Value: Aerial
  misc_feature: MA Experiment 20000709 PARAMETER Experiment Name: At_15mM_NH4NO3_L-to-H_P Parameter: Treatment Value: 15mM NH4NO3 vs. 30mM Mannitol
  misc_feature: MA Experiment ID: 20001248 Result: Down-regulated in Transcription
  misc_feature: MA Experiment 20001248 PARAMETER Experiment Name: At_Far-red-induction_P Parameter: Age (day) Value: 7
  misc_feature: MA Experiment 20001248 PARAMETER Experiment Name: At_Far-red-induction_P Parameter: Light Value: Far-red vs. White
  misc_feature: MA Experiment 20001248 PARAMETER Experiment Name: At_Far-red-induction_P Parameter: Organism Value: A. thaliana
  misc_feature: MA Experiment 20001248 PARAMETER Experiment Name: At_Far-red-induction_P Parameter: Plant Line Value: Columbia
  misc_feature: MA Experiment 20001248 PARAMETER Experiment Name: At_Far-red-induction_P Parameter: Timepoint (hr) Value: 4
  misc_feature: MA Experiment 20001248 PARAMETER Experiment Name: At_Far-red-induction_P Parameter: Tissue Value: Whole Plant
  misc_feature: MA Experiment ID: 20001450 Result: Down-regulated in Transcription
  misc_feature: MA Experiment 20001450 PARAMETER Experiment Name: At_Far-red-induction_P Parameter: Age (day) Value: 7
  misc_feature: MA Experiment 20001450 PARAMETER Experiment Name: At_Far-red-induction_P Parameter: Light Value: Far-red vs. White
  misc_feature: MA Experiment 20001450 PARAMETER Experiment Name: At_Far-red-induction_P Parameter: Organism Value: A. thaliana
  misc_feature: MA Experiment 20001450 PARAMETER Experiment Name: At_Far-red-induction_P Parameter: Plant Line Value: Columbia
  misc_feature: MA Experiment 20001450 PARAMETER Experiment Name: At_Far-red-induction_P Parameter: Timepoint (hr) Value: 8
  misc_feature: MA Experiment 20001450 PARAMETER Experiment Name: At_Far-red-induction_P Parameter: Tissue Value: Whole Plant
  misc_feature: MA Experiment ID: 20001451 Result: Down-regulated in Transcription
  misc_feature: MA Experiment 20001451 PARAMETER Experiment Name: At_Far-red-induction_P Parameter: Age (day) Value: 7
  misc_feature: MA Experiment 20001451 PARAMETER Experiment Name: At_Far-red-induction_P Parameter: Light Value: Far-red vs. White
  misc_feature: MA Experiment 20001451 PARAMETER Experiment Name: At_Far-red-induction_P Parameter: Organism Value: A. thaliana
  misc_feature: MA Experiment 20001451 PARAMETER Experiment Name: At_Far-red-induction_P Parameter: Plant Line Value: Columbia
  misc_feature: MA Experiment 20001451 PARAMETER Experiment Name: At_Far-red-induction_P Parameter: Timepoint (hr) Value: 24
  misc_feature: MA Experiment 20001451 PARAMETER Experiment Name: At_Far-red-induction_P Parameter: Tissue Value: Whole Plant
  misc_feature: MA Experiment ID: 20001458 Result: Up-regulated in Transcription
  misc_feature: MA Experiment 20001458 PARAMETER Experiment Name: At_50mM_NH4NO3_L-to-H_P Parameter: Age (day) Value: Undefined
  misc_feature: MA Experiment 20001458 PARAMETER Experiment Name: At_50mM_NH4NO3_L-to-H_P Parameter: Organism Value: Undefined
  misc_feature: MA Experiment 20001458 PARAMETER Experiment Name: At_50mM_NH4NO3_L-to-H_P Parameter: Plant Line Value: Undefined
  misc_feature: MA Experiment 20001458 PARAMETER Experiment Name: At_50mM_NH4NO3_L-to-H_P Parameter: Timepoint (hr) Value: 2
  misc_feature: MA Experiment 20001458 PARAMETER Experiment Name: At_50mM_NH4NO3_L-to-H_P Parameter: Tissue Value: Siliques
  misc_feature: MA Experiment 20001458 PARAMETER Experiment Name: At_50mM_NH4NO3_L-to-H_P Parameter: Treatment Value: 50mM NH4NO3 vs. 100mM Manitol
  misc_feature: MA Experiment ID: 20001554 Result: Down-regulated in Transcription
  misc_feature: MA Experiment 20001554 PARAMETER Experiment Name: At_Drought_Soil_Dry_P Parameter: Age (day) Value: 21
  misc_feature: MA Experiment 20001554 PARAMETER Experiment Name: At_Drought_Soil_Dry_P Parameter: Organism Value: A. thaliana
  misc_feature: MA Experiment 20001554 PARAMETER Experiment Name: At_Drought_Soil_Dry_P Parameter: Plant Line Value: WS
  misc_feature: MA Experiment 20001554 PARAMETER Experiment Name: At_Drought_Soil_Dry_P Parameter: Post Timepoint (hr) Value: None
  misc_feature: MA Experiment 20001554 PARAMETER Experiment Name: At_Drought_Soil_Dry_P Parameter: Post-Treatment Value: None
  misc_feature: MA Experiment 20001554 PARAMETER Experiment Name: At_Drought_Soil_Dry_P Parameter: Timepoint (day) Value: 7
  misc_feature: MA Experiment 20001554 PARAMETER Experiment Name: At_Drought_Soil_Dry_P Parameter: Treatment Value: Drought vs. No Drought
  misc_feature: MA Experiment ID: 20001557 Result: Up-regulated in Transcription
  misc_feature: MA Experiment 20001557 PARAMETER Experiment Name: At_Drought_Soil_Dry_P Parameter: Age (day) Value: 27
  misc_feature: MA Experiment 20001557 PARAMETER Experiment Name: At_Drought_Soil_Dry_P Parameter: Organism Value: A. thaliana
  misc_feature: MA Experiment 20001557 PARAMETER Experiment Name: At_Drought_Soil_Dry_P Parameter: Plant Line Value: WS
  misc_feature: MA Experiment 20001557 PARAMETER Experiment Name: At_Drought_Soil_Dry_P Parameter: Post Timepoint (hr) Value: 3
  misc_feature: MA Experiment 20001557 PARAMETER Experiment Name: At_Drought_Soil_Dry_P Parameter: Post-Treatment Value: Re-Water vs. No Drought
  misc_feature: MA Experiment 20001557 PARAMETER Experiment Name: At_Drought_Soil_Dry_P Parameter: Timepoint (day) Value: 13
  misc_feature: MA Experiment 20001557 PARAMETER Experiment Name: At_Drought_Soil_Dry_P Parameter: Treatment Value: Drought vs. No Drought
  misc_feature: MA Experiment ID: 20001558 Result: Up-regulated in Transcription
  misc_feature: MA Experiment 20001558 PARAMETER Experiment Name: At_Drought_Soil_Dry_P Parameter: Age (day) Value: 27
  misc_feature: MA Experiment 20001558 PARAMETER Experiment Name: At_Drought_Soil_Dry_P Parameter: Organism Value: A. thaliana
  misc_feature: MA Experiment 20001558 PARAMETER Experiment Name: At_Drought_Soil_Dry_P Parameter: Plant Line Value: WS
  misc_feature: MA Experiment 20001558 PARAMETER Experiment Name: At_Drought_Soil_Dry_P Parameter: Post Timepoint (hr) Value: 6
  misc_feature: MA Experiment 20001558 PARAMETER Experiment Name: At_Drought_Soil_Dry_P Parameter: Post-Treatment Value: Re-Water vs. No Drought
  misc_feature: MA Experiment 20001558 PARAMETER Experiment Name: At_Drought_Soil_Dry_P Parameter: Timepoint (day) Value: 13
  misc_feature: MA Experiment 20001558 PARAMETER Experiment Name: At_Drought_Soil_Dry_P Parameter: Treatment Value: Drought vs. No Drought
  misc_feature: MA Experiment ID: 20001770 Result: Down-regulated in Transcription
  misc_feature: MA Experiment 20001770 PARAMETER Experiment Name: At_Far-red-enriched-adult_P Parameter: Age (day) Value: 28
  misc_feature: MA Experiment 20001770 PARAMETER Experiment Name: At_Far-red-enriched-adult_P Parameter: Light Value: Far-red enriched vs. White
  misc_feature: MA Experiment 20001770 PARAMETER Experiment Name: At_Far-red-enriched-adult_P Parameter: Organism Value: A. thaliana
  misc_feature: MA Experiment 20001770 PARAMETER Experiment Name: At_Far-red-enriched-adult_P Parameter: Plant Line Value: Columbia
  misc_feature: MA Experiment 20001770 PARAMETER Experiment Name: At_Far-red-enriched-adult_P Parameter: Timepoint (hr) Value: 8
  misc_feature: MA Experiment 20001770 PARAMETER Experiment Name: At_Far-red-enriched-adult_P Parameter: Tissue Value: Aerial
atcctccaacattcgttgatcaatggctgaagttatgctaccgaggaagatggagattctcaaccattcttcaaagtttggatcaccggatcctcttcatgttcttgccgtcgacgacagtcacgttgatcgtaaattcatcgagcgtttgctcagagtatcttcttgcaaagttactgttgttgatagtgcaacaagagctctccaataccttggtttggatgttgaggaaaaatcagtcggttttgaggatttgaaggttaatttaattatgactgattactcaatgcccggtatgactggatatgaactcttgaagaagatcaaagaatcctcagcttttagagaagtaccggtggtaattatgtcctccgagaacattttgcctcgtattgatagatgtcttgaagaaggggctgaagatttcttactgaagccggtaaaactctcggatgtaaaaagattaagagattctctaatgaaggttgaagatttgtctttcacaaagagtattcagaagagagagctagaaacagagaatgtctaccctgttcactcgcagctcaaacgcgcaaagatctgagctctccgatgcaaattccgtgactggatcttagaaaaagccttttcatatacagaagcttcaagactcaatgcacttgagcctacactgatgattctcgccagcttaatgacctatacaattttccaacccctatggcctttttcgctgattgaattcagtgggtttattcatatagtagtaatgtaaatggtatagagatgagcaaaagctatattatatattatattcattagaggggtcatagcttttttccttacaagagatttgtaagctggcttaatagaagttgttaagaagcctcactttatgtgaataaatgattttgttagctaatcataaacaatcagaagtttcct

SEQ ID NO: 91007 - protein, 186 aa, Arabidopsis thaliana
  peptide (1)..(186): Ceres Seq. ID no. 12726069
  misc_feature (25)..(144): Pfam Name: Response regulator receiver domain Pfam Description: Response regulator receiver domain
  misc_feature (1)..(186): Homolog of NCBI NO: 15242000 NR Description: response regulator 6 (ARR6); protein id: supported by cDNA: gi_3953600 [Arabidopsis thaliana]
  misc_feature (1)..(102): Homolog of NCBI NO: 11358765 NR Description: response regulator 6 [imported] - Arabidopsis >gi|3953605|dbj|BAA34730.1| response regulator 6 [Arabidopsis
  misc_feature (115)..(186): Homolog of NCBI NO: 11358765 NR Description: response regulator 6 [imported] - Arabidopsis >gi|3953605|dbj|BAA34730.1| response regulator 6 [Arabidopsis
  misc_feature (1)..(186): Homolog of NCBI NO: 15228338 NR Description: response reactor 2 (ATRR2); protein id: supported by cDNA: gi_18252910, supported by cDNA: gi_3273197, by cDNA: gi_3323580, supported by cDNA: gi_3953598 [Arabidopsis
  misc_feature (1)..(186): Homolog of NCBI NO: 11358763 NR Description: response regulator 5 [imported] - Arabidopsis >gi|3953599|dbj|BAA34727.1| response regulator 5 [Arabidopsis
  misc_feature (1)..(186): Homolog of NCBI NO: 11358906 NR Description: two-component response regulator homolog
  misc_feature (20)..(157): Homolog of NCBI NO: 33330864 NR Description: type-A response regulator [Catharanthus roseus]
  misc_feature (1)..(173): Homolog of NCBI NO: 15221927 NR Description: response regulator 5, putative; protein id: supported by cDNA: gi_3953602 [Arabidopsis thaliana]
  misc_feature (17)..(172): Homolog of NCBI NO: 15222035 NR Description: response regulator 7, putative; protein id: supported by cDNA: gi_11870064 [Arabidopsis thaliana]
  misc_feature (23)..(181): Homolog of NCBI NO: 15218550 NR Description: putative response regulator 3; protein id: supported by cDNA: gi_3273195, supported by cDNA: gi_3323582, by cDNA: gi_3953596 [Arabidopsis thaliana]
MAEVMLPRKMEILNHSSKFGSPDPLHVLAVDDSHVDRKFIERLLRVSSCKVTVVDSATRALQYLGLDVEEKSVGFEDLKVNLIMTDYSMPGMTGYELLKKIKESSAFREVPVVIMSSENILPRIDRCLEEGAEDFLLKPVKLSDVKRLRDSLMKVEDLSFTKSIQKRELETENVYPVHSQLKRAKI

SEQ ID NO: 91008 - protein, 182 aa, Arabidopsis thaliana
  peptide (1)..(182): Ceres Seq. ID no. 12726070
  misc_feature (21)..(140): Pfam Name: Response regulator receiver domain Pfam Description: Response regulator receiver domain
  misc_feature (1)..(182): Homolog of NCBI NO: 15242000 NR Description: response regulator 6 (ARR6); protein id: supported by cDNA: gi_3953600 [Arabidopsis thaliana]
  misc_feature (1)..(98): Homolog of NCBI NO: 11358765 NR Description: response regulator 6 [imported] - Arabidopsis >gi|3953605|dbj|BAA34730.1| response regulator 6 [Arabidopsis
  misc_feature (111)..(182): Homolog of NCBI NO: 11358765 NR Description: response regulator 6 [imported] - Arabidopsis >gi|3953605|dbj|BAA34730.1| response regulator 6 [Arabidopsis
  misc_feature (1)..(182): Homolog of NCBI NO: 15228338 NR Description: response reactor 2 (ATRR2); protein id: supported by cDNA: gi_18252910, supported by cDNA: gi_3273197, by cDNA: gi_3323580, supported by cDNA: gi_3953598 [Arabidopsis
  misc_feature (1)..(182): Homolog of NCBI NO: 11358763 NR Description: response regulator 5 [imported] - Arabidopsis >gi|3953599|dbj|BAA34727.1| response regulator 5 [Arabidopsis
  misc_feature (1)..(182): Homolog of NCBI NO: 11358906 NR Description: two-component response regulator homolog
  misc_feature (16)..(153): Homolog of NCBI NO: 33330864 NR Description: type-A response regulator [Catharanthus roseus]
  misc_feature (1)..(169): Homolog of NCBI NO: 15221927 NR Description: response regulator 5, putative; protein id: supported by cDNA: gi_3953602 [Arabidopsis thaliana]
  misc_feature (13)..(168): Homolog of NCBI NO: 15222035 NR Description: response regulator 7, putative; protein id: supported by cDNA: gi_11870064 [Arabidopsis thaliana]
  misc_feature (19)..(177): Homolog of NCBI NO: 15218550 NR Description: putative response regulator 3; protein id: supported by cDNA: gi_3273195, supported by cDNA: gi_3323582, by cDNA: gi_3953596 [Arabidopsis thaliana]
MLPRKMEILNHSSKFGSPDPLHVLAVDDSHVDRKFIERLLRVSSCKVTVVDSATRALQYLGLDVEEKSVGFEDLKVNLIMTDYSMPGMTGYELLKKIKESSAFREVPVVIMSSENILPRIDRCLEEGAEDFLLKPVKLSDVKRLRDSLMKVEDLSFTKSIQKRELETENVYPVHSQLKRAKI

SEQ ID NO: 91009 - protein, 177 aa, Arabidopsis thaliana
  peptide (1)..(177): Ceres Seq. ID no. 12726071
  misc_feature (16)..(135): Pfam Name: Response regulator receiver domain Pfam Description: Response regulator receiver domain
  misc_feature (1)..(177): Homolog of NCBI NO: 15242000 NR Description: response regulator 6 (ARR6); protein id: supported by cDNA: gi_3953600 [Arabidopsis thaliana]
  misc_feature (1)..(93): Homolog of NCBI NO: 11358765 NR Description: response regulator 6 [imported] - Arabidopsis >gi|3953605|dbj|BAA34730.1| response regulator 6 [Arabidopsis
  misc_feature (106)..(177): Homolog of NCBI NO: 11358765 NR Description: response regulator 6 [imported] - Arabidopsis >gi|3953605|dbj|BAA34730.1| response regulator 6 [Arabidopsis
  misc_feature (1)..(177): Homolog of NCBI NO: 15228338 NR Description: response reactor 2 (ATRR2); protein id: supported by cDNA: gi_18252910, supported by cDNA: gi_3273197, by cDNA: gi_3323580, supported by cDNA: gi_3953598 [Arabidopsis
  misc_feature (1)..(177): Homolog of NCBI NO: 11358763 NR Description: response regulator 5 [imported] - Arabidopsis >gi|3953599|dbj|BAA34727.1| response regulator 5 [Arabidopsis
  misc_feature (1)..(177): Homolog of NCBI NO: 11358906 NR Description: two-component response regulator homolog
  misc_feature (11)..(148): Homolog of NCBI NO: 33330864 NR Description: type-A response regulator [Catharanthus roseus]
  misc_feature (1)..(164): Homolog of NCBI NO: 15221927 NR Description: response regulator 5, putative; protein id: supported by cDNA: gi_3953602 [Arabidopsis thaliana]
  misc_feature (8)..(163): Homolog of NCBI NO: 15222035 NR Description: response regulator 7, putative; protein id: supported by cDNA: gi_11870064 [Arabidopsis thaliana]
  misc_feature (14)..(172): Homolog of NCBI NO: 15218550 NR Description: putative response regulator 3; protein id: supported by cDNA: gi_3273195, supported by cDNA: gi_3323582, by cDNA: gi_3953596 [Arabidopsis thaliana]
MEILNHSSKFGSPDPLHVLAVDDSHVDRKFIERLLRVSSCKVTVVDSATRALQYLGLDVEEKSVGFEDLKVNLIMTDYSMPGMTGYELLKKIKESSAFREVPVVIMSSENILPRIDRCLEEGAEDFLLKPVKLSDVKRLRDSLMKVEDLSFTKSIQKRELETENVYPVHSQLKRAKI

SEQ ID NO: 91010 - DNA, 985 bp, Arabidopsis thaliana
  misc_feature (1)..(985): Ceres Seq. ID no. 12726116
  misc_feature: MA Experiment ID: 20000306 Result: Up-regulated in Transcription
  misc_feature: MA Experiment 20000306 PARAMETER Experiment Name: At_Germinating_Seeds_Sub_P Parameter: Age (hr) Value: 6 vs. 0
  misc_feature: MA Experiment 20000306 PARAMETER Experiment Name: At_Germinating_Seeds_Sub_P Parameter: Organism Value: A. thaliana
  misc_feature: MA Experiment 20000306 PARAMETER Experiment Name: At_Germinating_Seeds_Sub_P Parameter: Plant Line Value: WS
  misc_feature: MA Experiment 20000306 PARAMETER Experiment Name: At_Germinating_Seeds_Sub_P Parameter: Tissue Value: Germinating Seeds
  misc_feature: MA Experiment ID: 20000307 Result: Up-regulated in Transcription
  misc_feature: MA Experiment 20000307 PARAMETER Experiment Name: At_Germinating_Seeds_Sub_P Parameter: Age (hr) Value: 24 vs. 0
  misc_feature: MA Experiment 20000307 PARAMETER Experiment Name: At_Germinating_Seeds_Sub_P Parameter: Organism Value: A. thaliana
  misc_feature: MA Experiment 20000307 PARAMETER Experiment Name: At_Germinating_Seeds_Sub_P Parameter: Plant Line Value: WS
  misc_feature: MA Experiment 20000307 PARAMETER Experiment Name: At_Germinating_Seeds_Sub_P Parameter: Tissue Value: Germinating Seeds
  misc_feature: MA Experiment ID: 20000314 Result: Down-regulated in Transcription
  misc_feature: MA Experiment 20000314 PARAMETER Experiment Name: At_14day_Shoots-Roots_Sub_P Parameter: Age (day) Value: 14
  misc_feature: MA Experiment 20000314 PARAMETER Experiment Name: At_14day_Shoots-Roots_Sub_P Parameter: Organism Value: A. thaliana
  misc_feature: MA Experiment 20000314 PARAMETER Experiment Name: At_14day_Shoots-Roots_Sub_P Parameter: Plant Line Value: WS
  misc_feature: MA Experiment 20000314 PARAMETER Experiment Name: At_14day_Shoots-Roots_Sub_P Parameter: Tissue Value: Roots vs. Whole Plant
aaagatccaatggacaataacaacaacaacaacaaccagcaaccaccaccaacctccgtctatccacctggctccgccgtcacaaccgtaatccctcctccaccatctggatctgcatcaatagtcaccggaggaggagcgacataccaccacctcctccagcaacaacagcaacagcttcaaatgttctggacataccagagacaagagatcgaacaggtaaacgatttcaaaaaccatcagctccctctagctcgtatcaaaaaaatcatgaaagctgatgaagatgtgcgtatgatctccgccgaagcaccgattctcttcgcgaaagcttgtgagcttttcattctcgaacttacgattagatcttggcttcacgctgaagagaacaaacgtcgtacgcttcagaaaaacgatatcgctgctgcgattactagaaccgatatcttcgatttccttgttgatattgttcctagggaagagatcaaggaagaggaagatgcagcatcggctcttggtggaggaggtatggttgctcccgccgcgagcggtgttccttattattatccaccgatgggacaaccggcggttcctggagggatgatgattggaagaccggcgatggatcctagcggtgtttatgctcagcctccttctcaggcatggcaaagcgtttggcagaattcagctggtggtggtgatgatgtgtcttatggaagtggaggaagtagcggccatggtaatctcgatagccaaggttgagctatggaaccagaagcttagagatttaatcatcatttcgaccctgcaagtgtctgattcttatatgtctatgattcgaatgacttactcgagagagagagagagatcaaacaaaacaaaacaaaaaagctctttttcatttttcctgttaacttataagttattgcagcaaaactgcagacttgcttaactatatattaatctaaatgtgcagattctaatc

SEQ ID NO: 91011 - protein, 253 aa, Arabidopsis thaliana
  peptide (1)..(253): Ceres Seq. ID no. 12726117
  misc_feature (4)..(253): Homolog of NCBI NO: 15242784 NR Description: transcription factor Hap5a-like protein; protein At5g63470.1, supported by cDNA: gi_18252934 [Arabidopsis
  misc_feature (9)..(253): Homolog of NCBI NO: 15228405 NR Description: transcription factor Hap5a; protein id: supported by cDNA: 21604., supported by cDNA: gi_20260195
  misc_feature (96)..(253): Homolog of NCBI NO: 2398531 NR Description: Transcription factor [Arabidopsis thaliana]
  misc_feature (49)..(223): Homolog of NCBI NO: 15221912 NR Description: heme activated protein, putative; protein id: [Arabidopsis thaliana] >gi|3776575|gb|AAC64892.1| Similar to
  misc_feature (34)..(230): Homolog of NCBI NO: 15223986 NR Description: putative transcription factor; protein id: supported by cDNA: 1911. [Arabidopsis thaliana] putative transcription factor [Arabidopsis thaliana]
  misc_feature (36)..(230): Homolog of NCBI NO: 25372763 NR Description: hypothetical protein [imported] - Arabidopsis
  misc_feature (34)..(230): Homolog of NCBI NO: 6289057 NR Description: heme activated protein [Arabidopsis thaliana]
  misc_feature (4)..(189): Homolog of NCBI NO: 15223482 NR Description: transcription factor, putative; protein id: supported by cDNA: 26157., supported by cDNA: gi_18252952 thaliana] >gi|18252953|gb|AAL62403.1| transcription putative
  misc_feature (4)..(189): Homolog of NCBI NO: 21554704 NR Description: transcription factor, putative [Arabidopsis
  misc_feature (16)..(189): Homolog of NCBI NO: 5257260 NR Description: Similar to sequence of BAC F7G19 from Arabidopsis
KDPMDNNNNNNNQQPPPTSVYPPGSAVTTVIPPPPSGSASIVTGGGATYHHLLQQQQQQLQMFWTYQRQEIEQVNDFKNHQLPLARIKKIMKADEDVRMISAEAPILFAKACELFILELTIRSWLHAEENKRRTLQKNDIAAAITRTDIFDFLVDIVPREEIKEEEDAASALGGGGMVAPAASGVPYYYPPMGQPAVPGGMMIGRPAMDPSGVYAQPPSQAWQSVWQNSAGGGDDVSYGSGGSSGHGNLDSQG

SEQ ID NO: 91012 - protein, 250 aa, Arabidopsis thaliana
  peptide (1)..(250): Ceres Seq. ID no. 12726118
  misc_feature (1)..(250): Homolog of NCBI NO: 15242784 NR Description: transcription factor Hap5a-like protein; protein At5g63470.1, supported by cDNA: gi_18252934 [Arabidopsis
  misc_feature (6)..(250): Homolog of NCBI NO: 15228405 NR Description: transcription factor Hap5a; protein id: supported by cDNA: 21604., supported by cDNA: gi_20260195
  misc_feature (93)..(250): Homolog of NCBI NO: 2398531 NR Description: Transcription factor [Arabidopsis thaliana]
  misc_feature (46)..(220): Homolog of NCBI NO: 15221912 NR Description: heme activated protein, putative; protein id: [Arabidopsis thaliana] >gi|3776575|gb|AAC64892.1| Similar to
  misc_feature (31)..(227): Homolog of NCBI NO: 15223986 NR Description: putative transcription factor; protein id: supported by cDNA: 1911. [Arabidopsis thaliana] putative transcription factor [Arabidopsis thaliana]
  misc_feature (33)..(227): Homolog of NCBI NO: 25372763 NR Description: hypothetical protein [imported] - Arabidopsis
  misc_feature (31)..(227): Homolog of NCBI NO: 6289057 NR Description: heme activated protein [Arabidopsis thaliana]
  misc_feature (1)..(186): Homolog of NCBI NO: 15223482 NR Description: transcription factor, putative; protein id: supported by cDNA: 26157., supported by cDNA: gi_18252952 thaliana] >gi|18252953|gb|AAL62403.1| transcription putative
  misc_feature (1)..(186): Homolog of NCBI NO: 21554704 NR Description: transcription factor, putative [Arabidopsis
  misc_feature (13)..(186): Homolog of NCBI NO: 5257260 NR Description: Similar to sequence of BAC F7G19 from Arabidopsis
MDNNNNNNNQQPPPTSVYPPGSAVTTVIPPPPSGSASIVTGGGATYHHLLQQQQQQLQMFWTYQRQEIEQVNDFKNHQLPLARIKKIMKADEDVRMISAEAPILFAKACELFILELTIRSWLHAEENKRRTLQKNDIAAAITRTDIFDFLVDIVPREEIKEEEDAASALGGGGMVAPAASGVPYYYPPMGQPAVPGGMMIGRPAMDPSGVYAQPPSQAWQSVWQNSAGGGDDVSYGSGGSSGHGNLDSQG

SEQ ID NO: 91013 - protein, 192 aa, Arabidopsis thaliana; identical to SEQ ID NO: 78253
  peptide (1)..(192): Ceres Seq. ID no. 12726119
  misc_feature (1)..(192): Homolog of NCBI NO: 15242784 NR Description: transcription factor Hap5a-like protein; protein At5g63470.1, supported by cDNA: gi_18252934 [Arabidopsis
  misc_feature (1)..(192): Homolog of NCBI NO: 15228405 NR Description: transcription factor Hap5a; protein id: supported by cDNA: 21604., supported by cDNA: gi_20260195
  misc_feature (35)..(192): Homolog of NCBI NO: 2398531 NR Description: Transcription factor [Arabidopsis thaliana]
  misc_feature (1)..(162): Homolog of NCBI NO: 15221912 NR Description: heme activated protein, putative; protein id: [Arabidopsis thaliana] >gi|3776575|gb|AAC64892.1| Similar to
  misc_feature (1)..(169): Homolog of NCBI NO: 15223986 NR Description: putative transcription factor; protein id: supported by cDNA: 1911. [Arabidopsis thaliana] putative transcription factor [Arabidopsis thaliana]
  misc_feature (1)..(169): Homolog of NCBI NO: 25372763 NR Description: hypothetical protein [imported] - Arabidopsis
  misc_feature (1)..(169): Homolog of NCBI NO: 6289057 NR Description: heme activated protein [Arabidopsis thaliana]
  misc_feature (1)..(128): Homolog of NCBI NO: 15223482 NR Description: transcription factor, putative; protein id: supported by cDNA: 26157., supported by cDNA: gi_18252952 thaliana] >gi|18252953|gb|AAL62403.1| transcription putative
  misc_feature (1)..(128): Homolog of NCBI NO: 21554704 NR Description: transcription factor, putative [Arabidopsis
  misc_feature (1)..(128): Homolog of NCBI NO: 5257260 NR Description: Similar to sequence of BAC F7G19 from Arabidopsis

SEQ ID NO: 91014 - DNA, 1533 bp, Arabidopsis thaliana
  misc_feature (1)..(1533): Ceres Seq. ID no. 12726138
  misc_feature: MA Experiment ID: 20000173 Result: Down-regulated in Transcription
  misc_feature: MA Experiment 20000173 PARAMETER Experiment Name: At_42deg_Heat_P Parameter: Age (day) Value: 14
  misc_feature: MA Experiment 20000173 PARAMETER Experiment Name: At_42deg_Heat_P Parameter: Organism Value: A. thaliana
  misc_feature: MA Experiment 20000173 PARAMETER Experiment Name: At_42deg_Heat_P Parameter: Plant Line Value: WS
  misc_feature: MA Experiment 20000173 PARAMETER Experiment Name: At_42deg_Heat_P Parameter: Temperature (deg C) Value: 42 vs. 22
  misc_feature: MA Experiment 20000173 PARAMETER Experiment Name: At_42deg_Heat_P Parameter: Timepoint (hr) Value: 6
  misc_feature: MA Experiment 20000173 PARAMETER Experiment Name: At_42deg_Heat_P Parameter: Tissue Value: Aerial
  misc_feature: MA Experiment ID: 20000184 Result: Down-regulated in Transcription
  misc_feature: MA Experiment 20000184 PARAMETER Experiment Name: At_Shoots__P Parameter: Age (day) Value: 7
  misc_feature: MA Experiment 20000184 PARAMETER Experiment Name: At_Shoots__P Parameter: Tissue Value: Shoots vs. Whole Plant
  misc_feature: MA Experiment ID: 20000496 Result: Down-regulated in Transcription
  misc_feature: MA Experiment 20000496 PARAMETER Experiment Name: At_Guard_Cells_P Parameter: Harvest Date Value: 7/19/2002
  misc_feature: MA Experiment 20000496 PARAMETER Experiment Name: At_Guard_Cells_P Parameter: Organism Value: Canola
  misc_feature: MA Experiment 20000496 PARAMETER Experiment Name: At_Guard_Cells_P Parameter: Tissue Value: Guard Cells vs. Leaves
  misc_feature: MA Experiment ID: 20000527 Result: Down-regulated in Transcription
  misc_feature: MA Experiment 20000527 PARAMETER Experiment Name: At_10percent_PEG_P Parameter: Age (day) Value: 20
  misc_feature: MA Experiment 20000527 PARAMETER Experiment Name: At_10percent_PEG_P Parameter: Organism Value: A. thaliana
  misc_feature: MA Experiment 20000527 PARAMETER Experiment Name: At_10percent_PEG_P Parameter: Plant Line Value: WS
  misc_feature: MA Experiment 20000527 PARAMETER Experiment Name: At_10percent_PEG_P Parameter: Timepoint (day) Value: 20
  misc_feature: MA Experiment 20000527 PARAMETER Experiment Name: At_10percent_PEG_P Parameter: Tissue Value: Whole Plant
  misc_feature: MA Experiment 20000527 PARAMETER Experiment Name: At_10percent_PEG_P Parameter: Treatment Value: 10percent PEG vs. No Treatment
atgtcgaacatagacatagaaggaatattgaaggagctacctaatgatgggaggactcctaagactaagatcgtttgtacattaggtcctgcgtctaggtctgtgacaatgattgagaagcttcttaaagcaggcatgaatgtagctcgattcaatttctctcacggaagccatgagtaccatcaggagactcttgacaatctccgcaccgctatgcagaataccggcattctcgctgctgttatgcttgatacaaaggggcctgagattcgtaccggtttcttgaaagatgggaaccctatacaactaaaggaaggccaagagatcacaattaccactgattatgacatcaagggcgatgagaaaacgatttccatgagctacaaaaagctcccagtggatgtgaagcccggaaataccatactatgtgcagatggaagcataagtcttgctgtcgtgtcatgtgatccaaacgctgggactgttatatgtcgatgtgaaaatacagccatgctaggtgaaagaaaaaatgtgaatctcccaggtgttgttgttgatctccccacattgactgacaaggatgtagaagatattcttaaatggggtgttccaaacaacatcgatatgattgctctttcatttgttcgcaaaggttcagatcttgttaatgtccggaaagtccttggatcacattccaagagtataatgttgatgtcgaaggttgagaaccaagaaggagtcctgaatttcgatgagattttgcgtgaaactgatgcattcatggttgctcgtggtgatcttgggatggagattccgatagagaagatcttcttggctcagaagatgatgatctacaagtgtaaccttgcaggtaaaccggtggtcacagccactcaaatgctcgagtcgatgatcaaatcaccacggccaacacgagcagaagccacagatgtagcaaacgcagttctcgatggcactgactgtgtgatgcttagcggagaaagtgctgcaggagcttaccctgaaatagcagtgaaaacaatggctaaaatctgcatcgaggcggaatcatcgcttgactacaacacaatcttcaaggagatgattagagcaactccacttccaatgagcactcttgagagtcttgcatcatcagctgtacgaacggcaaacaaagccaaagccaaactcatcatcgtgttgaccagaggaggtacaacagctaaactggtggccaagtatagaccggctgttccaattctatcggtggttgttccggtcttcaccagcgatacgtttaactggagttgcagcgatgagtcaccggcgaggcatagtttgatatatagaggtctgataccggttttgggtgaaggatctgcaaaagcaactgatagtgaatccacagaggagattattgaatctgctttgaagtcagcgacagagaaaggactgtgtaaccatggtgatgctgtggtggctctgcaccgtattggagctgcttcggttatcaagatctgtgtggtgaagtga

SEQ ID NO: 91015 - protein, 510 aa, Arabidopsis thaliana
  peptide (1)..(510): Ceres Seq. ID no. 12726139
  misc_feature (379)..(510): Pfam Name: Pyruvate kinase, alpha/beta domain Pfam Description: Pyruvate kinase, alpha/beta domain
  misc_feature (1)..(510): Homolog of NCBI NO: 15242863 NR Description: pyruvate kinase; protein id: At5g63680.1 thaliana] >gi|10177049|dbj|BAB10461.1| pyruvate kinase
  misc_feature (1)..(510): Homolog of NCBI NO: 15242313 NR Description: pyruvate kinase; protein id: At5g08570.1 thaliana] >gi|9759351|dbj|BAB10006.1| pyruvate kinase
MSNIDIEGILKELPNDGRTPKTKIVCTLGPASRSVTMIEKLLKAGMNVARFNFSHGSHEYHQETLDNLRTAMQNTGILAAVMLDTKGPEIRTGFLKDGNPIQLKEGQEITITTDYDIKGDEKTISMSYKKLPVDVKPGNTILCADGSISLAVVSCDPNAGTVICRCENTAMLGERKNVNLPGVVVDLPTLTDKDVEDILKWGVPNNIDMIALSFVRKGSDLVNVRKVLGSHSKSIMLMSKVENQEGVLNFDEILRETDAFMVARGDLGMEIPIEKIFLAQKMMIYKCNLAGKPVVTATQMLESMIKSPRPTRAEATDVANAVLDGTDCVMLSGESAAGAYPEIAVKTMAKICIEAESSLDYNTIFKEMIRATPLPMSTLESLASSAVRTANKAKAKLIIVLTRGGTTAKLVAKYRPAVPILSVVVPVFTSDTFNWSCSDESPARHSLIYRGLIPVLGEGSAKATDSESTEEIIESALKSATEKGLCNHGDAVVALHRIGAASVIKICVVK

SEQ ID NO: 91016 - protein, 474 aa, Arabidopsis thaliana
  peptide (1)..(474): Ceres Seq. ID no. 12726140
  misc_feature (343)..(474): Pfam Name: Pyruvate kinase, alpha/beta domain Pfam Description: Pyruvate kinase, alpha/beta domain
  misc_feature (1)..(474): Homolog of NCBI NO: 15242863 NR Description: pyruvate kinase; protein id: At5g63680.1 thaliana] >gi|10177049|dbj|BAB10461.1| pyruvate kinase
  misc_feature (1)..(474): Homolog of NCBI NO: 15242313 NR Description: pyruvate kinase; protein id: At5g08570.1 thaliana] >gi|9759351|dbj|BAB10006.1| pyruvate kinase
MIEKLLKAGMNVARFNFSHGSHEYHQETLDNLRTAMQNTGILAAVMLDTKGPEIRTGFLKDGNPIQLKEGQEITITTDYDIKGDEKTISMSYKKLPVDVKPGNTILCADGSISLAVVSCDPNAGTVICRCENTAMLGERKNVNLPGVVVDLPTLTDKDVEDILKWGVPNNIDMIALSFVRKGSDLVNVRKVLGSHSKSIMLMSKVENQEGVLNFDEILRETDAFMVARGDLGMEIPIEKIFLAQKMMIYKCNLAGKPVVTATQMLESMIKSPRPTRAEATDVANAVLDGTDCVMLSGESAAGAYPEIAVKTMAKICIEAESSLDYNTIFKEMIRATPLPMSTLESLASSAVRTANKAKAKLIIVLTRGGTTAKLVAKYRPAVPILSVVVPVFTSDTFNWSCSDESPARHSLIYRGLIPVLGEGSAKATDSESTEEIIESALKSATEKGLCNHGDAVVALHRIGAASVIKICVVK

SEQ ID NO: 91017 - protein, 465 aa, Arabidopsis thaliana
  peptide (1)..(465): Ceres Seq. ID no. 12726141
  misc_feature (334)..(465): Pfam Name: Pyruvate kinase, alpha/beta domain Pfam Description: Pyruvate kinase, alpha/beta domain
  misc_feature (1)..(465): Homolog of NCBI NO: 15242863 NR Description: pyruvate kinase; protein id: At5g63680.1 thaliana] >gi|10177049|dbj|BAB10461.1| pyruvate kinase
  misc_feature (1)..(465): Homolog of NCBI NO: 15242313 NR Description: pyruvate kinase; protein id: At5g08570.1 thaliana] >gi|9759351|dbj|BAB10006.1| pyruvate kinase
MNVARFNFSHGSHEYHQETLDNLRTAMQNTGILAAVMLDTKGPEIRTGFLKDGNPIQLKEGQEITITTDYDIKGDEKTISMSYKKLPVDVKPGNTILCADGSISLAVVSCDPNAGTVICRCENTAMLGERKNVNLPGVVVDLPTLTDKDVEDILKWGVPNNIDMIALSFVRKGSDLVNVRKVLGSHSKSIMLMSKVENQEGVLNFDEILRETDAFMVARGDLGMEIPIEKIFLAQKMMIYKCNLAGKPVVTATQMLESMIKSPRPTRAEATDVANAVLDGTDCVMLSGESAAGAYPEIAVKTMAKICIEAESSLDYNTIFKEMIRATPLPMSTLESLASSAVRTANKAKAKLIIVLTRGGTTAKLVAKYRPAVPILSVVVPVFTSDTFNWSCSDESPARHSLIYRGLIPVLGEGSAKATDSESTEEIIESALKSATEKGLCNHGDAVVALHRIGAASVIKICVVK

SEQ ID NO: 91018 - DNA, 420 bp, Arabidopsis thaliana
  misc_feature (1)..(420): Ceres Seq. ID no. 12726142
  misc_feature: MA Experiment ID: 20000184 Result: Down-regulated in Transcription
  misc_feature: MA Experiment 20000184 PARAMETER Experiment Name: At_Shoots__P Parameter: Age (day) Value: 7
  misc_feature: MA Experiment 20000184 PARAMETER Experiment Name: At_Shoots__P Parameter: Tissue Value: Shoots vs. Whole Plant
  misc_feature: MA Experiment ID: 20000496 Result: Up-regulated in Transcription
  misc_feature: MA Experiment 20000496 PARAMETER Experiment Name: At_Guard_Cells_P Parameter: Harvest Date Value: 7/19/2002
  misc_feature: MA Experiment 20000496 PARAMETER Experiment Name: At_Guard_Cells_P Parameter: Organism Value: Canola
  misc_feature: MA Experiment 20000496 PARAMETER Experiment Name: At_Guard_Cells_P Parameter: Tissue Value: Guard Cells vs. Leaves
atgcaattgtttctcaaggatatagttccagcggcgcagaacaacatagacacgcgtttcatcatcctcgacaaagccaaatcgtctgcggcaaacgggaagaattattgtattgcgttggcggcggatgaaacggctgcggttcacatacagctgtggggagatgagtgcgacgcgttcgaggcaggagatatcgtgaagctcaccaatgggattttctcatacgtgcgtaacagtggacttattctcagagctgggaagcgtgggaagatggagaagatgggagagttcacggttgcgtttgtcgaaacgccaaacattagtgagatccaatggattcctgatcctgagaatcccaaacgctatattcagagcggcgtcgtttcagcttattcccgtatcttccctcctttgccttga

SEQ ID NO: 91019 - protein, 139 aa, Arabidopsis thaliana
  peptide (1)..(139): Ceres Seq. ID no. 12726143
  misc_feature (42)..(107): Pfam Name: OB-fold nucleic acid binding domain Pfam Description: OB-fold nucleic acid binding domain
  misc_feature (1)..(139): Homolog of NCBI NO: 15242865 NR Description: unknown protein; protein id: At5g63690.1 thaliana] >gi|10177050|dbj|BAB10462.1| gene_id:MBK5.17~unknown
  misc_feature (5)..(138): Homolog of NCBI NO: 34898746 NR Description: hypothetical protein~similar to Arabidopsis
  misc_feature (5)..(138): Homolog of NCBI NO: 34898750 NR Description: hypothetical protein~similar to Arabidopsis
  misc_feature (2)..(117): Homolog of NCBI NO: 13129048 NR Description: hypothetical protein MGC2731 [Homo sapiens] Unknown (protein for MGC:2731) [Homo sapiens]
  misc_feature (2)..(117): Homolog of NCBI NO: 28076937 NR Description: RIKEN cDNA 2610036N15 [Mus musculus]
  misc_feature (2)..(117): Homolog of NCBI NO: 34862206 NR Description: similar to RIKEN cDNA 2610036N15 [Rattus
  misc_feature (3)..(117): Homolog of NCBI NO: 30844321 NR Description: RIKEN cDNA 5830411E10 [Mus musculus]
  misc_feature (3)..(117): Homolog of NCBI NO: 26340138 NR Description: unnamed protein product [Mus musculus]
  misc_feature (3)..(117): Homolog of NCBI NO: 16877754 NR Description: Similar to RIKEN cDNA 4930434H03 gene [Homo
  misc_feature (14)..(110): Homolog of NCBI NO: 39585210 NR Description: Hypothetical protein CBG00417 [Caenorhabditis
MQLFLKDIVPAAQNNIDTRFIILDKAKSSAANGKNYCIALAADETAAVHIQLWGDECDAFEAGDIVKLTNGIFSYVRNSGLILRAGKRGKMEKMGEFTVAFVETPNISEIQWIPDPENPKRYIQSGVVSAYSRIFPPLP

SEQ ID NO: 91020 - protein, 70 aa, Arabidopsis thaliana
  peptide (1)..(70): Ceres Seq. ID no. 12726144
MGFSHTCVTVDLFSELGSVGRWRRWESSRLRLSKRQTLVRSNGFLILRIPNAIFRAASFQLIPVSSLLCL

SEQ ID NO: 91021 - DNA, 2063 bp, Arabidopsis thaliana
  misc_feature (1)..(2063): Ceres Seq. ID no. 12726145
  misc_feature: MA Experiment ID: 20000180 Result: Up-regulated in Transcription
  misc_feature: MA Experiment 20000180 PARAMETER Experiment Name: At_Germinating_Seeds_P Parameter: Age (hr) Value: 24 vs. 0
  misc_feature: MA Experiment 20000180 PARAMETER Experiment Name: At_Germinating_Seeds_P Parameter: Tissue Value: Germinating Seeds
  misc_feature: MA Experiment ID: 20000184 Result: Down-regulated in Transcription
  misc_feature: MA Experiment 20000184 PARAMETER Experiment Name: At_Shoots__P Parameter: Age (day) Value: 7
  misc_feature: MA Experiment 20000184 PARAMETER Experiment Name: At_Shoots__P Parameter: Tissue Value: Shoots vs. Whole Plant
  misc_feature: MA Experiment ID: 20000227 Result: Down-regulated in Transcription
  misc_feature: MA Experiment 20000227 PARAMETER Experiment Name: At_Root-Tips-vs-Tops_P Parameter: Tissue Value: Root Tips vs. Root Tops
  misc_feature: MA Experiment ID: 20000234 Result: Down-regulated in Transcription
  misc_feature: MA Experiment 20000234 PARAMETER Experiment Name: At_Siliques_P Parameter: Age (day) Value: 21
  misc_feature: MA Experiment 20000234 PARAMETER Experiment Name: At_Siliques_P Parameter: Organism Value: A. thaliana
  misc_feature: MA Experiment 20000234 PARAMETER Experiment Name: At_Siliques_P Parameter: Plant Line Value: WS
  misc_feature: MA Experiment 20000234 PARAMETER Experiment Name: At_Siliques_P Parameter: Tissue Value: Less Than 5mm Siliques vs. Whole Plant
  misc_feature: MA Experiment ID: 20000235 Result: Down-regulated in Transcription
  misc_feature: MA Experiment 20000235 PARAMETER Experiment Name: At_Siliques_P Parameter: Age (day) Value: 21
  misc_feature: MA Experiment 20000235 PARAMETER Experiment Name: At_Siliques_P Parameter: Organism Value: A. thaliana
  misc_feature: MA Experiment 20000235 PARAMETER Experiment Name: At_Siliques_P Parameter: Plant Line Value: WS
  misc_feature: MA Experiment 20000235 PARAMETER Experiment Name: At_Siliques_P Parameter: Tissue Value: 5-10mm Siliques vs. Whole Plant
  misc_feature: MA Experiment ID: 20000265 Result: Down-regulated in Transcription
  misc_feature: MA Experiment 20000265 PARAMETER Experiment Name: At_Open_Flower_P Parameter: Age (day) Value: 21
  misc_feature: MA Experiment 20000265 PARAMETER Experiment Name: At_Open_Flower_P Parameter: Plant Line Value: WS
  misc_feature: MA Experiment 20000265 PARAMETER Experiment Name: At_Open_Flower_P Parameter: Tissue Value: Closed Flower vs. Whole Plant
  misc_feature: MA Experiment ID: 20000496 Result: Up-regulated in Transcription
  misc_feature: MA Experiment 20000496 PARAMETER Experiment Name: At_Guard_Cells_P Parameter: Harvest Date Value: 7/19/2002
  misc_feature: MA Experiment 20000496 PARAMETER Experiment Name: At_Guard_Cells_P Parameter: Organism Value: Canola
  misc_feature: MA Experiment 20000496 PARAMETER Experiment Name: At_Guard_Cells_P Parameter: Tissue Value: Guard Cells vs. Leaves
  misc_feature: MA Experiment ID: 20001558 Result: Down-regulated in Transcription
  misc_feature: MA Experiment 20001558 PARAMETER Experiment Name: At_Drought_Soil_Dry_P Parameter: Age (day) Value: 27
  misc_feature: MA Experiment 20001558 PARAMETER Experiment Name: At_Drought_Soil_Dry_P Parameter: Organism Value: A. thaliana
  misc_feature: MA Experiment 20001558 PARAMETER Experiment Name: At_Drought_Soil_Dry_P Parameter: Plant Line Value: WS
  misc_feature: MA Experiment 20001558 PARAMETER Experiment Name: At_Drought_Soil_Dry_P Parameter: Post Timepoint (hr) Value: 6
  misc_feature: MA Experiment 20001558 PARAMETER Experiment Name: At_Drought_Soil_Dry_P Parameter: Post-Treatment Value: Re-Water vs. No Drought
  misc_feature: MA Experiment 20001558 PARAMETER Experiment Name: At_Drought_Soil_Dry_P Parameter: Timepoint (day) Value: 13
  misc_feature: MA Experiment 20001558 PARAMETER Experiment Name: At_Drought_Soil_Dry_P Parameter: Treatment Value: Drought vs. No Drought
catttctctcttcaaccccatgttttcgttctcttccgtttagagtgttttcagctcctctatggctcactcggggaacggtgaaagtttccatgatcctcttcgaggattcattcaaagaaattgctttagatggaacaatcagaaattgatcttacaatgtttcatggccttagcttttgtgggaatcacttcgtcaacaactcaaccagatatcgaaggaggagctctgttgcagctcagagattcgcttaatgattcgagcaatcgtctaaaatggacacgcgattttgtgagcccttgctatagttggtcttatgttacctgcagaggccagagtgttgtggctctaaatcttgcctcgagtggattcacaggaacactctctccagctattacaaaactgaagttcttggttaccttagagttacagaacaatagtttatctggtgccttaccagattctcttgggaacatggttaatctacagactttaaacctatcagtgaatagtttcagcggatcgataccagcgagctggagtcagctctcgaatctaaagcacttggatctctcatccaataatttaacaggaagcatcccaacacaattcttctcaatcccaacattcgatttttcaggaactcagcttatatgcggtaaaagtttgaatcagccttgttcttcaagttctcgtcttccagtcacatcctccaagaaaaagctgagagacattactttgactgcaagttgtgttgcttctataatcttattccttggagcaatggttatgtatcatcaccatcgcgtccgcagaaccaaatacgacatcttttttgatgtagctggggaagatgacaggaagatttcctttggacaactaaaacgattctctttacgtgaaatccagctcgcaacagatagtttcaacgagagcaatttgataggacaaggaggatttggtaaagtatacagaggtttgcttccagacaaaacaaaagttgcagtgaaacgccttgcggattacttcagtcctggaggagaagctgctttccaaagagagattcagctcataagcgttgcggttcataaaaatctcttacgccttattggcttctgcacaacttcctctgagagaatccttgtttatccatacatggaaaatcttagtgttgcatatcgactaagagatttgaaagcgggagaggaaggattagactggccaacaaggaagcgtgtagcttttggttcagctcacggtttagagtatctacacgaacattgtaacccgaagatcatacaccgcgatctcaaggctgcaaacatacttttagacaacaattttgagccagttcttggagatttcggtttagctaagcttgtggacacatctctgactcatgtcacaactcaagtccgaggcacaatgggtcacattgcgccagagtatctctgcacaggaaaatcatctgaaaaaaccgatgtttttggttacggtataacgcttcttgagcttgttactggtcagcgcgcaatcgatttttcacgcttggaagaagaggaaaatattctcttgcttgatcatataaagaagttgcttagagaacagagacttagagacattgttgatagcaatttgactacatatgactccaaagaagttgaaacaatcgttcaagtggctcttctctgcacacaaggctcaccagaagatagaccagcgatgtctgaagtggtcaaaatgcttcaagggactggtggtttggctgagaaatggactgaatgggaacaacttgaagaagttaggaacaaagaagcattgttgcttccgactttaccggctacttgggatgaagaagaaaccaccgttgatcaagaatctatccgattatcgacagcaagatgaagaagaaacagagagagaaagatatctatgaaaacaaacttgcattacagaagataaacttagaaagtattttaagctgctaattgtattgaaccaggtggggaaaacgaagcaaacacacaacgttgatttgtgtaatagatgatatgatatacat

SEQ ID NO: 91022 - protein, 614 aa, Arabidopsis thaliana
  peptide (1)..(614): Ceres Seq. ID no. 12726146
  misc_feature (36)..(614): Homolog of NCBI NO: 10177052 NR Description: receptor-like protein kinase [Arabidopsis
  misc_feature (92)..(614): Homolog of NCBI NO: 11358729 NR Description: protein serine/threonine kinase-like protein -
  misc_feature (92)..(614): Homolog of NCBI NO: 22326703 NR Description: protein serine/threonine kinase-like protein; id: At5g10290.1, supported by cDNA: gi_20260259 [Arabidopsis
  misc_feature (92)..(614): Homolog of NCBI NO: 20260260 NR Description: protein serine/threonine kinase-like protein
  misc_feature (97)..(614): Homolog of NCBI NO: 15238386 NR Description: receptor-like protein kinase; protein id:
  misc_feature (51)..(614): Homolog of NCBI NO: 25406123 NR Description: hypothetical protein F14O23.21 [imported] - thaliana >gi|7239510|gb|AAF43236.1|AC012654_20 Contains
  misc_feature (97)..(614): Homolog of NCBI NO: 15217584 NR Description: protein kinase, putative; protein id:
  misc_feature (97)..(614): Homolog of NCBI NO: 15081616 NR Description: At1g71830/F14O23_24 [Arabidopsis thaliana]
  misc_feature (97)..(614): Homolog of NCBI NO: 13897310 NR Description: SERK2 protein [Zea mays]
  misc_feature (97)..(579): Homolog of NCBI NO: 30678986 NR Description: leucine-rich repeat protein kinase family thaliana] >gi|15810409|gb|AAL07092.1| unknown protein
MAHSGNGESFHDPLRGFIQRNCFRWNNQKLILQCFMALAFVGITSSTTQPDIEGGALLQLRDSLNDSSNRLKWTRDFVSPCYSWSYVTCRGQSVVALNLASSGFTGTLSPAITKLKFLVTLELQNNSLSGALPDSLGNMVNLQTLNLSVNSFSGSIPASWSQLSNLKHLDLSSNNLTGSIPTQFFSIPTFDFSGTQLICGKSLNQPCSSSSRLPVTSSKKKLRDITLTASCVASIILFLGAMVMYHHHRVRRTKYDIFFDVAGEDDRKISFGQLKRFSLREIQLATDSFNESNLIGQGGFGKVYRGLLPDKTKVAVKRLADYFSPGGEAAFQREIQLISVAVHKNLLRLIGFCTTSSERILVYPYMENLSVAYRLRDLKAGEEGLDWPTRKRVAFGSAHGLEYLHEHCNPKIIHRDLKAANILLDNNFEPVLGDFGLAKLVDTSLTHVTTQVRGTMGHIAPEYLCTGKSSEKTDVFGYGITLLELVTGQRAIDFSRLEEEENILLLDHIKKLLREQRLRDIVDSNLTTYDSKEVETIVQVALLCTQGSPEDRPAMSEVVKMLQGTGGLAEKWTEWEQLEEVRNKEALLLPTLPATWDEEETTVDQESIRLSTAR

SEQ ID NO: 91023 - protein, 579 aa, Arabidopsis thaliana
  peptide (1)..(579): Ceres Seq. ID no. 12726147
  misc_feature (1)..(579): Homolog of NCBI NO: 10177052 NR Description: receptor-like protein kinase [Arabidopsis
  misc_feature (57)..(579): Homolog of NCBI NO: 11358729 NR Description: protein serine/threonine kinase-like protein -
  misc_feature (57)..(579): Homolog of NCBI NO: 22326703 NR Description: protein serine/threonine kinase-like protein; id: At5g10290.1, supported by cDNA: gi_20260259 [Arabidopsis
  misc_feature (57)..(579): Homolog of NCBI NO: 20260260 NR Description: protein serine/threonine kinase-like protein
  misc_feature (62)..(579): Homolog of NCBI NO: 15238386 NR Description: receptor-like protein kinase; protein id:
  misc_feature (16)..(579): Homolog of NCBI NO: 25406123 NR Description: hypothetical protein F14O23.21 [imported] - thaliana >gi|7239510|gb|AAF43236.1|AC012654_20 Contains
  misc_feature (62)..(579): Homolog of NCBI NO: 15217584 NR Description: protein kinase, putative; protein id:
  misc_feature (62)..(579): Homolog of NCBI NO: 15081616 NR Description: At1g71830/F14O23_24 [Arabidopsis thaliana]
  misc_feature (62)..(579): Homolog of NCBI NO: 13897310 NR Description: SERK2 protein [Zea mays]
  misc_feature (62)..(544): Homolog of NCBI NO: 30678986 NR Description: leucine-rich repeat protein kinase family thaliana] >gi|15810409|gb|AAL07092.1| unknown protein
MALAFVGITSSTTQPDIEGGALLQLRDSLNDSSNRLKWTRDFVSPCYSWSYVTCRGQSVVALNLASSGFTGTLSPAITKLKFLVTLELQNNSLSGALPDSLGNMVNLQTLNLSVNSFSGSIPASWSQLSNLKHLDLSSNNLTGSIPTQFFSIPTFDFSGTQLICGKSLNQPCSSSSRLPVTSSKKKLRDITLTASCVASIILFLGAMVMYHHHRVRRTKYDIFFDVAGEDDRKISFGQLKRFSLREIQLATDSFNESNLIGQGGFGKVYRGLLPDKTKVAVKRLADYFSPGGEAAFQREIQLISVAVHKNLLRLIGFCTTSSERILVYPYMENLSVAYRLRDLKAGEEGLDWPTRKRVAFGSAHGLEYLHEHCNPKIIHRDLKAANILLDNNFEPVLGDFGLAKLVDTSLTHVTTQVRGTMGHIAPEYLCTGKSSEKTDVFGYGITLLELVTGQRAIDFSRLEEEENILLLDHIKKLLREQRLRDIVDSNLTTYDSKEVETIVQVALLCTQGSPEDRPAMSEVVKMLQGTGGLAEKWTEWEQLEEVRNKEALLLPTLPATWDEEETTVDQESIRLSTAR

SEQ ID NO: 91024 - protein, 476 aa, Arabidopsis thaliana
  peptide (1)..(476): Ceres Seq. ID no. 12726148
  misc_feature (1)..(476): Homolog of NCBI NO: 10177052 NR Description: receptor-like protein kinase [Arabidopsis
  misc_feature (1)..(476): Homolog of NCBI NO: 11358729 NR Description: protein serine/threonine kinase-like protein -
  misc_feature (1)..(476): Homolog of NCBI NO: 22326703 NR Description: protein serine/threonine kinase-like protein; id: At5g10290.1, supported by cDNA: gi_20260259 [Arabidopsis
  misc_feature (1)..(476): Homolog of NCBI NO: 20260260 NR Description: protein serine/threonine kinase-like protein
  misc_feature (1)..(476): Homolog of NCBI NO: 15238386 NR Description: receptor-like protein kinase; protein id:
  misc_feature (1)..(476): Homolog of NCBI NO: 25406123 NR Description: hypothetical protein F14O23.21 [imported] - thaliana >gi|7239510|gb|AAF43236.1|AC012654_20 Contains
  misc_feature (1)..(476): Homolog of NCBI NO: 15217584 NR Description: protein kinase, putative; protein id:
  misc_feature (1)..(476): Homolog of NCBI NO: 15081616 NR Description: At1g71830/F14O23_24 [Arabidopsis thaliana]
  misc_feature (1)..(476): Homolog of NCBI NO: 13897310 NR Description: SERK2 protein [Zea mays]
  misc_feature (1)..(441): Homolog of NCBI NO: 30678986 NR Description: leucine-rich repeat protein kinase family thaliana] >gi|15810409|gb|AAL07092.1| unknown protein
MVNLQTLNLSVNSFSGSIPASWSQLSNLKHLDLSSNNLTGSIPTQFFSIPTFDFSGTQLICGKSLNQPCSSSSRLPVTSSKKKLRDITLTASCVASIILFLGAMVMYHHHRVRRTKYDIFFDVAGEDDRKISFGQLKRFSLREIQLATDSFNESNLIGQGGFGKVYRGLLPDKTKVAVKRLADYFSPGGEAAFQREIQLISVAVHKNLLRLIGFCTTSSERILVYPYMENLSVAYRLRDLKAGEEGLDWPTRKRVAFGSAHGLEYLHEHCNPKIIHRDLKAANILLDNNFEPVLGDFGLAKLVDTSLTHVTTQVRGTMGHIAPEYLCTGKSSEKTDVFGYGITLLELVTGQRAIDFSRLEEEENILLLDHIKKLLREQRLRDIVDSNLTTYDSKEVETIVQVALLCTQGSPEDRPAMSEVVKMLQGTGGLAEKWTEWEQLEEVRNKEALLLPTLPATWDEEETTVDQESIRLSTAR

SEQ ID NO: 91025 - DNA, 2665 bp, Arabidopsis thaliana
  misc_feature (1)..(2665): Ceres Seq. ID no. 12726173
  misc_feature: MA Experiment ID: 20000179 Result: Down-regulated in Transcription
  misc_feature: MA Experiment 20000179 PARAMETER Experiment Name: At_Germinating_Seeds_P Parameter: Age (hr) Value: 6 vs. 0
  misc_feature: MA Experiment 20000179 PARAMETER Experiment Name: At_Germinating_Seeds_P Parameter: Tissue Value: Germinating Seeds
  misc_feature: MA Experiment ID: 20000180 Result: Down-regulated in Transcription
  misc_feature: MA Experiment 20000180 PARAMETER Experiment Name: At_Germinating_Seeds_P Parameter: Age (hr) Value: 24 vs. 0
  misc_feature: MA Experiment 20000180 PARAMETER Experiment Name: At_Germinating_Seeds_P Parameter: Tissue Value: Germinating Seeds
  misc_feature: MA Experiment ID: 20000235 Result: Down-regulated in Transcription
  misc_feature: MA Experiment 20000235 PARAMETER Experiment Name: At_Siliques_P Parameter: Age (day) Value: 21
  misc_feature: MA Experiment 20000235 PARAMETER Experiment Name: At_Siliques_P Parameter: Organism Value: A. thaliana
  misc_feature: MA Experiment 20000235 PARAMETER Experiment Name: At_Siliques_P Parameter: Plant Line Value: WS
  misc_feature: MA Experiment 20000235 PARAMETER Experiment Name: At_Siliques_P Parameter: Tissue Value: 5-10mm Siliques vs. Whole Plant
  misc_feature: MA Experiment ID: 20000265 Result: Down-regulated in Transcription
  misc_feature: MA Experiment 20000265 PARAMETER Experiment Name: At_Open_Flower_P Parameter: Age (day) Value: 21
  misc_feature: MA Experiment 20000265 PARAMETER Experiment Name: At_Open_Flower_P Parameter: Plant Line Value: WS
  misc_feature: MA Experiment 20000265 PARAMETER Experiment Name: At_Open_Flower_P Parameter: Tissue Value: Closed Flower vs. Whole Plant
  misc_feature: MA Experiment ID: 20000794 Result: Down-regulated in Transcription
  misc_feature: MA Experiment 20000794 PARAMETER Experiment Name: At_Petals_P Parameter: Age (day) Value: 23-25 days
  misc_feature: MA Experiment 20000794 PARAMETER Experiment Name: At_Petals_P Parameter: Plant Line Value: WS
  misc_feature: MA Experiment 20000794 PARAMETER Experiment Name: At_Petals_P Parameter: Tissue Value: Petals vs. Whole plant
ctagaggagtcattgttttcagtttttcaaaacaaaattttattcatacattcagatctgaaggagaactcttttgaacacatgggaatacacttgggagagattggtattgttctctttccttggtttctgtggttaagtttattcctaagttgtggctatgcagctataactatttcaagtcctttgacattgggacaaactctgagttcccctggtggattttatgagttaggattcttcagtcctaacaactctcagaatcagtatgtagggatctggttcaagaaaattacaccacgggtggttgtgtgggtggctaacagagaaaagccgatcacaacccctgtggcaaatcttactatcagcagaaatggtagtcttattttgctagacagtagtaaaaatgttgtttggtcaaccagaagaccttccatatctaataagtgtcatgcaaagctcttagatacaggaaatcttgtcatagtagatgatgtttcagaaaatcttttgtggcaaagttttgagaatcctggtgatactatgctgccttactcatcgctgatgtacaaccttgccactggggagaagcgagtattatcttcgtggaaaagccacactgatccatcccctggtgatttcgtagttcgactaacaccacaagtgccagcacagatcgttactatgagaggctcatcggtttataagagaagcggtccatgggctaagaccggtttcactggcgtaccactaatggatgaatcatacacaagtcctttcagcctttcccaagatgtaggaaatggaacagggctcttctcttatttacagagaagttctgaacttacacgagttatcataacatcagagggatatctaaagacttttcggtacaatgggacaggctgggttctggactttatcactccagcaaatttatgtgatttgtatggtgcatgtggaccttttgggctgtgtgtgacgtccaatcccacaaagtgtaaatgcatgaaagggtttgtaccaaaatacaaggaggagtggaagcgcgggaacatgacttctggatgtatgcgacgtacagaattatcttgtcaggcaaacttatctacaaagacacaaggaaaaggtgtagacgtcttctatcgtctggccaatgtaaagcctccggatctctacgaatatgcaagctttgtggatgcagatcaatgccaccagggttgtctcagcaattgctcttgctctgcttttgcgtatattactggaattggttgtttgctttggaatcatgagctaatagacacaattagatattccgttggaggagagtttctttccattcgtcttgcaagttcagaactggctggaagcaggaggaccaagattattgttggtagtatcagcctttccatttttgtgattttggcctttggctcatataagtactggagatacagagcaaaacaaaatgttgggccaacttgggcattcttcaacaattcacaagattcatggaaaaatggtttggaaccacaagaaatctcaggtttaacattctttgagatgaataccatacgagctgctaccaataacttcaatgtctcaaacaaactcggtcaaggtggatttggtccagtttataagggaacactgtcagacaagaaggatatagccgttaaacgcctttctagcagctctgggcagggtacagaagagttcatgaacgaaataaaactcatctcaaaattacaacacagaaacttggttcgacttttgggatgctgcattgatggagaagaaaaactactaatttatgagtttctagtgaacaaaagcctcgacacttttctctttgatttgacgctaaagcttcagattgattggcctaagaggttcaacatcattcaaggtgtttcacgtgggcttctctatctccatcgtgactcttgcatgagggtcatacatcgagatctgaaggtcagcaacattctcttggacgacaaaatgaacccaaaaatatcagatttcggattggctcggatgtttcaaggaacccaacatcaagacaacactcgtaaggttgttggaactctaggatacatgtctcctgagtatgcatggacaggaatgttctcagagaagtccgacatatatgcttttggagttctcctgttagaaatcataagtgggaagaagatttcaagcttttgctgtggagaggaaggcaaaacccttcttggacatgcatgggaatgttggctcgagaccggtggagtggatctattggatgaagatattagcagctcgtgttctccagttgaagttgaagtcgctcgatgtgttcagattggtctactctgcatccaacagcaagctgttgacagaccaaacatagcacaagtagtgaccatgatgacaagtgcaacagatcttccgagaccaaaacaaccactctttgcattgcagattcaagatcaagagagtgttgtgtcagtctcaaagtctgtgaatcatgttacacaaactgagatatatgggcgataaagtttgctttattatgtattaactgcagactgaaatgtaataccagcaatagagtgtaatcacttaatttaaattgtacattacgatagtttggttgttaataaatatgatgttaagaaag

SEQ ID NO: 91026 - protein, 847 aa, Arabidopsis thaliana
  peptide (1)..(847): Ceres Seq. ID no. 12726174
  misc_feature (100)..(210): Pfam Name: D-mannose binding lectin Pfam Description: D-mannose binding lectin
  misc_feature (35)..(847): Homolog of NCBI NO: 18407151 NR Description: expressed protein; protein id: At1g61380.1, by cDNA: 13461., supported by cDNA: gi_19699074 [Arabidopsis >gi|3056592|gb|AAC13903.1|AAC13903 T1F9.13 [Arabidopsis thaliana]
  misc_feature (35)..(847): Homolog of NCBI NO: 21537374 NR Description: receptor kinase, putative [Arabidopsis thaliana]
  misc_feature (30)..(847): Homolog of NCBI NO: 15219917 NR Description: receptor kinase, putative; protein id: At1g61390.1
  misc_feature (32)..(847): Homolog of NCBI NO: 15219933 NR Description: receptor protein kinase (IRK1), putative; protein
  misc_feature (32)..(847): Homolog of NCBI NO: 15219914 NR Description: receptor protein kinase (IRK1), putative; protein
  misc_feature (32)..(847): Homolog of NCBI NO: 15219935 NR Description: receptor kinase, putative; protein id: [Arabidopsis thaliana] >gi|3056580|gb|AAC13891.1|AAC13891 T1F9.1
  misc_feature (278)..(721): Homolog of NCBI NO: 30696575 NR Description: S-locus protein kinase, putative [Arabidopsis
  misc_feature (724)..(847): Homolog of NCBI NO: 30696575 NR Description: S-locus protein kinase, putative [Arabidopsis
  misc_feature (182)..(270): Homolog of NCBI NO: 30696575 NR Description: S-locus protein kinase, putative [Arabidopsis
  misc_feature (64)..(840): Homolog of NCBI NO: 25956275 NR Description: unnamed protein product [Lotus japonicus]
LEESLFSVFQNKILFIHSDLKENSFEHMGIHLGEIGIVLFPWFLWLSLFLSCGYAAITISSPLTLGQTLSSPGGFYELGFFSPNNSQNQYVGIWFKKITPRVVVWVANREKPITTPVANLTISRNGSLILLDSSKNVVWSTRRPSISNKCHAKLLDTGNLVIVDDVSENLLWQSFENPGDTMLPYSSLMYNLATGEKRVLSSWKSHTDPSPGDFVVRLTPQVPAQIVTMRGSSVYKRSGPWAKTGFTGVPLMDESYTSPFSLSQDVGNGTGLFSYLQRSSELTRVIITSEGYLKTFRYNGTGWVLDFITPANLCDLYGACGPFGLCVTSNPTKCKCMKGFVPKYKEEWKRGNMTSGCMRRTELSCQANLSTKTQGKGVDVFYRLANVKPPDLYEYASFVDADQCHQGCLSNCSCSAFAYITGIGCLLWNHELIDTIRYSVGGEFLSIRLASSELAGSRRTKIIVGSISLSIFVILAFGSYKYWRYRAKQNVGPTWAFFNNSQDSWKNGLEPQEISGLTFFEMNTIRAATNNFNVSNKLGQGGFGPVYKGTLSDKKDIAVKRLSSSSGQGTEEFMNEIKLISKLQHRNLVRLLGCCIDGEEKLLIYEFLVNKSLDTFLFDLTLKLQIDWPKRFNIIQGVSRGLLYLHRDSCMRVIHRDLKVSNILLDDKMNPKISDFGLARMFQGTQHQDNTRKVVGTLGYMSPEYAWTGMFSEKSDIYAFGVLLLEIISGKKISSFCCGEEGKTLLGHAWECWLETGGVDLLDEDISSSCSPVEVEVARCVQIGLLCIQQQAVDRPNIAQVVTMMTSATDLPRPKQPLFALQIQDQESVVSVSKSVNHVTQTEIYGR

SEQ ID NO: 91027 - protein, 820 aa, Arabidopsis thaliana; identical to SEQ ID NO: 77556
  peptide (1)..(820): Ceres Seq. ID no. 12726175
  misc_feature (73)..(183): Pfam Name: D-mannose binding lectin Pfam Description: D-mannose binding lectin
  misc_feature (8)..(820): Homolog of NCBI NO: 18407151 NR Description: expressed protein; protein id: At1g61380.1, by cDNA: 13461., supported by cDNA: gi_19699074 [Arabidopsis >gi|3056592|gb|AAC13903.1|AAC13903 T1F9.13 [Arabidopsis thaliana]
  misc_feature (8)..(820): Homolog of NCBI NO: 21537374 NR Description: receptor kinase, putative [Arabidopsis thaliana]
  misc_feature (3)..(820): Homolog of NCBI NO: 15219917 NR Description: receptor kinase, putative; protein id: At1g61390.1
  misc_feature (5)..(820): Homolog of NCBI NO: 15219933 NR Description: receptor protein kinase (IRK1), putative; protein
  misc_feature (5)..(820): Homolog of NCBI NO: 15219914 NR Description: receptor protein kinase (IRK1), putative; protein
  misc_feature (5)..(820): Homolog of NCBI NO: 15219935 NR Description: receptor kinase, putative; protein id: [Arabidopsis thaliana] >gi|3056580|gb|AAC13891.1|AAC13891 T1F9.1
  misc_feature (251)..(694): Homolog of NCBI NO: 30696575 NR Description: S-locus protein kinase, putative [Arabidopsis
  misc_feature (697)..(820): Homolog of NCBI NO: 30696575 NR Description: S-locus protein kinase, putative [Arabidopsis
  misc_feature (155)..(243): Homolog of NCBI NO: 30696575 NR Description: S-locus protein kinase, putative [Arabidopsis
  misc_feature (37)..(813): Homolog of NCBI NO: 25956275 NR Description: unnamed protein product [Lotus japonicus]

SEQ ID NO: 91028 - protein, 666 aa, Arabidopsis thaliana; identical to SEQ ID NO: 85276
  peptide (1)..(666): Ceres Seq. ID no. 12726176
  misc_feature (1)..(666): Homolog of NCBI NO: 18407151 NR Description: expressed protein; protein id: At1g61380.1, by cDNA: 13461., supported by cDNA: gi_19699074 [Arabidopsis >gi|3056592|gb|AAC13903.1|AAC13903 T1F9.13 [Arabidopsis thaliana]
  misc_feature (1)..(666): Homolog of NCBI NO: 21537374 NR Description: receptor kinase, putative [Arabidopsis thaliana]
  misc_feature (1)..(666): Homolog of NCBI NO: 15219917 NR Description: receptor kinase, putative; protein id: At1g61390.1
  misc_feature (1)..(666): Homolog of NCBI NO: 15219933 NR Description: receptor protein kinase (IRK1), putative; protein
  misc_feature (1)..(666): Homolog of NCBI NO: 15219914 NR Description: receptor protein kinase (IRK1), putative; protein
  misc_feature (1)..(666): Homolog of NCBI NO: 15219935 NR Description: receptor kinase, putative; protein id: [Arabidopsis thaliana] >gi|3056580|gb|AAC13891.1|AAC13891 T1F9.1
  misc_feature (97)..(540): Homolog of NCBI NO: 30696575 NR Description: S-locus protein kinase, putative [Arabidopsis
  misc_feature (543)..(666): Homolog of NCBI NO: 30696575 NR Description: S-locus protein kinase, putative [Arabidopsis
  misc_feature (1)..(89): Homolog of NCBI NO: 30696575 NR Description: S-locus protein kinase, putative [Arabidopsis
  misc_feature (1)..(659): Homolog of NCBI NO: 25956275 NR Description: unnamed protein product [Lotus japonicus]

SEQ ID NO: 91029 - DNA, 2827 bp, Arabidopsis thaliana
  misc_feature (1)..(2827): Ceres Seq. ID no. 12726177
  misc_feature: MA Experiment ID: 20000169 Result: Down-regulated in Transcription
  misc_feature: MA Experiment 20000169 PARAMETER Experiment Name: At_100uM_ABA_P Parameter: Age (day) Value: 14
  misc_feature: MA Experiment 20000169 PARAMETER Experiment Name: At_100uM_ABA_P Parameter: Organism Value: A. thaliana
  misc_feature: MA Experiment 20000169 PARAMETER Experiment Name: At_100uM_ABA_P Parameter: Plant Line Value: WS
  misc_feature: MA Experiment 20000169 PARAMETER Experiment Name: At_100uM_ABA_P Parameter: Timepoint (hr) Value: 6
  misc_feature: MA Experiment 20000169 PARAMETER Experiment Name: At_100uM_ABA_P Parameter: Tissue Value: Aerial
  misc_feature: MA Experiment 20000169 PARAMETER Experiment Name: At_100uM_ABA_P Parameter: Treatment Value: 100uM ABA vs. No Treatment
  misc_feature: MA Experiment ID: 20000179 Result: Up-regulated in Transcription
  misc_feature: MA Experiment 20000179 PARAMETER Experiment Name: At_Germinating_Seeds_P Parameter: Age (hr) Value: 6 vs. 0
  misc_feature: MA Experiment 20000179 PARAMETER Experiment Name: At_Germinating_Seeds_P Parameter: Tissue Value: Germinating Seeds
  misc_feature: MA Experiment ID: 20000180 Result: Up-regulated in Transcription
  misc_feature: MA Experiment 20000180 PARAMETER Experiment Name: At_Germinating_Seeds_P Parameter: Age (hr) Value: 24 vs. 0
  misc_feature: MA Experiment 20000180 PARAMETER Experiment Name: At_Germinating_Seeds_P Parameter: Tissue Value: Germinating Seeds
  misc_feature: MA Experiment ID: 20000182 Result: Down-regulated in Transcription
  misc_feature: MA Experiment 20000182 PARAMETER Experiment Name: At_2mM_SA_P Parameter: Age (day) Value: 14
  misc_feature: MA Experiment 20000182 PARAMETER Experiment Name: At_2mM_SA_P Parameter: Organism Value: A. thaliana
  misc_feature: MA Experiment 20000182 PARAMETER Experiment Name: At_2mM_SA_P Parameter: Plant Line Value: WS
  misc_feature: MA Experiment 20000182 PARAMETER Experiment Name: At_2mM_SA_P Parameter: Timepoint (hr) Value: 6
  misc_feature: MA Experiment 20000182 PARAMETER Experiment Name: At_2mM_SA_P Parameter: Tissue Value: Aerial
  misc_feature: MA Experiment 20000182 PARAMETER Experiment Name: At_2mM_SA_P Parameter: Treatment Value: 2mM SA vs. No Treatment
  misc_feature: MA Experiment ID: 20000184 Result: Up-regulated in Transcription
  misc_feature: MA Experiment 20000184 PARAMETER Experiment Name: At_Shoots__P Parameter: Age (day) Value: 7
  misc_feature: MA Experiment 20000184 PARAMETER Experiment Name: At_Shoots__P Parameter: Tissue Value: Shoots vs. Whole Plant
  misc_feature: MA Experiment ID: 20000185 Result: Up-regulated in Transcription
  misc_feature: MA Experiment 20000185 PARAMETER Experiment Name: At_Roots__P Parameter: Age (day) Value: 7 vs. 21
  misc_feature: MA Experiment 20000185 PARAMETER Experiment Name: At_Roots__P Parameter: Organism Value: A. thaliana
  misc_feature: MA Experiment 20000185 PARAMETER Experiment Name: At_Roots__P Parameter: Tissue Value: Roots vs. Whole Plant
  misc_feature: MA Experiment ID: 20000234 Result: Up-regulated in Transcription
  misc_feature: MA Experiment 20000234 PARAMETER Experiment Name: At_Siliques_P Parameter: Age (day) Value: 21
  misc_feature: MA Experiment 20000234 PARAMETER Experiment Name: At_Siliques_P Parameter: Organism Value: A. thaliana
  misc_feature: MA Experiment 20000234 PARAMETER Experiment Name: At_Siliques_P Parameter: Plant Line Value: WS
  misc_feature: MA Experiment 20000234 PARAMETER Experiment Name: At_Siliques_P Parameter: Tissue Value: Less Than 5mm Siliques vs. Whole Plant
  misc_feature: MA Experiment ID: 20000264 Result: Up-regulated in Transcription
  misc_feature: MA Experiment 20000264 PARAMETER Experiment Name: At_Open_Flower_P Parameter: Age (day) Value: 21
  misc_feature: MA Experiment 20000264 PARAMETER Experiment Name: At_Open_Flower_P Parameter: Plant Line Value: WS
  misc_feature: MA Experiment 20000264 PARAMETER Experiment Name: At_Open_Flower_P Parameter: Tissue Value: Open Flower vs. Whole Plant
  misc_feature: MA Experiment ID: 20000265 Result: Up-regulated in Transcription
  misc_feature: MA Experiment 20000265 PARAMETER Experiment Name: At_Open_Flower_P Parameter: Age (day) Value: 21
  misc_feature: MA Experiment 20000265 PARAMETER Experiment Name: At_Open_Flower_P Parameter: Plant Line Value: WS
  misc_feature: MA Experiment 20000265 PARAMETER Experiment Name: At_Open_Flower_P Parameter: Tissue Value: Closed Flower vs. Whole Plant
  misc_feature: MA Experiment ID: 20000286 Result: Up-regulated in Transcription
  misc_feature: MA Experiment 20000286 PARAMETER Experiment Name: At_Open_Flower_P Parameter: Age (day) Value: 21
  misc_feature: MA Experiment 20000286 PARAMETER Experiment Name: At_Open_Flower_P Parameter: Plant Line Value: WS
  misc_feature: MA Experiment 20000286 PARAMETER Experiment Name: At_Open_Flower_P Parameter: Tissue Value: Half Open vs. Whole Plant
  misc_feature: MA Experiment ID: 20000438 Result: Up-regulated in Transcription
  misc_feature: MA Experiment 20000438 PARAMETER Experiment Name: At_Shoots__P Parameter: Age (day) Value: 14
  misc_feature: MA Experiment 20000438 PARAMETER Experiment Name: At_Shoots__P Parameter: Tissue Value: Shoots vs. Whole Plant
  misc_feature: MA Experiment ID: 20000439 Result: Up-regulated in Transcription
  misc_feature: MA Experiment 20000439 PARAMETER Experiment Name: At_Roots__P Parameter: Age (day) Value: 14 vs. 21
  misc_feature: MA Experiment 20000439 PARAMETER Experiment Name: At_Roots__P Parameter: Organism Value: A. thaliana
  misc_feature: MA Experiment 20000439 PARAMETER Experiment Name: At_Roots__P Parameter: Tissue Value: Roots vs. Whole Plant
  misc_feature: MA Experiment ID: 20000496 Result: Up-regulated in Transcription
  misc_feature: MA Experiment 20000496 PARAMETER Experiment Name: At_Guard_Cells_P Parameter: Harvest Date Value: 7/19/2002
  misc_feature: MA Experiment 20000496 PARAMETER Experiment Name: At_Guard_Cells_P Parameter: Organism Value: Canola
  misc_feature: MA Experiment 20000496 PARAMETER Experiment Name: At_Guard_Cells_P Parameter: Tissue Value: Guard Cells vs. Leaves
  misc_feature: MA Experiment ID: 20001247 Result: Down-regulated in Transcription
  misc_feature: MA Experiment 20001247 PARAMETER Experiment Name: At_Far-red-induction_P Parameter: Age (day) Value: 7
  misc_feature: MA Experiment 20001247 PARAMETER Experiment Name: At_Far-red-induction_P Parameter: Light Value: Far-red vs. White
  misc_feature: MA Experiment 20001247 PARAMETER Experiment Name: At_Far-red-induction_P Parameter: Organism Value: A. thaliana
  misc_feature: MA Experiment 20001247 PARAMETER Experiment Name: At_Far-red-induction_P Parameter: Plant Line Value: Columbia
  misc_feature: MA Experiment 20001247 PARAMETER Experiment Name: At_Far-red-induction_P Parameter: Timepoint (hr) Value: 1
  misc_feature: MA Experiment 20001247 PARAMETER Experiment Name: At_Far-red-induction_P Parameter: Tissue Value: Whole Plant
  misc_feature: MA Experiment ID: 20001248 Result: Down-regulated in Transcription
  misc_feature: MA Experiment 20001248 PARAMETER Experiment Name: At_Far-red-induction_P Parameter: Age (day) Value: 7
  misc_feature: MA Experiment 20001248 PARAMETER Experiment Name: At_Far-red-induction_P Parameter: Light Value: Far-red vs. White
  misc_feature: MA Experiment 20001248 PARAMETER Experiment Name: At_Far-red-induction_P Parameter: Organism Value: A. thaliana
  misc_feature: MA Experiment 20001248 PARAMETER Experiment Name: At_Far-red-induction_P Parameter: Plant Line Value: Columbia
  misc_feature: MA Experiment 20001248 PARAMETER Experiment Name: At_Far-red-induction_P Parameter: Timepoint (hr) Value: 4
  misc_feature: MA Experiment 20001248 PARAMETER Experiment Name: At_Far-red-induction_P Parameter: Tissue Value: Whole Plant
  misc_feature: MA Experiment ID: 20001450 Result: Down-regulated in Transcription
  misc_feature: MA Experiment 20001450 PARAMETER Experiment Name: At_Far-red-induction_P Parameter: Age (day) Value: 7
  misc_feature: MA Experiment 20001450 PARAMETER Experiment Name: At_Far-red-induction_P Parameter: Light Value: Far-red vs. White
  misc_feature: MA Experiment 20001450 PARAMETER Experiment Name: At_Far-red-induction_P Parameter: Organism Value: A. thaliana
  misc_feature: MA Experiment 20001450 PARAMETER Experiment Name: At_Far-red-induction_P Parameter: Plant Line Value: Columbia
  misc_feature: MA Experiment 20001450 PARAMETER Experiment Name: At_Far-red-induction_P Parameter: Timepoint (hr) Value: 8
  misc_feature: MA Experiment 20001450 PARAMETER Experiment Name: At_Far-red-induction_P Parameter: Tissue Value: Whole Plant
  misc_feature: MA Experiment ID: 20001451 Result: Down-regulated in Transcription
  misc_feature: MA Experiment 20001451 PARAMETER Experiment Name: At_Far-red-induction_P Parameter: Age (day) Value: 7
  misc_feature: MA Experiment 20001451 PARAMETER Experiment Name: At_Far-red-induction_P Parameter: Light Value: Far-red vs. White
  misc_feature: MA Experiment 20001451 PARAMETER Experiment Name: At_Far-red-induction_P Parameter: Organism Value: A. thaliana
  misc_feature: MA Experiment 20001451 PARAMETER Experiment Name: At_Far-red-induction_P Parameter: Plant Line Value: Columbia
  misc_feature: MA Experiment 20001451 PARAMETER Experiment Name: At_Far-red-induction_P Parameter: Timepoint (hr) Value: 24
  misc_feature: MA Experiment 20001451 PARAMETER Experiment Name: At_Far-red-induction_P Parameter: Tissue Value: Whole Plant
  misc_feature: MA Experiment ID: 20001911 Result: Down-regulated in Transcription
  misc_feature: MA Experiment 20001911 PARAMETER Experiment Name: At_Drought_Reproduction_P Parameter: Age (day) Value: 40
  misc_feature: MA Experiment 20001911 PARAMETER Experiment Name: At_Drought_Reproduction_P Parameter: Organism Value: A. thaliana
  misc_feature: MA Experiment 20001911 PARAMETER Experiment Name: At_Drought_Reproduction_P Parameter: Plant Line Value: WS
  misc_feature: MA Experiment 20001911 PARAMETER Experiment Name: At_Drought_Reproduction_P Parameter: Timepoint (day) Value: 10
  misc_feature: MA Experiment 20001911 PARAMETER Experiment Name: At_Drought_Reproduction_P Parameter: Tissue Value: Flowers
  misc_feature: MA Experiment 20001911 PARAMETER Experiment Name: At_Drought_Reproduction_P Parameter: Treatment Value: Drought vs. No Drought
aagccgctcgttcttcgagacaaaacacactacactctttctctctcactcactcttcatctcttttcttctttctctctctcctaaaaatccgacgaaattatgattcactttaccttttaatcaggaatatccctgtttcacccttcttcttcttcttcttcttcttcttcctcgtgttttttttccataacattccctctgaatcttcgttttttattggaaagaaacaatctaatccaagttcaagggttttctcatcttcagtggctgaagttatgagctttacaagatgggaagtgttctttggtctctctgttttagccttgacaatgcctttctcagctggagttactaatctacgagatgtttcggcgattaataacttgtatatcactttgggagcaccatctctacatcattggcttgcttttggaggagacccttgtggagaaaagtggcaaggtgtggtgtgtgactcctcaaacatcacagaaataaggatacctggcatgaaggtaggtggaggcttaagtgatactctggctgatttttcatctatccaagtcatggacttcagtagcaatcatatttcagggacaattccgcaggctttgccttcttccatccgaaacctatctctctcaagcaatcgcttcactgggaacattccctttacattgtcctttctatccgatttgtctgaactgtcattgggaagcaatcttctatcaggagagataccagattactttcagcagctatcaaaactgacaaaactggacttatcgtctaacatactggaggggcatttaccttcttccatgggagacttagcttctcttaagatattgtatttgcaggacaacaagctcacaggaacacttgatgttatagaggatcttttcttaaccgatttgaatgtagaaaacaacttattctcgggacctataccgccaaatctattgaaaattccaaacttcaaaaaagatggaactccgttcaatacatcgattataacaccaccgcctccgcctgtggttgatcctcctcccgctactcaccgtgctcctcctgttccccgtatccctcctgtttctggtgttcccccagcaccttttgctccttttgctccactgcaaccacaacaacatccaccaccatcaccacctctggtctggtcaccaccttcttctgataatggaggaggagatccctggaactctgtgtcagggcaacctaccttgcaaatatcacctccttcaggttcaggatcaggaaaattctggtccactcaaagaatcattctagtagtttcttcagtggccataattgttcttgtatccggtttgtgtgttacactttggagatgttgcagaagtaaaatatataaccgatattacagtggagctcgtaaagatttacaacgaccatacttcaataagcctccatctcaaccaacccccactatgggaaaagtttctcgggagcctatggttaagcctttcgatggatatggagctggagacaggaaatatgggtatccaatgccacagcgggctgaagagagccggagagcaatgcctcctacttcatattataataaggatgttaatacacctcaaaagccgctgcaacaaccaccgaggcagttccagtccaatgatactgcttcaaagagagcggctcatttccccccgggcttgaattcctcatcttctgctactgttttcaccattgcttcacttcagcaatacacaaataatttctcagaagagaatataatcggggaagggtcgattggtaatgtctacagagctgagcttcgtcatggaaagtttcttgcggtgaagaagctgagcaataccatcaacagaacacagagtgacggcgaattcctcaatctagtctccaatgtgttgaagcttaaacgcggtcatatattggagcttcttggttactgtaacgagtttggtcaaaggttacttgtgtatgagtactgtcctaatggatcacttcaagatgcactacatttggatcgcaagttgcacaagaagctcacttggaatgtacgtataaatattgcattaggagcttcaaaggcattgcagtttcttcatgaggtatgtcaaccgccggttgttcaccagaatttcaagtcttccaaggttcttcttgatggaaagctctcagtacgtgttgcagacagcggtttggcttatatgttaccaccacgcccaacgagtcagatggcgggttatgccgctcctgaggttgagtatggaagctacacttgtcagagcgacgtatttagccttggggttgtaatgttagaactgctcactggacgcagaccatttgacaggacaaggccgaggggacatcaaacactagctcagtgggcgattcctcggcttcatgacatcgatgcgttgacaagaatggttgatccgtcattacacggagcgtatccaatgaaatcattgtcacgttttgcagatatcatatcacgttcactgcagatggaaccaggatttagaccgccgatatcagaaatagtccaagatcttcaacatatgatctaagatacacaaccttggactaagacgcagaagcaatagtttattgtcagattcttgttctttgtcctttgatgaatgaaagtatttcttttgtattataataacactttatgtatgttgttggctgtatgaaatgagctatgggatcatcattatgtaaccccaatcccattaccggctcaaacattattcaccaacctgatcatgtatttagattctattttctgaaaaggataaacattttt

SEQ ID NO: 91030 - protein, 860 aa, Arabidopsis thaliana; identical to SEQ ID NO: 46832
  peptide (1)..(860): Ceres Seq. ID no. 12726178
  misc_feature (326)..(860): Homolog of NCBI NO: 1931637 NR Description: receptor-associated kinase isolog; 3024-808
  misc_feature (101)..(397): Homolog of NCBI NO: 25411997 NR Description: probable LRR receptor protein kinase [imported] -
  misc_feature (577)..(860): Homolog of NCBI NO: 25411997 NR Description: probable LRR receptor protein kinase [imported] -
  misc_feature (500)..(860): Homolog of NCBI NO: 29367551 NR Description: putative leucine-rich repeat transmembrane
  misc_feature (115)..(355): Homolog of NCBI NO: 29367551 NR Description: putative leucine-rich repeat transmembrane
  misc_feature (537)..(860): Homolog of NCBI NO: 7489783 NR Description: leucine-rich repeat transmembrane protein kinase
  misc_feature (122)..(354): Homolog of NCBI NO: 7489783 NR Description: leucine-rich repeat transmembrane protein kinase
  misc_feature (537)..(860): Homolog of NCBI NO: 7489784 NR Description: leucine-rich repeat transmembrane protein kinase
  misc_feature (113)..(354): Homolog of NCBI NO: 7489784 NR Description: leucine-rich repeat transmembrane protein kinase
  misc_feature (500)..(860): Homolog of NCBI NO: 15217283 NR Description: Putative leucine-rich repeat transmembrane

SEQ ID NO: 91031 - protein, 768 aa, Arabidopsis thaliana; identical to SEQ ID NO: 46833
  peptide (1)..(768): Ceres Seq. ID no. 12726179
  misc_feature (234)..(768): Homolog of NCBI NO: 1931637 NR Description: receptor-associated kinase isolog; 3024-808
  misc_feature (9)..(305): Homolog of NCBI NO: 25411997 NR Description: probable LRR receptor protein kinase [imported] -
  misc_feature (485)..(768): Homolog of NCBI NO: 25411997 NR Description: probable LRR receptor protein kinase [imported] -
  misc_feature (408)..(768): Homolog of NCBI NO: 29367551 NR Description: putative leucine-rich repeat transmembrane
  misc_feature (23)..(263): Homolog of NCBI NO: 29367551 NR Description: putative leucine-rich repeat transmembrane
  misc_feature (445)..(768): Homolog of NCBI NO: 7489783 NR Description: leucine-rich repeat transmembrane protein kinase
  misc_feature (30)..(262): Homolog of NCBI NO: 7489783 NR Description: leucine-rich repeat transmembrane protein kinase
  misc_feature (445)..(768): Homolog of NCBI NO: 7489784 NR Description: leucine-rich repeat transmembrane protein kinase
  misc_feature (21)..(262): Homolog of NCBI NO: 7489784 NR Description: leucine-rich repeat transmembrane protein kinase
  misc_feature (408)..(768): Homolog of NCBI NO: 15217283 NR Description: Putative leucine-rich repeat transmembrane

SEQ ID NO: 91032 - protein, 750 aa, Arabidopsis thaliana; identical to SEQ ID NO: 46834
  peptide (1)..(750): Ceres Seq. ID no. 12726180
  misc_feature (216)..(750): Homolog of NCBI NO: 1931637 NR Description: receptor-associated kinase isolog; 3024-808
  misc_feature (1)..(287): Homolog of NCBI NO: 25411997 NR Description: probable LRR receptor protein kinase [imported] -
  misc_feature (467)..(750): Homolog of NCBI NO: 25411997 NR Description: probable LRR receptor protein kinase [imported] -
  misc_feature (390)..(750): Homolog of NCBI NO: 29367551 NR Description: putative leucine-rich repeat transmembrane
  misc_feature (5)..(245): Homolog of NCBI NO: 29367551 NR Description: putative leucine-rich repeat transmembrane
  misc_feature (427)..(750): Homolog of NCBI NO: 7489783 NR Description: leucine-rich repeat transmembrane protein kinase
  misc_feature (12)..(244): Homolog of NCBI NO: 7489783 NR Description: leucine-rich repeat transmembrane protein kinase
  misc_feature (427)..(750): Homolog of NCBI NO: 7489784 NR Description: leucine-rich repeat transmembrane protein kinase
  misc_feature (3)..(244): Homolog of NCBI NO: 7489784 NR Description: leucine-rich repeat transmembrane protein kinase
  misc_feature (390)..(750): Homolog of NCBI NO: 15217283 NR Description: Putative leucine-rich repeat transmembrane

SEQ ID NO: 91033 - DNA, 562 bp, Arabidopsis thaliana
  misc_feature (1)..(562): Ceres Seq. ID no. 12726188
  misc_feature: MA Experiment ID: 108433 Result: Down-regulated in Transcription
  misc_feature: MA Experiment 108433 PARAMETER Experiment Name: At_rhl_Mutant2_cDNA_P Parameter: Age (day) Value: 7
  misc_feature: MA Experiment 108433 PARAMETER Experiment Name: At_rhl_Mutant2_cDNA_P Parameter: Organism Value: A. thaliana
  misc_feature: MA Experiment 108433 PARAMETER Experiment Name: At_rhl_Mutant2_cDNA_P Parameter: Plant Line Value: rhl Mutant vs. wt landsburg
  misc_feature: MA Experiment 108433 PARAMETER Experiment Name: At_rhl_Mutant2_cDNA_P Parameter: Tissue Value: Roots
  misc_feature: MA Experiment ID: 108435 Result: Down-regulated in Transcription
  misc_feature: MA Experiment 108435 PARAMETER Experiment Name: At_stm_Mutants_cDNA_P Parameter: Plant Line Value: wt Landsburg vs stm
  misc_feature: MA Experiment 108435 PARAMETER Experiment Name: At_stm_Mutants_cDNA_P Parameter: Tissue Value: Shoot Apical Meristem Region
  misc_feature: MA Experiment ID: 108461 Result: Up-regulated in Transcription
  misc_feature: MA Experiment 108461 PARAMETER Experiment Name: At_Germinating_Seeds_cDNA_P Parameter: Age (day) Value: 1 vs. 0
  misc_feature: MA Experiment 108461 PARAMETER Experiment Name: At_Germinating_Seeds_cDNA_P Parameter: Tissue Value: Germinating Seeds
  misc_feature: MA Experiment ID: 108462 Result: Up-regulated in Transcription
  misc_feature: MA Experiment 108462 PARAMETER Experiment Name: At_Germinating_Seeds_cDNA_P Parameter: Age (day) Value: 2 vs. 0
  misc_feature: MA Experiment 108462 PARAMETER Experiment Name: At_Germinating_Seeds_cDNA_P Parameter: Tissue Value: Germinating Seeds
  misc_feature: MA Experiment ID: 108463 Result: Up-regulated in Transcription
  misc_feature: MA Experiment 108463 PARAMETER Experiment Name: At_Germinating_Seeds_cDNA_P Parameter: Age (day) Value: 3 vs. 0
  misc_feature: MA Experiment 108463 PARAMETER Experiment Name: At_Germinating_Seeds_cDNA_P Parameter: Tissue Value: Germinating Seeds
  misc_feature: MA Experiment ID: 108464 Result: Up-regulated in Transcription
  misc_feature: MA Experiment 108464 PARAMETER Experiment Name: At_Germinating_Seeds_cDNA_P Parameter: Age (day) Value: 4 vs. 0
  misc_feature: MA Experiment 108464 PARAMETER Experiment Name: At_Germinating_Seeds_cDNA_P Parameter: Tissue Value: Germinating Seeds
  misc_feature: MA Experiment ID: 108488 Result: Up-regulated in Transcription
  misc_feature: MA Experiment ID: 108577 Result: Up-regulated in Transcription
  misc_feature: MA Experiment 108577 PARAMETER Experiment Name: At_42deg_Heat_cDNA_P Parameter: Temperature (deg C) Value: 42 vs. 22
  misc_feature: MA Experiment 108577 PARAMETER Experiment Name: At_42deg_Heat_cDNA_P Parameter: Timepoint (hr) Value: 6
  misc_feature: MA Experiment 108577 PARAMETER Experiment Name: At_42deg_Heat_cDNA_P Parameter: Tissue Value: Aerial
  misc_feature: MA Experiment ID: 108579 Result: Up-regulated in Transcription
  misc_feature: MA Experiment 108579 PARAMETER Experiment Name: At_4deg_Cold_cDNA_P Parameter: Temperature (deg C) Value: 4 vs. 22
  misc_feature: MA Experiment 108579 PARAMETER Experiment Name: At_4deg_Cold_cDNA_P Parameter: Timepoint (hr) Value: 6
  misc_feature: MA Experiment 108579 PARAMETER Experiment Name: At_4deg_Cold_cDNA_P Parameter: Tissue Value: Aerial
  misc_feature: MA Experiment ID: 108595 Result: Down-regulated in Transcription
  misc_feature: MA Experiment 108595 PARAMETER Experiment Name: At_Ler-pi_Ovule_cDNA_P Parameter: Plant Line Value: null
  misc_feature: MA Experiment ID: 20000069 Result: Down-regulated in Transcription
  misc_feature: MA Experiment 20000069 PARAMETER Experiment Name: At_100uM_ABA_Mutants_cDNA_P Parameter: Plant Line Value: CS23
  misc_feature: MA Experiment 20000069 PARAMETER Experiment Name: At_100uM_ABA_Mutants_cDNA_P Parameter: Timepoint (hr) Value: 6
  misc_feature: MA Experiment 20000069 PARAMETER Experiment Name: At_100uM_ABA_Mutants_cDNA_P Parameter: Tissue Value: Aerial
  misc_feature: MA Experiment 20000069 PARAMETER Experiment Name: At_100uM_ABA_Mutants_cDNA_P Parameter: Treatment Value: 100uM ABA vs. No Treatment
  misc_feature: MA Experiment ID: 20000070 Result: Down-regulated in Transcription
  misc_feature: MA Experiment 20000070 PARAMETER Experiment Name: At_100uM_ABA_Mutants_cDNA_P Parameter: Plant Line Value: CS24
  misc_feature: MA Experiment 20000070 PARAMETER Experiment Name: At_100uM_ABA_Mutants_cDNA_P Parameter: Timepoint (hr) Value: 6
  misc_feature: MA Experiment 20000070 PARAMETER Experiment Name: At_100uM_ABA_Mutants_cDNA_P Parameter: Tissue Value: Aerial
  misc_feature: MA Experiment 20000070 PARAMETER Experiment Name: At_100uM_ABA_Mutants_cDNA_P Parameter: Treatment Value: 100uM ABA vs. No Treatment
  misc_feature: MA Experiment ID: 20000071 Result: Down-regulated in Transcription
  misc_feature: MA Experiment 20000071 PARAMETER Experiment Name: At_100uM_ABA_Mutants_cDNA_P Parameter: Plant Line Value: CS8104
  misc_feature: MA Experiment 20000071 PARAMETER Experiment Name: At_100uM_ABA_Mutants_cDNA_P Parameter: Timepoint (hr) Value: 6
  misc_feature: MA Experiment 20000071 PARAMETER Experiment Name: At_100uM_ABA_Mutants_cDNA_P Parameter: Tissue Value: Aerial
  misc_feature: MA Experiment 20000071 PARAMETER Experiment Name: At_100uM_ABA_Mutants_cDNA_P Parameter: Treatment Value: 100uM ABA vs. No Treatment
  misc_feature: MA Experiment ID: 20000072 Result: Down-regulated in Transcription
  misc_feature: MA Experiment 20000072 PARAMETER Experiment Name: At_100uM_ABA_Mutants_cDNA_P Parameter: Plant Line Value: CS8105
  misc_feature: MA Experiment 20000072 PARAMETER Experiment Name: At_100uM_ABA_Mutants_cDNA_P Parameter: Timepoint (hr) Value: 6
  misc_feature: MA Experiment 20000072 PARAMETER Experiment Name: At_100uM_ABA_Mutants_cDNA_P Parameter: Tissue Value: Aerial
  misc_feature: MA Experiment 20000072 PARAMETER Experiment Name: At_100uM_ABA_Mutants_cDNA_P Parameter: Treatment Value: 100uM ABA vs. No Treatment
  misc_feature: MA Experiment ID: 20000086 Result: Down-regulated in Transcription
  misc_feature: MA Experiment 20000086 PARAMETER Experiment Name: At_100uM_ABA_Mutants_cDNA_P Parameter: Plant Line Value: CS22
  misc_feature: MA Experiment 20000086 PARAMETER Experiment Name: At_100uM_ABA_Mutants_cDNA_P Parameter: Timepoint (hr) Value: 6
  misc_feature: MA Experiment 20000086 PARAMETER Experiment Name: At_100uM_ABA_Mutants_cDNA_P Parameter: Tissue Value: Aerial
  misc_feature: MA Experiment 20000086 PARAMETER Experiment Name: At_100uM_ABA_Mutants_cDNA_P Parameter: Treatment Value: 100uM ABA vs. No Treatment
  misc_feature: MA Experiment ID: 20000087 Result: Down-regulated in Transcription
  misc_feature: MA Experiment 20000087 PARAMETER Experiment Name: At_100uM_ABA_Mutants_cDNA_P Parameter: Plant Line Value: WS
  misc_feature: MA Experiment 20000087 PARAMETER Experiment Name: At_100uM_ABA_Mutants_cDNA_P Parameter: Timepoint (hr) Value: 6
  misc_feature: MA Experiment 20000087 PARAMETER Experiment Name: At_100uM_ABA_Mutants_cDNA_P Parameter: Tissue Value: Aerial
  misc_feature: MA Experiment 20000087 PARAMETER Experiment Name: At_100uM_ABA_Mutants_cDNA_P Parameter: Treatment Value: 100uM ABA vs. No Treatment
  misc_feature: MA Experiment ID: 20000088 Result: Down-regulated in Transcription
  misc_feature: MA Experiment 20000088 PARAMETER Experiment Name: At_100uM_ABA_Mutants_cDNA_P Parameter: Plant Line Value: Landsberg
  misc_feature: MA Experiment 20000088 PARAMETER Experiment Name: At_100uM_ABA_Mutants_cDNA_P Parameter: Timepoint (hr) Value: 6
  misc_feature: MA Experiment 20000088 PARAMETER Experiment Name: At_100uM_ABA_Mutants_cDNA_P Parameter: Tissue Value: Aerial
  misc_feature: MA Experiment 20000088 PARAMETER Experiment Name: At_100uM_ABA_Mutants_cDNA_P Parameter: Treatment Value: 100uM ABA vs. No Treatment
  misc_feature: MA Experiment ID: 20000089 Result: Down-regulated in Transcription
  misc_feature: MA Experiment ID: 20000090 Result: Down-regulated in Transcription
  misc_feature: MA Experiment ID: 20000093 Result: Up-regulated in Transcription
  misc_feature: MA Experiment 20000093 PARAMETER Experiment Name: At_42deg_Heat_cDNA_P Parameter: Temperature (deg C) Value: 42 vs. 22
  misc_feature: MA Experiment 20000093 PARAMETER Experiment Name: At_42deg_Heat_cDNA_P Parameter: Timepoint (hr) Value: 0.5
  misc_feature: MA Experiment 20000093 PARAMETER Experiment Name: At_42deg_Heat_cDNA_P Parameter: Tissue Value: Aerial
  misc_feature: MA Experiment ID: 20000111 Result: Up-regulated in Transcription
  misc_feature: MA Experiment 20000111 PARAMETER Experiment Name: At_42deg_Heat_cDNA_P Parameter: Temperature (deg C) Value: 42 vs. 22
  misc_feature: MA Experiment 20000111 PARAMETER Experiment Name: At_42deg_Heat_cDNA_P Parameter: Timepoint (hr) Value: 6
  misc_feature: MA Experiment 20000111 PARAMETER Experiment Name: At_42deg_Heat_cDNA_P Parameter: Tissue Value: Aerial
  misc_feature: MA Experiment ID: 20000112 Result: Up-regulated in Transcription
  misc_feature: MA Experiment 20000112 PARAMETER Experiment Name: At_42deg_Heat_cDNA_P Parameter: Temperature (deg C) Value: 42 vs. 22
  misc_feature: MA Experiment 20000112 PARAMETER Experiment Name: At_42deg_Heat_cDNA_P Parameter: Timepoint (hr) Value: 2
  misc_feature: MA Experiment 20000112 PARAMETER Experiment Name: At_42deg_Heat_cDNA_P Parameter: Tissue Value: Aerial
  misc_feature: MA Experiment ID: 20000113 Result: Up-regulated in Transcription
  misc_feature: MA Experiment 20000113 PARAMETER Experiment Name: At_42deg_Heat_cDNA_P Parameter: Temperature (deg C) Value: 42 vs. 22
  misc_feature: MA Experiment 20000113 PARAMETER Experiment Name: At_42deg_Heat_cDNA_P Parameter: Timepoint (hr) Value: 8
  misc_feature: MA Experiment 20000113 PARAMETER Experiment Name: At_42deg_Heat_cDNA_P Parameter: Tissue Value: Aerial
  misc_feature: MA Experiment ID: 20000117 Result: Down-regulated in Transcription
  misc_feature: MA Experiment 20000117 PARAMETER Experiment Name: At_100uM_ABA_Mutants_cDNA_P Parameter: Plant Line Value: Columbia
  misc_feature: MA Experiment 20000117 PARAMETER Experiment Name: At_100uM_ABA_Mutants_cDNA_P Parameter: Timepoint (hr) Value: 6
  misc_feature: MA Experiment 20000117 PARAMETER Experiment Name: At_100uM_ABA_Mutants_cDNA_P Parameter: Tissue Value: Aerial
  misc_feature: MA Experiment 20000117 PARAMETER Experiment Name: At_100uM_ABA_Mutants_cDNA_P Parameter: Treatment Value: 100uM ABA vs. No Treatment
  misc_feature: MA Experiment ID: 20000144 Result: Up-regulated in Transcription
  misc_feature: MA Experiment 20000144 PARAMETER Experiment Name: At_42deg_Heat_cDNA_P Parameter: Temperature (deg C) Value: 42 vs. 22
  misc_feature: MA Experiment 20000144 PARAMETER Experiment Name: At_42deg_Heat_cDNA_P Parameter: Timepoint (hr) Value: 1
  misc_feature: MA Experiment 20000144 PARAMETER Experiment Name: At_42deg_Heat_cDNA_P Parameter: Tissue Value: Aerial
  misc_feature: MA Experiment ID: 20000224 Result: Up-regulated in Transcription
gacattttcacaaagccacaccaactcactcacaaaatctgtagaatcatctttcaacaatggcttccactgctctctccagcgcaatcgtaagcacctctttcctccgccgtcaacagacaccaatcagcctcagatccctcccgtttgccaacacacaatctctcttcggcctcaaatcttccaccgctcgcggcggccgcgtcacggccatggctacctacaaggtcaagttcatcacacctgagggagaacaagaggtcgaatgcgaagaagatgtctacgtcctcgacgctgctgaggaagccggactcgacttgccctactcatgccgtgccggttcttgctcaagttgcgccgggaaagtcgtctctggttctattgaccagtcggaccagagcttcttagacgatgaacagatgagtgagggctatgtcttgacctgtgtggcttatccgacttctgatgtcgtcatcgaaacccacaaagaagaagccattatgtaaaattttaaagctttttgatgaatttcatcaaaagagaaattacttgatgtttaagt

SEQ ID NO: 91034 - protein, 148 aa, Arabidopsis thaliana; identical to SEQ ID NO: 34708
  peptide (1)..(148): Ceres Seq. ID no. 12726189
  misc_feature (60)..(135): Pfam Name: 2Fe-2S iron-sulfur cluster binding domain Pfam Description: 2Fe-2S iron-sulfur cluster binding domain
  misc_feature (1)..(148): Homolog of NCBI NO: 15220256 NR Description: ferredoxin precusor isolog; protein id: supported by cDNA: 20637., supported by cDNA: gi_16604415
  misc_feature (1)..(148): Homolog of NCBI NO: 15219837 NR Description: ferrodoxin precursor; protein id: At1g60950.1, by cDNA: gi_11908075, supported by cDNA: gi_12642889, supported cDNA: gi_13265544, supported by cDNA: gi_20260269 [Arabidopsis
  misc_feature (1)..(118): Homolog of NCBI NO: 16604416 NR Description: At1g10960/T19D16_12 [Arabidopsis thaliana]
  misc_feature (1)..(147): Homolog of NCBI NO: 3023743 NR Description: Ferredoxin I, chloroplast precursor
  misc_feature (1)..(145): Homolog of NCBI NO: 119931 NR Description: Ferredoxin I, chloroplast precursor
  misc_feature (1)..(147): Homolog of NCBI NO: 33520415 NR Description: ferredoxin I [Trifolium pratense]
  misc_feature (2)..(145): Homolog of NCBI NO: 37779195 NR Description: ferredoxin [Helianthus annuus]
  misc_feature (1)..(147): Homolog of NCBI NO: 120026 NR Description: Ferredoxin, chloroplast precursor
  misc_feature (1)..(148): Homolog of NCBI NO: 34921349 NR Description: Ferredoxin, chloroplast precursor (PFLP)
  misc_feature (1)..(147): Homolog of NCBI NO: 119937 NR Description: Ferredoxin I, chloroplast precursor (Fd I)

SEQ ID NO: 91035 - protein, 97 aa, Arabidopsis thaliana; identical to SEQ ID NO: 34709
  peptide (1)..(97): Ceres Seq. ID no. 12726190
  misc_feature (9)..(84): Pfam Name: 2Fe-2S iron-sulfur cluster binding domain Pfam Description: 2Fe-2S iron-sulfur cluster binding domain
  misc_feature (1)..(97): Homolog of NCBI NO: 15220256 NR Description: ferredoxin precusor isolog; protein id: supported by cDNA: 20637., supported by cDNA: gi_16604415
  misc_feature (1)..(97): Homolog of NCBI NO: 15219837 NR Description: ferrodoxin precursor; protein id: At1g60950.1, by cDNA: gi_11908075, supported by cDNA: gi_12642889, supported cDNA: gi_13265544, supported by cDNA: gi_20260269 [Arabidopsis
  misc_feature (1)..(67): Homolog of NCBI NO: 16604416 NR Description: At1g10960/T19D16_12 [Arabidopsis thaliana]
  misc_feature (1)..(96): Homolog of NCBI NO: 3023743 NR Description: Ferredoxin I, chloroplast precursor
  misc_feature (1)..(94): Homolog of NCBI NO: 119931 NR Description: Ferredoxin I, chloroplast precursor
  misc_feature (1)..(96): Homolog of NCBI NO: 33520415 NR Description: ferredoxin I [Trifolium pratense]
  misc_feature (1)..(94): Homolog of NCBI NO: 37779195 NR Description: ferredoxin [Helianthus annuus]
  misc_feature (1)..(96): Homolog of NCBI NO: 120026 NR Description: Ferredoxin, chloroplast precursor
  misc_feature (1)..(97): Homolog of NCBI NO: 34921349 NR Description: Ferredoxin, chloroplast precursor (PFLP)
  misc_feature (1)..(96): Homolog of NCBI NO: 119937 NR Description: Ferredoxin I, chloroplast precursor (Fd I)

SEQ ID NO: 91036 - protein, 81 aa, Arabidopsis thaliana
  peptide (1)..(81): Ceres Seq. ID no. 12726191
TFSQSHTNSLTKSVESSFNNGFHCSLQRNRKHLFPPPSTDTNQPQIPPVCQHTISLRPQIFHRSRRPRHGHGYLQGQVHHT

SEQ ID NO: 91037 - DNA, 871 bp, Arabidopsis thaliana
  misc_feature (1)..(871): Ceres Seq. ID no. 12726254
  misc_feature: MA Experiment ID: 108595 Result: Down-regulated in Transcription
  misc_feature: MA Experiment 108595 PARAMETER Experiment Name: At_Ler-pi_Ovule_cDNA_P Parameter: Plant Line Value: null
  misc_feature: MA Experiment ID: 20000185 Result: Down-regulated in Transcription
  misc_feature: MA Experiment 20000185 PARAMETER Experiment Name: At_Roots__P Parameter: Age (day) Value: 7 vs. 21
  misc_feature: MA Experiment 20000185 PARAMETER Experiment Name: At_Roots__P Parameter: Organism Value: A. thaliana
  misc_feature: MA Experiment 20000185 PARAMETER Experiment Name: At_Roots__P Parameter: Tissue Value: Roots vs. Whole Plant
  misc_feature: MA Experiment ID: 20000439 Result: Down-regulated in Transcription
  misc_feature: MA Experiment 20000439 PARAMETER Experiment Name: At_Roots__P Parameter: Age (day) Value: 14 vs. 21
  misc_feature: MA Experiment 20000439 PARAMETER Experiment Name: At_Roots__P Parameter: Organism Value: A. thaliana
  misc_feature: MA Experiment 20000439 PARAMETER Experiment Name: At_Roots__P Parameter: Tissue Value: Roots vs. Whole Plant
atggcggtctcgtttaatacaacgcttcaccagccttctctgagtccgagctgtagcatcaagctttattctgggttaaagcctcaatctgcaagctttttggcaagtgggtatcagaatttgaacaaggagttctatggaagagtttataagagtctgcaatctgggactgggaaagcgagcaggtcacgggtaaagatgatgccaataggaacaccgagagtaccctacagaaaccgagaagaagggacttggcaatgggttgatatatggaatgccctttatcgagagcgtgtaatcttcattggacaaaacattgatgaagagtttagcaaccagatattagcaaccatgttgtaccttgatactcttgatgactcgaggaggatttatatgtacctaaatggtccgggtggtgatcttactccaagtctagccatctatgatacaatgaagagcttgaaaagtccggttgggacacattgcgttgggcttgcttacaaccttgcaggttttcttcttgcggctggagaaaagggtcaccgatttgcgatgccattatcaagaatcgccctccagtcaccagctggtgcagcccgtggtcaggctgatgatatccaaaatgaagcaaaagagctttcaaggataagagactacctcttcaatgaactagccaagaatacaggccagcctgcggaaagggtcttcaaagacttgagccgggtgaaaaggttcaatgcagaggaagcaatcgagtatggacttattgataagattgttagaccaccgcgcatcaaagaagacgctcctcgccaagacgaaagcgcagggctaggctagtctttttgtttgtttgttatgtcaaaagttt

SEQ ID NO: 91038 - protein, 279 aa, Arabidopsis thaliana; identical to SEQ ID NO: 26212
  peptide (1)..(279): Ceres Seq. ID no. 12726255
  misc_feature (79)..(263): Pfam Name: Clp protease Pfam Description: Clp protease
  misc_feature (1)..(279): Homolog of NCBI NO: 18391391 NR Description: ATP-dependent Clp protease proteolytic subunit protein id: At1g12410.1, supported by cDNA: gi_16209711, by cDNA: gi_17065387, supported by cDNA: gi_20148624, supported
  misc_feature (1)..(279): Homolog of NCBI NO: 16209712 NR Description: At1g12410/F5O11_7 [Arabidopsis thaliana]
  misc_feature (68)..(260): Homolog of NCBI NO: 22298615 NR Description: ATP-dependent Clp protease proteolytic subunit 2
  misc_feature (50)..(260): Homolog of NCBI NO: 13812170 NR Description: ATP-dependent Clp protease proteolytic subunit
  misc_feature (68)..(260): Homolog of NCBI NO: 17231849 NR Description: ATP-dependent Clp protease proteolytic subunit
  misc_feature (68)..(260): Homolog of NCBI NO: 23126722 NR Description: hypothetical protein [Nostoc punctiforme]
  misc_feature (68)..(262): Homolog of NCBI NO: 18203213 NR Description: ATP-dependent Clp protease proteolytic subunit 3
  misc_feature (68)..(260): Homolog of NCBI NO: 23043112 NR Description: hypothetical protein [Trichodesmium erythraeum
  misc_feature (68)..(263): Homolog of NCBI NO: 33240837 NR Description: Protease subunit of ATP-dependent Clp protease
  misc_feature (79)..(259): Homolog of NCBI NO: 30023185 NR Description: ATP-dependent Clp protease proteolytic subunit cereus ATCC 14579] >gi|17981472|gb|AAL51030.1|AF454757_1 ClpP1

SEQ ID NO: 91039 - protein, 213 aa, Arabidopsis thaliana; identical to SEQ ID NO: 26213
  peptide (1)..(213): Ceres Seq. ID no. 12726256
  misc_feature (13)..(197): Pfam Name: Clp protease Pfam Description: Clp protease
  misc_feature (1)..(213): Homolog of NCBI NO: 18391391 NR Description: ATP-dependent Clp protease proteolytic subunit protein id: At1g12410.1, supported by cDNA: gi_16209711, by cDNA: gi_17065387, supported by cDNA: gi_20148624, supported
  misc_feature (1)..(213): Homolog of NCBI NO: 16209712 NR Description: At1g12410/F5O11_7 [Arabidopsis thaliana]
  misc_feature (2)..(194): Homolog of NCBI NO: 22298615 NR Description: ATP-dependent Clp protease proteolytic subunit 2
  misc_feature (1)..(194): Homolog of NCBI NO: 13812170 NR Description: ATP-dependent Clp protease proteolytic subunit
  misc_feature (2)..(194): Homolog of NCBI NO: 17231849 NR Description: ATP-dependent Clp protease proteolytic subunit
  misc_feature (2)..(194): Homolog of NCBI NO: 23126722 NR Description: hypothetical protein [Nostoc punctiforme]
  misc_feature (2)..(196): Homolog of NCBI NO: 18203213 NR Description: ATP-dependent Clp protease proteolytic subunit 3
  misc_feature (2)..(194): Homolog of NCBI NO: 23043112 NR Description: hypothetical protein [Trichodesmium erythraeum
  misc_feature (2)..(197): Homolog of NCBI NO: 33240837 NR Description: Protease subunit of ATP-dependent Clp protease
  misc_feature (13)..(193): Homolog of NCBI NO: 30023185 NR Description: ATP-dependent Clp protease proteolytic subunit cereus ATCC 14579] >gi|17981472|gb|AAL51030.1|AF454757_1 ClpP1

SEQ ID NO: 91040 - protein, 212 aa, Arabidopsis thaliana; identical to SEQ ID NO: 27066
  peptide (1)..(212): Ceres Seq. ID no. 12726257
  misc_feature (12)..(196): Pfam Name: Clp protease Pfam Description: Clp protease
  misc_feature (1)..(212): Homolog of NCBI NO: 18391391 NR Description: ATP-dependent Clp protease proteolytic subunit protein id: At1g12410.1, supported by cDNA: gi_16209711, by cDNA: gi_17065387, supported by cDNA: gi_20148624, supported
  misc_feature (1)..(212): Homolog of NCBI NO: 16209712 NR Description: At1g12410/F5O11_7 [Arabidopsis thaliana]
  misc_feature (1)..(193): Homolog of NCBI NO: 22298615 NR Description: ATP-dependent Clp protease proteolytic subunit 2
  misc_feature (1)..(193): Homolog of NCBI NO: 13812170 NR Description: ATP-dependent Clp protease proteolytic subunit
  misc_feature (1)..(193): Homolog of NCBI NO: 17231849 NR Description: ATP-dependent Clp protease proteolytic subunit
  misc_feature (1)..(193): Homolog of NCBI NO: 23126722 NR Description: hypothetical protein [Nostoc punctiforme]
  misc_feature (1)..(195): Homolog of NCBI NO: 18203213 NR Description: ATP-dependent Clp protease proteolytic subunit 3
  misc_feature (1)..(193): Homolog of NCBI NO: 23043112 NR Description: hypothetical protein [Trichodesmium erythraeum
  misc_feature (1)..(196): Homolog of NCBI NO: 33240837 NR Description: Protease subunit of ATP-dependent Clp protease
  misc_feature (12)..(192): Homolog of NCBI NO: 30023185 NR Description: ATP-dependent Clp protease proteolytic subunit cereus ATCC 14579] >gi|17981472|gb|AAL51030.1|AF454757_1 ClpP1

SEQ ID NO: 91041 - DNA, 654 bp, Arabidopsis thaliana
  misc_feature (1)..(654): Ceres Seq. ID no. 12726274
  misc_feature: MA Experiment ID: 20000180 Result: Up-regulated in Transcription
  misc_feature: MA Experiment 20000180 PARAMETER Experiment Name: At_Germinating_Seeds_P Parameter: Age (hr) Value: 24 vs. 0
  misc_feature: MA Experiment 20000180 PARAMETER Experiment Name: At_Germinating_Seeds_P Parameter: Tissue Value: Germinating Seeds
  misc_feature: MA Experiment ID: 20000265 Result: Up-regulated in Transcription
  misc_feature: MA Experiment 20000265 PARAMETER Experiment Name: At_Open_Flower_P Parameter: Age (day) Value: 21
  misc_feature: MA Experiment 20000265 PARAMETER Experiment Name: At_Open_Flower_P Parameter: Plant Line Value: WS
  misc_feature: MA Experiment 20000265 PARAMETER Experiment Name: At_Open_Flower_P Parameter: Tissue Value: Closed Flower vs. Whole Plant
atgatgaatgtttctggagaatgtgtaggccgtgaaagatgcgaggaattagccaagtcttcttcgttttaccggaaagtttactcggagcgaattaacttttgcttcgatgtaggatgtgccatatatgtttacactagaatggtcaacaagttcaagattgaaggatgtaatgcaccaattccaaaaggtagatctaagactttgctacattctctctttcaaccagctcgtgcctctgctattcgccggattgatgctgggaatgattgtatcatcattgttcatatcgacttcaaagaccctaaatccctaccagagtcaaatgaaagatcatttcctgagaaccttgaatgtattctaggtactgagcttccaaagcctctaggtctccaagtggaagacgatcaacaacaagttgaatgtgggatttgctatgcgcagtttctacccaccgatgaggagctcggagctagaagtgggacacgaacagattacacatgtgaaaacatcagttgcaacaagtctttccatagcctctgcctcacagactggttaaggtctatcacaacaacaagacagtcatttgatgttctgtttgggaactgcccttattgttcagacccagttgcagtcaaaaccagcaacaaatag

SEQ ID NO: 91042 - protein, 217 aa, Arabidopsis thaliana
  peptide (1)..(217): Ceres Seq. ID no. 12726275
  misc_feature (1)..(217): Homolog of NCBI NO: 10177332 NR Description: gene_id:MPA24.9~unknown protein [Arabidopsis
  misc_feature (108)..(217): Homolog of NCBI NO: 30698155 NR Description: expressed protein [Arabidopsis thaliana]
  misc_feature (75)..(108): Homolog of NCBI NO: 30698155 NR Description: expressed protein [Arabidopsis thaliana]
  misc_feature (108)..(217): Homolog of NCBI NO: 39104597 NR Description: unknown protein [Arabidopsis thaliana]
  misc_feature (75)..(108): Homolog of NCBI NO: 39104597 NR Description: unknown protein [Arabidopsis thaliana]
  misc_feature (75)..(217): Homolog of NCBI NO: 12848314 NR Description: unnamed protein product [Mus musculus]
  misc_feature (75)..(217): Homolog of NCBI NO: 8922360 NR Description: hypothetical protein FLJ10335 [Homo sapiens]
  misc_feature (75)..(217): Homolog of NCBI NO: 32493396 NR Description: PHF9 protein [Homo sapiens]
  misc_feature (75)..(217): Homolog of NCBI NO: 13385416 NR Description: proliferation of germ cells protein [Mus >gi|12842891|dbj|BAB25772.1| unnamed protein product [Mus >gi|12847699|dbj|BAB27674.1| unnamed protein product [Mus
  misc_feature (75)..(213): Homolog of NCBI NO: 33416848 NR Description: Unknown (protein for MGC:66144) [Danio rerio]
MMNVSGECVGRERCEELAKSSSFYRKVYSERINFCFDVGCAIYVYTRMVNKFKIEGCNAPIPKGRSKTLLHSLFQPARASAIRRIDAGNDCIIIVHIDFKDPKSLPESNERSFPENLECILGTELPKPLGLQVEDDQQQVECGICYAQFLPTDEELGARSGTRTDYTCENISCNKSFHSLCLTDWLRSITTTRQSFDVLFGNCPYCSDPVAVKTSNK

SEQ ID NO: 91043 - protein, 216 aa, Arabidopsis thaliana
  peptide (1)..(216): Ceres Seq. ID no. 12726276
  misc_feature (1)..(216): Homolog of NCBI NO: 10177332 NR Description: gene_id:MPA24.9~unknown protein [Arabidopsis
  misc_feature (107)..(216): Homolog of NCBI NO: 30698155 NR Description: expressed protein [Arabidopsis thaliana]
  misc_feature (74)..(107): Homolog of NCBI NO: 30698155 NR Description: expressed protein [Arabidopsis thaliana]
  misc_feature (107)..(216): Homolog of NCBI NO: 39104597 NR Description: unknown protein [Arabidopsis thaliana]
  misc_feature (74)..(107): Homolog of NCBI NO: 39104597 NR Description: unknown protein [Arabidopsis thaliana]
  misc_feature (74)..(216): Homolog of NCBI NO: 12848314 NR Description: unnamed protein product [Mus musculus]
  misc_feature (74)..(216): Homolog of NCBI NO: 8922360 NR Description: hypothetical protein FLJ10335 [Homo sapiens]
  misc_feature (74)..(216): Homolog of NCBI NO: 32493396 NR Description: PHF9 protein [Homo sapiens]
  misc_feature (74)..(216): Homolog of NCBI NO: 13385416 NR Description: proliferation of germ cells protein [Mus >gi|12842891|dbj|BAB25772.1| unnamed protein product [Mus >gi|12847699|dbj|BAB27674.1| unnamed protein product [Mus
  misc_feature (74)..(212): Homolog of NCBI NO: 33416848 NR Description: Unknown (protein for MGC:66144) [Danio rerio]
MNVSGECVGRERCEELAKSSSFYRKVYSERINFCFDVGCAIYVYTRMVNKFKIEGCNAPIPKGRSKTLLHSLFQPARASAIRRIDAGNDCIIIVHIDFKDPKSLPESNERSFPENLECILGTELPKPLGLQVEDDQQQVECGICYAQFLPTDEELGARSGTRTDYTCENISCNKSFHSLCLTDWLRSITTTRQSFDVLFGNCPYCSDPVAVKTSNK

SEQ ID NO: 91044 - protein, 170 aa, Arabidopsis thaliana
  peptide (1)..(170): Ceres Seq. ID no. 12726277
  misc_feature (1)..(170): Homolog of NCBI NO: 10177332 NR Description: gene_id:MPA24.9~unknown protein [Arabidopsis
  misc_feature (61)..(170): Homolog of NCBI NO: 30698155 NR Description: expressed protein [Arabidopsis thaliana]
  misc_feature (28)..(61): Homolog of NCBI NO: 30698155 NR Description: expressed protein [Arabidopsis thaliana]
  misc_feature (61)..(170): Homolog of NCBI NO: 39104597 NR Description: unknown protein [Arabidopsis thaliana]
  misc_feature (28)..(61): Homolog of NCBI NO: 39104597 NR Description: unknown protein [Arabidopsis thaliana]
  misc_feature (28)..(170): Homolog of NCBI NO: 12848314 NR Description: unnamed protein product [Mus musculus]
  misc_feature (28)..(170): Homolog of NCBI NO: 8922360 NR Description: hypothetical protein FLJ10335 [Homo sapiens]
  misc_feature (28)..(170): Homolog of NCBI NO: 32493396 NR Description: PHF9 protein [Homo sapiens]
  misc_feature (28)..(170): Homolog of NCBI NO: 13385416 NR Description: proliferation of germ cells protein [Mus >gi|12842891|dbj|BAB25772.1| unnamed protein product [Mus >gi|12847699|dbj|BAB27674.1| unnamed protein product [Mus
  misc_feature (28)..(166): Homolog of NCBI NO: 33416848 NR Description: Unknown (protein for MGC:66144) [Danio rerio]
MVNKFKIEGCNAPIPKGRSKTLLHSLFQPARASAIRRIDAGNDCIIIVHIDFKDPKSLPESNERSFPENLECILGTELPKPLGLQVEDDQQQVECGICYAQFLPTDEELGARSGTRTDYTCENISCNKSFHSLCLTDWLRSITTTRQSFDVLFGNCPYCSDPVAVKTSNK

SEQ ID NO: 91045 - DNA, 1236 bp, Arabidopsis thaliana
  misc_feature (1)..(1236): Ceres Seq. ID no. 12726282
  misc_feature: MA Experiment ID: 20000185 Result: Up-regulated in Transcription
  misc_feature: MA Experiment 20000185 PARAMETER Experiment Name: At_Roots__P Parameter: Age (day) Value: 7 vs. 21
  misc_feature: MA Experiment 20000185 PARAMETER Experiment Name: At_Roots__P Parameter: Organism Value: A. thaliana
  misc_feature: MA Experiment 20000185 PARAMETER Experiment Name: At_Roots__P Parameter: Tissue Value: Roots vs. Whole Plant
  misc_feature: MA Experiment ID: 20000265 Result: Up-regulated in Transcription
  misc_feature: MA Experiment 20000265 PARAMETER Experiment Name: At_Open_Flower_P Parameter: Age (day) Value: 21
  misc_feature: MA Experiment 20000265 PARAMETER Experiment Name: At_Open_Flower_P Parameter: Plant Line Value: WS
  misc_feature: MA Experiment 20000265 PARAMETER Experiment Name: At_Open_Flower_P Parameter: Tissue Value: Closed Flower vs. Whole Plant
  misc_feature: MA Experiment ID: 20000439 Result: Up-regulated in Transcription
  misc_feature: MA Experiment 20000439 PARAMETER Experiment Name: At_Roots__P Parameter: Age (day) Value: 14 vs. 21
  misc_feature: MA Experiment 20000439 PARAMETER Experiment Name: At_Roots__P Parameter: Organism Value: A. thaliana
  misc_feature: MA Experiment 20000439 PARAMETER Experiment Name: At_Roots__P Parameter: Tissue Value: Roots vs. Whole Plant
aaaaaaagaattacaattaataagaacaagatcaagaatcaagaatcaagaaaatgggaagagcaccgtgttgtgataaggccaacgtgaagaaagggccttggtctcctgaggaagacgccaaactcaaagattacatcgagaatagtggcacaggaggcaactggattgctttgcctcagaaaattggtttaaggagatgtgggaagagttgcaggctaaggtggctcaactatttgagaccaaacatcaaacatggtggcttctccgaggaagaagacaacatcatttgtaacctctatgttactattggtagcaggtggtctataattgctgcacaattgccgggaagaaccgacaacgatatcaaaaactattggaacacgaggctgaagaagaagcttctgaacaaacaaaggaaagagttccaagaagcgcgaatgaagcaagagatggtgatgatgaaaaggcaacaacaaggacaaggacaaggtcaaagtaatggtagtacggatctttatcttaacaacatgtttggatcatcaccatggccattactaccacaacttcctcctccacatcatcaaatacctcttggaatgatggaaccaacaagctgtaactactaccaaacgacaccgtcttgtaacctagaacaaaagccattgatcacactcaagaacatggtcaagattgaagaagaacaggaaaggacaaaccctgatcatcatcatcaagattctgtcacaaacccttttgatttctctttctctcagcttttgttagatcccaattactatctgggatcaggagggggaggagaaggagattttgctatcatgagcagcagcacaaactcaccattaccaaacacaagtagtgatcaacatccaagtcaacagcaagagattcttcaatggtttgggagcagtaactttcagacagaagcaatcaacgatatgttcataaacaacaacaacaacatagtgaatcttgagaccatcgagaacacaaaagtctatggagacgcctcagtagccggagccgctgtccgagcagctttgggcggagggacaacgagtacatcggcggatcaaagtacaataagttgggaggatataacttctctagttaattccgaagatgcaagttacttcaatgcgccaaatcatgtgtaacattttgtttaaaactttatttgtacttaaatacataaagaggggttttctattttgt

SEQ ID NO: 91046 - protein, 374 aa, Arabidopsis thaliana
  peptide (1)..(374): Ceres Seq. ID no. 12726283
  misc_feature (14)..(62): Pfam Name: Myb-like DNA-binding domain Pfam Description: Myb-like DNA-binding domain
  misc_feature (1)..(374): Homolog of NCBI NO: 15239158 NR Description: myb DNA-binding protein (MYB68); protein id: supported by cDNA: gi_3941493 [Arabidopsis thaliana]
  misc_feature (1)..(374): Homolog of NCBI NO: 11273952 NR Description: myb-related transcription factor MYB68 [imported] Arabidopsis thaliana >gi|3941494|gb|AAC83623.1| putative
  misc_feature (1)..(299): Homolog of NCBI NO: 15229192 NR Description: myb family transcription factor(AtMYB84); protein
  misc_feature (1)..(299): Homolog of NCBI NO: 2832408 NR Description: R2R3-MYB transcription factor [Arabidopsis
  misc_feature (1)..(145): Homolog of NCBI NO: 19073324 NR Description: typical P-type R2R3 Myb protein [Sorghum bicolor]
  misc_feature (1)..(145): Homolog of NCBI NO: 33773103 NR Description: P-type R2R3 Myb protein [Sorghum bicolor]
  misc_feature (1)..(123): Homolog of NCBI NO: 11358686 NR Description: probable transcription factor MYB36 [imported] - thaliana >gi|3941448|gb|AAC83600.1| putative transcription factor
  misc_feature (1)..(123): Homolog of NCBI NO: 15242793 NR Description: myb family transcription factor; protein id: supported by cDNA: gi_3941447 [Arabidopsis thaliana]
  misc_feature (1)..(118): Homolog of NCBI NO: 18419456 NR Description: blind [Lycopersicon esculentum]
  misc_feature (1)..(122): Homolog of NCBI NO: 40253739 NR Description: putative P-type R2R3 Myb protein [Oryza sativa
MGRAPCCDKANVKKGPWSPEEDAKLKDYIENSGTGGNWIALPQKIGLRRCGKSCRLRWLNYLRPNIKHGGFSEEEDNIICNLYVTIGSRWSIIAAQLPGRTDNDIKNYWNTRLKKKLLNKQRKEFQEARMKQEMVMMKRQQQGQGQGQSNGSTDLYLNNMFGSSPWPLLPQLPPPHHQIPLGMMEPTSCNYYQTTPSCNLEQKPLITLKNMVKIEEEQERTNPDHHHQDSVTNPFDFSFSQLLLDPNYYLGSGGGGEGDFAIMSSSTNSPLPNTSSDQHPSQQQEILQWFGSSNFQTEAINDMFINNNNNIVNLETIENTKVYGDASVAGAAVRAALGGGTTSTSADQSTISWEDITSLVNSEDASYFNAPNHV

SEQ ID NO: 91047 - protein, 245 aa, Arabidopsis thaliana
  peptide (1)..(245): Ceres Seq. ID no. 12726284
  misc_feature (1)..(245): Homolog of NCBI NO: 15239158 NR Description: myb DNA-binding protein (MYB68); protein id: supported by cDNA: gi_3941493 [Arabidopsis thaliana]
  misc_feature (1)..(245): Homolog of NCBI NO: 11273952 NR Description: myb-related transcription factor MYB68 [imported] Arabidopsis thaliana >gi|3941494|gb|AAC83623.1| putative
  misc_feature (1)..(170): Homolog of NCBI NO: 15229192 NR Description: myb family transcription factor(AtMYB84); protein
  misc_feature (1)..(170): Homolog of NCBI NO: 2832408 NR Description: R2R3-MYB transcription factor [Arabidopsis
  misc_feature (1)..(16): Homolog of NCBI NO: 19073324 NR Description: typical P-type R2R3 Myb protein [Sorghum bicolor]
  misc_feature (1)..(16): Homolog of NCBI NO: 33773103 NR Description: P-type R2R3 Myb protein [Sorghum bicolor]
  misc_feature (1)..(93): Homolog of NCBI NO: 15228049 NR Description: light-regulated myb protein, putative; protein At2g36890.1 [Arabidopsis thaliana] >gi|25294087|pir||H84785
  misc_feature (1)..(117): Homolog of NCBI NO: 15233006 NR Description: myb family transcription factor; protein id:
  misc_feature (1)..(43): Homolog of NCBI NO: 7438333 NR Description: myb-related transcription factor THM18 - tomato
  misc_feature (1)..(115): Homolog of NCBI NO: 13346186 NR Description: GHMYB10 [Gossypium hirsutum]
MKQEMVMMKRQQQGQGQGQSNGSTDLYLNNMFGSSPWPLLPQLPPPHHQIPLGMMEPTSCNYYQTTPSCNLEQKPLITLKNMVKIEEEQERTNPDHHHQDSVTNPFDFSFSQLLLDPNYYLGSGGGGEGDFAIMSSSTNSPLPNTSSDQHPSQQQEILQWFGSSNFQTEAINDMFINNNNNIVNLETIENTKVYGDASVAGAAVRAALGGGTTSTSADQSTISWEDITSLVNSEDASYFNAPNHV

SEQ ID NO: 91048 - protein, 241 aa, Arabidopsis thaliana
  peptide (1)..(241): Ceres Seq. ID no. 12726285
  misc_feature (1)..(241): Homolog of NCBI NO: 15239158 NR Description: myb DNA-binding protein (MYB68); protein id: supported by cDNA: gi_3941493 [Arabidopsis thaliana]
  misc_feature (1)..(241): Homolog of NCBI NO: 11273952 NR Description: myb-related transcription factor MYB68 [imported] Arabidopsis thaliana >gi|3941494|gb|AAC83623.1| putative
  misc_feature (1)..(166): Homolog of NCBI NO: 15229192 NR Description: myb family transcription factor(AtMYB84); protein
  misc_feature (1)..(166): Homolog of NCBI NO: 2832408 NR Description: R2R3-MYB transcription factor [Arabidopsis
  misc_feature (1)..(12): Homolog of NCBI NO: 19073324 NR Description: typical P-type R2R3 Myb protein [Sorghum bicolor]
  misc_feature (1)..(12): Homolog of NCBI NO: 33773103 NR Description: P-type R2R3 Myb protein [Sorghum bicolor]
  misc_feature (1)..(89): Homolog of NCBI NO: 15228049 NR Description: light-regulated myb protein, putative; protein At2g36890.1 [Arabidopsis thaliana] >gi|25294087|pir||H84785
  misc_feature (1)..(113): Homolog of NCBI NO: 15233006 NR Description: myb family transcription factor; protein id:
  misc_feature (1)..(39): Homolog of NCBI NO: 7438333 NR Description: myb-related transcription factor THM18 - tomato
  misc_feature (1)..(111): Homolog of NCBI NO: 13346186 NR Description: GHMYB10 [Gossypium hirsutum]
MVMMKRQQQGQGQGQSNGSTDLYLNNMFGSSPWPLLPQLPPPHHQIPLGMMEPTSCNYYQTTPSCNLEQKPLITLKNMVKIEEEQERTNPDHHHQDSVTNPFDFSFSQLLLDPNYYLGSGGGGEGDFAIMSSSTNSPLPNTSSDQHPSQQQEILQWFGSSNFQTEAINDMFINNNNNIVNLETIENTKVYGDASVAGAAVRAALGGGTTSTSADQSTISWEDITSLVNSEDASYFNAPNHV

SEQ ID NO: 91049 - DNA, 1836 bp, Arabidopsis thaliana
  misc_feature (1)..(1836): Ceres Seq. ID no. 12726302
  misc_feature: MA Experiment ID: 20000227 Result: Down-regulated in Transcription
  misc_feature: MA Experiment 20000227 PARAMETER Experiment Name: At_Root-Tips-vs-Tops_P Parameter: Tissue Value: Root Tips vs. Root Tops
  misc_feature: MA Experiment ID: 20000439 Result: Up-regulated in Transcription
  misc_feature: MA Experiment 20000439 PARAMETER Experiment Name: At_Roots__P Parameter: Age (day) Value: 14 vs. 21
  misc_feature: MA Experiment 20000439 PARAMETER Experiment Name: At_Roots__P Parameter: Organism Value: A. thaliana
  misc_feature: MA Experiment 20000439 PARAMETER Experiment Name: At_Roots__P Parameter: Tissue Value: Roots vs. Whole Plant
  misc_feature: MA Experiment ID: 20000573 Result: Up-regulated in Transcription
  misc_feature: MA Experiment 20000573 PARAMETER Experiment Name: At_100uM_ABA_Mutants__P Parameter: Organism Value: A. thaliana
  misc_feature: MA Experiment 20000573 PARAMETER Experiment Name: At_100uM_ABA_Mutants__P Parameter: Plant Line Value: CS22 vs. Ler wt
  misc_feature: MA Experiment 20000573 PARAMETER Experiment Name: At_100uM_ABA_Mutants__P Parameter: Timepoint (hr) Value: N/A
  misc_feature: MA Experiment 20000573 PARAMETER Experiment Name: At_100uM_ABA_Mutants__P Parameter: Tissue Value: Whole Plant
  misc_feature: MA Experiment 20000573 PARAMETER Experiment Name: At_100uM_ABA_Mutants__P Parameter: Treatment Value: None
cacgtacgtaatcaaggaccaagggattttcttcttttggctaccatggccacaagatgcttttggtgttggaccactttgctcttctgctctcagctgcttaccggctttgcccgagcttcctctgcaggcggcgccaaagagaaaggactctcccaaactcccacctgggccgttgccctcgtctgtaccttcttcattcttgtctccgtcctcctcgagaaggctcttcacagagttgccacgtggttgtgggagaaacataagaactctctgcttgaagccttggagaaaataaaggcggagctgatgattctaggattcatttccttgttgctcaccttcggagagcagtacattctcaagatttgtattcctgaaaaggctgcagcctctatgttaccttgtccagctccttctactcatgaccaagacaagacccaccgcagacgtctagctgctgctacgacctcttcccgctgcgatgagggtcatgaaccactcatacctgccacgggtttgcaccagctacacattctattgttcttcatggctgcctttcatatcctctacagtttcatcaccatgatgcttggcagactcaagatccgtggctggaaaaagtgggagcaggagacatgttctcatgattacgagttttcaatcgatccatcaagattcagactcactcatgagacgtcctttgttagacaacattccagtttctggacaaaaatccccttcttcttttatgctgggtgcttcctacagcagtttttccgatctgtagggaggactgactacttaactctgcgccatggcttcatcgctgcccatttagctccaggaagaaagttcgacttccagaagtatatcaaaagatcattggaagacgatttcaaggtggtagttggaataagtcctcttttgtgggcatcatttgtaattttcctacttctgaatgttaatggctgggaagcattgttttgggcgtcaatcctacctgtacttatcattctagctgtcagtacgaagcttcaagcgatcctaacaagaatggctctgggaatcacggagagacacgcagttgttcaagggatacctctcgtgcatggttcagataagtacttttggtttaatcgccctcagttgctacttcatcttcttcacttcgccttatttcagaatgctttccagctaacatacttcttctgggtctggtattcctttgggctaaaatcttgctttcacacggatttcaaactagtcatcgtaaaactctctctaggcgttggagctttgattttgtgcagctacatcacacttcctttgtatgcactagttactcagatgggttcaaacatgaagaaagctgtgtttgatgagcaaatggcaaaagcgttgaagaaatggcacatgactgtgaagaagaagaaaggcaaagcgagaaagccaccaacagagacccttggtgtttctgacactgtcagcacctctacctcatcctttcacgcctctggagccactctactccgctccaagaccactggtcactcgacagcctcttatatgagtaatttcgaggaccaaagcatgtctgatcttgaagctgagccattatcccctgaaccaatagaggggcacactctcgtcagggttggtgatcagaacacagagatagaatatactggagatattagtcctggaaaccaattctcctttgtgaagaacgttcctgctaatgatattgactaatattcaaaatgaatgcagaacaaatccatcatccggtctttattttctattacatgtatgccaacaattgcttcgccaagt

SEQ ID NO: 91050 - protein, 584 aa, Arabidopsis thaliana
  peptide (1)..(584): Ceres Seq. ID no. 12726303
  misc_feature (46)..(519): Pfam Name: Mlo family Pfam Description: Mlo family
  misc_feature (16)..(584): Homolog of NCBI NO: 15239213 NR Description: Mlo protein-like; protein id: At5g65970.1, by cDNA: gi_14091589 [Arabidopsis thaliana]
  misc_feature (48)..(537): Homolog of NCBI NO: 30679982 NR Description: seven transmembrane MLO protein family (MLO7)
  misc_feature (16)..(81): Homolog of NCBI NO: 30679982 NR Description: seven transmembrane MLO protein family (MLO7)
  misc_feature (9)..(582): Homolog of NCBI NO: 18398444 NR Description: similar to Mlo proteins from H. vulgare; protein At2g17480.1, supported by cDNA: gi_14091585 [Arabidopsis >gi|14091586|gb|AAK53801.1|AF369569_1 membrane protein Mlo8
  misc_feature (9)..(324): Homolog of NCBI NO: 25346302 NR Description: similar to Mlo proteins from H. vulgare
  misc_feature (322)..(582): Homolog of NCBI NO: 25346302 NR Description: similar to Mlo proteins from H. vulgare
  misc_feature (152)..(537): Homolog of NCBI NO: 14091584 NR Description: membrane protein Mlo7 [Arabidopsis thaliana]
  misc_feature (35)..(542): Homolog of NCBI NO: 37536520 NR Description: putative Mlo (pathogen resistance) protein [Oryza
  misc_feature (44)..(541): Homolog of NCBI NO: 13784977 NR Description: seven transmembrane protein Mlo2 [Zea mays]
  misc_feature (150)..(478): Homolog of NCBI NO: 13784985 NR Description: seven transmembrane protein Mlo6 [Zea mays]
HVRNQGPRDFLLLATMATRCFWCWTTLLFCSQLLTGFARASSAGGAKEKGLSQTPTWAVALVCTFFILVSVLLEKALHRVATWLWEKHKNSLLEALEKIKAELMILGFISLLLTFGEQYILKICIPEKAAASMLPCPAPSTHDQDKTHRRRLAAATTSSRCDEGHEPLIPATGLHQLHILLFFMAAFHILYSFITMMLGRLKIRGWKKWEQETCSHDYEFSIDPSRFRLTHETSFVRQHSSFWTKIPFFFYAGCFLQQFFRSVGRTDYLTLRHGFIAAHLAPGRKFDFQKYIKRSLEDDFKVVVGISPLLWASFVIFLLLNVNGWEALFWASILPVLIILAVSTKLQAILTRMALGITERHAVVQGIPLVHGSDKYFWFNRPQLLLHLLHFALFQNAFQLTYFFWVWYSFGLKSCFHTDFKLVIVKLSLGVGALILCSYITLPLYALVTQMGSNMKKAVFDEQMAKALKKWHMTVKKKKGKARKPPTETLGVSDTVSTSTSSFHASGATLLRSKTTGHSTASYMSNFEDQSMSDLEAEPLSPEPIEGHTLVRVGDQNTEIEYTGDISPGNQFSFVKNVPANDID

SEQ ID NO: 91051 - protein, 569 aa, Arabidopsis thaliana
  peptide (1)..(569): Ceres Seq. ID no. 12726304
  misc_feature (31)..(504): Pfam Name: Mlo family Pfam Description: Mlo family
  misc_feature (1)..(569): Homolog of NCBI NO: 15239213 NR Description: Mlo protein-like; protein id: At5g65970.1, by cDNA: gi_14091589 [Arabidopsis thaliana]
  misc_feature (33)..(522): Homolog of NCBI NO: 30679982 NR Description: seven transmembrane MLO protein family (MLO7)
  misc_feature (1)..(66): Homolog of NCBI NO: 30679982 NR Description: seven transmembrane MLO protein family (MLO7)
  misc_feature (1)..(567): Homolog of NCBI NO: 18398444 NR Description: similar to Mlo proteins from H. vulgare; protein At2g17480.1, supported by cDNA: gi_14091585 [Arabidopsis >gi|14091586|gb|AAK53801.1|AF369569_1 membrane protein Mlo8
  misc_feature (1)..(309): Homolog of NCBI NO: 25346302 NR Description: similar to Mlo proteins from H. vulgare
  misc_feature (307)..(567): Homolog of NCBI NO: 25346302 NR Description: similar to Mlo proteins from H. vulgare
  misc_feature (137)..(522): Homolog of NCBI NO: 14091584 NR Description: membrane protein Mlo7 [Arabidopsis thaliana]
  misc_feature (20)..(527): Homolog of NCBI NO: 37536520 NR Description: putative Mlo (pathogen resistance) protein [Oryza
  misc_feature (29)..(526): Homolog of NCBI NO: 13784977 NR Description: seven transmembrane protein Mlo2 [Zea mays]
  misc_feature (135)..(463): Homolog of NCBI NO: 13784985 NR Description: seven transmembrane protein Mlo6 [Zea mays]
MATRCFWCWTTLLFCSQLLTGFARASSAGGAKEKGLSQTPTWAVALVCTFFILVSVLLEKALHRVATWLWEKHKNSLLEALEKIKAELMILGFISLLLTFGEQYILKICIPEKAAASMLPCPAPSTHDQDKTHRRRLAAATTSSRCDEGHEPLIPATGLHQLHILLFFMAAFHILYSFITMMLGRLKIRGWKKWEQETCSHDYEFSIDPSRFRLTHETSFVRQHSSFWTKIPFFFYAGCFLQQFFRSVGRTDYLTLRHGFIAAHLAPGRKFDFQKYIKRSLEDDFKVVVGISPLLWASFVIFLLLNVNGWEALFWASILPVLIILAVSTKLQAILTRMALGITERHAVVQGIPLVHGSDKYFWFNRPQLLLHLLHFALFQNAFQLTYFFWVWYSFGLKSCFHTDFKLVIVKLSLGVGALILCSYITLPLYALVTQMGSNMKKAVFDEQMAKALKKWHMTVKKKKGKARKPPTETLGVSDTVSTSTSSFHASGATLLRSKTTGHSTASYMSNFEDQSMSDLEAEPLSPEPIEGHTLVRVGDQNTEIEYTGDISPGNQFSFVKNVPANDID

SEQ ID NO: 91052 - protein, 481 aa, Arabidopsis thaliana
  peptide (1)..(481): Ceres Seq. ID no. 12726305
  misc_feature (1)..(416): Pfam Name: Mlo family Pfam Description: Mlo family
  misc_feature (1)..(481): Homolog of NCBI NO: 15239213 NR Description: Mlo protein-like; protein id: At5g65970.1, by cDNA: gi_14091589 [Arabidopsis thaliana]
  misc_feature (1)..(434): Homolog of NCBI NO: 30679982 NR Description: seven transmembrane MLO protein family (MLO7)
  misc_feature (1)..(479): Homolog of NCBI NO: 18398444 NR Description: similar to Mlo proteins from H. vulgare; protein At2g17480.1, supported by cDNA: gi_14091585 [Arabidopsis >gi|14091586|gb|AAK53801.1|AF369569_1 membrane protein Mlo8
  misc_feature (1)..(221): Homolog of NCBI NO: 25346302 NR Description: similar to Mlo proteins from H. vulgare
  misc_feature (219)..(479): Homolog of NCBI NO: 25346302 NR Description: similar to Mlo proteins from H. vulgare
  misc_feature (49)..(434): Homolog of NCBI NO: 14091584 NR Description: membrane protein Mlo7 [Arabidopsis thaliana]
  misc_feature (1)..(439): Homolog of NCBI NO: 37536520 NR Description: putative Mlo (pathogen resistance) protein [Oryza
  misc_feature (1)..(438): Homolog of NCBI NO: 13784977 NR Description: seven transmembrane protein Mlo2 [Zea mays]
  misc_feature (47)..(375): Homolog of NCBI NO: 13784985 NR Description: seven transmembrane protein Mlo6 [Zea mays]
  misc_feature (1)..(57): Homolog of NCBI NO: 13784985 NR Description: seven transmembrane protein Mlo6 [Zea mays]
MILGFISLLLTFGEQYILKICIPEKAAASMLPCPAPSTHDQDKTHRRRLAAATTSSRCDEGHEPLIPATGLHQLHILLFFMAAFHILYSFITMMLGRLKIRGWKKWEQETCSHDYEFSIDPSRFRLTHETSFVRQHSSFWTKIPFFFYAGCFLQQFFRSVGRTDYLTLRHGFIAAHLAPGRKFDFQKYIKRSLEDDFKVVVGISPLLWASFVIFLLLNVNGWEALFWASILPVLIILAVSTKLQAILTRMALGITERHAVVQGIPLVHGSDKYFWFNRPQLLLHLLHFALFQNAFQLTYFFWVWYSFGLKSCFHTDFKLVIVKLSLGVGALILCSYITLPLYALVTQMGSNMKKAVFDEQMAKALKKWHMTVKKKKGKARKPPTETLGVSDTVSTSTSSFHASGATLLRSKTTGHSTASYMSNFEDQSMSDLEAEPLSPEPIEGHTLVRVGDQNTEIEYTGDISPGNQFSFVKNVPANDID

SEQ ID NO: 91053 - DNA, 1188 bp, Arabidopsis thaliana
  misc_feature (1)..(1188): Ceres Seq. ID no. 12726306
  misc_feature: MA Experiment ID: 20000439 Result: Up-regulated in Transcription
  misc_feature: MA Experiment 20000439 PARAMETER Experiment Name: At_Roots__P Parameter: Age (day) Value: 14 vs. 21
  misc_feature: MA Experiment 20000439 PARAMETER Experiment Name: At_Roots__P Parameter: Organism Value: A. thaliana
  misc_feature: MA Experiment 20000439 PARAMETER Experiment Name: At_Roots__P Parameter: Tissue Value: Roots vs. Whole Plant
  misc_feature: MA Experiment ID: 20000451 Result: Up-regulated in Transcription
  misc_feature: MA Experiment 20000451 PARAMETER Experiment Name: At_CS6879_Shoots-Roots_P Parameter: Age (day) Value: 14
  misc_feature: MA Experiment 20000451 PARAMETER Experiment Name: At_CS6879_Shoots-Roots_P Parameter: Organism Value: A. thaliana
  misc_feature: MA Experiment 20000451 PARAMETER Experiment Name: At_CS6879_Shoots-Roots_P Parameter: Plant Line Value: CS6879 vs. WS
  misc_feature: MA Experiment 20000451 PARAMETER Experiment Name: At_CS6879_Shoots-Roots_P Parameter: Tissue Value: Roots
atgggtttcttagagttgttggaggtggcttcaatgccaatcgttcaagttcttcttatcagcgtccttggcgctttcttggcaaccgattactgctctcttctctctgctgacacccgaagatccgtgaacaagctcgtcttcgtggtattcaccccctgcatcatgtttgccaaccttgccgagactgtcacattgcaggacattatttcatggtggtttatgcccataaatgttggaatcacctttctagtaggaggcattcttggatggttggtggtcaagctactgaaccccaaacctcaacttcatggcctcataattgctacttgtgcctcaggcaatatggggaaccttatgcttatactggtccctgccatctgtgacgaggaaggcagtccttttgggaatcgtagtgtctgcagatccattgggctctcctacgcatctttctctatggccctcgggggtttctacatatggacgtacagttaccaactggtaagaagctctgctacacagtttagagctcttgaagccgccgggttggtcaagtctcccaacaaggacatcgactctgatccccacgctcttctcctcaagccgcaccaaaaccaagaccttgaaatccaaggcaaacaaaaagtgtctaccaggacatacatcaaggacttgctccatcagattcttgaggaactcttcgcaccacccaccattggtgccattcttggcttcgtcttcggagcaaccaattggctaaggaatcttataattggggagaatgccccgttgcgagtgatccaagactcagtaaagctacttggggagggcacaattccttgcatcacactcatactggggggaaacctgattcagggtctgcgttcatcagctgtgaagaaatcagtgattgtgggagtgataattgtgcgctatatcctccttcccgtggtgggagtcggggtggtccaattagcaggaaatctaggctatcttcctccagaccctctctttcgatacgttctcatgcttcagttcgcactaccgcctgccatgaatattagcacaatggcacaactgttcgacgtggctcaagatgagtgctcggtcatcttcttgtggacctacctggttgcatctttagccctcaccgtctggtcaaccatcttcctctccatcctctcctga

SEQ ID NO: 91054 - protein, 395 aa, Arabidopsis thaliana
  peptide (1)..(395): Ceres Seq. ID no. 12726307
  misc_feature (9)..(387): Pfam Name: Auxin Efflux Carrier Pfam Description: Auxin Efflux Carrier
  misc_feature (1)..(395): Homolog of NCBI NO: 15239215 NR Description: putative protein; protein id: At5g65980.1 thaliana] >gi|10177113|dbj|BAB10403.1|
  misc_feature (1)..(394): Homolog of NCBI NO: 18398448 NR Description: expressed protein; protein id: At2g17500.1, by cDNA: 105072. [Arabidopsis thaliana] >gi|25411796|pir||H84552
  misc_feature (1)..(394): Homolog of NCBI NO: 21536598 NR Description: unknown [Arabidopsis thaliana]
  misc_feature (1)..(395): Homolog of NCBI NO: 22329697 NR Description: hypothetical protein; protein id: At1g20925.1
  misc_feature (4)..(395): Homolog of NCBI NO: 18411126 NR Description: expressed protein; protein id: At1g76520.1, by cDNA: 142725., supported by cDNA: gi_20466517 [Arabidopsis
  misc_feature (4)..(395): Homolog of NCBI NO: 21553424 NR Description: unknown [Arabidopsis thaliana]
  misc_feature (218)..(395): Homolog of NCBI NO: 34394344 NR Description: auxin efflux carrier protein family-like protein
  misc_feature (12)..(183): Homolog of NCBI NO: 18409758 NR Description: expressed protein; protein id: At1g71090.1, by cDNA: gi_15028380, supported by cDNA: gi_19310750 [Arabidopsis
  misc_feature (230)..(393): Homolog of NCBI NO: 18409758 NR Description: expressed protein; protein id: At1g71090.1, by cDNA: gi_15028380, supported by cDNA: gi_19310750 [Arabidopsis
  misc_feature (4)..(394): Homolog of NCBI NO: 15241659 NR Description: putative protein; protein id: At5g01990.1
MGFLELLEVASMPIVQVLLISVLGAFLATDYCSLLSADTRRSVNKLVFVVFTPCIMFANLAETVTLQDIISWWFMPINVGITFLVGGILGWLVVKLLNPKPQLHGLIIATCASGNMGNLMLILVPAICDEEGSPFGNRSVCRSIGLSYASFSMALGGFYIWTYSYQLVRSSATQFRALEAAGLVKSPNKDIDSDPHALLLKPHQNQDLEIQGKQKVSTRTYIKDLLHQILEELFAPPTIGAILGFVFGATNWLRNLIIGENAPLRVIQDSVKLLGEGTIPCITLILGGNLIQGLRSSAVKKSVIVGVIIVRYILLPVVGVGVVQLAGNLGYLPPDPLFRYVLMLQFALPPAMNISTMAQLFDVAQDECSVIFLWTYLVASLALTVWSTIFLSILS

SEQ ID NO: 91055 - protein, 384 aa, Arabidopsis thaliana
  peptide (1)..(384): Ceres Seq. ID no. 12726308
  misc_feature (1)..(376): Pfam Name: Auxin Efflux Carrier Pfam Description: Auxin Efflux Carrier
  misc_feature (1)..(384): Homolog of NCBI NO: 15239215 NR Description: putative protein; protein id: At5g65980.1 thaliana] >gi|10177113|dbj|BAB10403.1|
  misc_feature (1)..(383): Homolog of NCBI NO: 18398448 NR Description: expressed protein; protein id: At2g17500.1, by cDNA: 105072. [Arabidopsis thaliana] >gi|25411796|pir||H84552
  misc_feature (1)..(383): Homolog of NCBI NO: 21536598 NR Description: unknown [Arabidopsis thaliana]
  misc_feature (1)..(384): Homolog of NCBI NO: 22329697 NR Description: hypothetical protein; protein id: At1g20925.1
  misc_feature (1)..(384): Homolog of NCBI NO: 18411126 NR Description: expressed protein; protein id: At1g76520.1, by cDNA: 142725., supported by cDNA: gi_20466517 [Arabidopsis
  misc_feature (1)..(384): Homolog of NCBI NO: 21553424 NR Description: unknown [Arabidopsis thaliana]
  misc_feature (207)..(384): Homolog of NCBI NO: 34394344 NR Description: auxin efflux carrier protein family-like protein
  misc_feature (1)..(172): Homolog of NCBI NO: 18409758 NR Description: expressed protein; protein id: At1g71090.1, by cDNA: gi_15028380, supported by cDNA: gi_19310750 [Arabidopsis
  misc_feature (219)..(382): Homolog of NCBI NO: 18409758 NR Description: expressed protein; protein id: At1g71090.1, by cDNA: gi_15028380, supported by cDNA: gi_19310750 [Arabidopsis
  misc_feature (1)..(383): Homolog of NCBI NO: 15241659 NR Description: putative protein; protein id: At5g01990.1
MPIVQVLLISVLGAFLATDYCSLLSADTRRSVNKLVFVVFTPCIMFANLAETVTLQDIISWWFMPINVGITFLVGGILGWLVVKLLNPKPQLHGLIIATCASGNMGNLMLILVPAICDEEGSPFGNRSVCRSIGLSYASFSMALGGFYIWTYSYQLVRSSATQFRALEAAGLVKSPNKDIDSDPHALLLKPHQNQDLEIQGKQKVSTRTYIKDLLHQILEELFAPPTIGAILGFVFGATNWLRNLIIGENAPLRVIQDSVKLLGEGTIPCITLILGGNLIQGLRSSAVKKSVIVGVIIVRYILLPVVGVGVVQLAGNLGYLPPDPLFRYVLMLQFALPPAMNISTMAQLFDVAQDECSVIFLWTYLVASLALTVWSTIFLSILS

SEQ ID NO: 91056 - protein, 340 aa, Arabidopsis thaliana
  peptide (1)..(340): Ceres Seq. ID no. 12726309
  misc_feature (1)..(332): Pfam Name: Auxin Efflux Carrier Pfam Description: Auxin Efflux Carrier
  misc_feature (1)..(340): Homolog of NCBI NO: 15239215 NR Description: putative protein; protein id: At5g65980.1 thaliana] >gi|10177113|dbj|BAB10403.1|
  misc_feature (1)..(339): Homolog of NCBI NO: 18398448 NR Description: expressed protein; protein id: At2g17500.1, by cDNA: 105072. [Arabidopsis thaliana] >gi|25411796|pir||H84552
  misc_feature (1)..(339): Homolog of NCBI NO: 21536598 NR Description: unknown [Arabidopsis thaliana]
  misc_feature (1)..(340): Homolog of NCBI NO: 22329697 NR Description: hypothetical protein; protein id: At1g20925.1
  misc_feature (1)..(340): Homolog of NCBI NO: 18411126 NR Description: expressed protein; protein id: At1g76520.1, by cDNA: 142725., supported by cDNA: gi_20466517 [Arabidopsis
  misc_feature (1)..(340): Homolog of NCBI NO: 21553424 NR Description: unknown [Arabidopsis thaliana]
  misc_feature (163)..(340): Homolog of NCBI NO: 34394344 NR Description: auxin efflux carrier protein family-like protein
  misc_feature (1)..(128): Homolog of NCBI NO: 18409758 NR Description: expressed protein; protein id: At1g71090.1, by cDNA: gi_15028380, supported by cDNA: gi_19310750 [Arabidopsis
  misc_feature (175)..(338): Homolog of NCBI NO: 18409758 NR Description: expressed protein; protein id: At1g71090.1, by cDNA: gi_15028380, supported by cDNA: gi_19310750 [Arabidopsis
  misc_feature (1)..(339): Homolog of NCBI NO: 15241659 NR Description: putative protein; protein id: At5g01990.1
MFANLAETVTLQDIISWWFMPINVGITFLVGGILGWLVVKLLNPKPQLHGLIIATCASGNMGNLMLILVPAICDEEGSPFGNRSVCRSIGLSYASFSMALGGFYIWTYSYQLVRSSATQFRALEAAGLVKSPNKDIDSDPHALLLKPHQNQDLEIQGKQKVSTRTYIKDLLHQILEELFAPPTIGAILGFVFGATNWLRNLIIGENAPLRVIQDSVKLLGEGTIPCITLILGGNLIQGLRSSAVKKSVIVGVIIVRYILLPVVGVGVVQLAGNLGYLPPDPLFRYVLMLQFALPPAMNISTMAQLFDVAQDECSVIFLWTYLVASLALTVWSTIFLSILS

SEQ ID NO: 91057 - DNA, 366 bp, Arabidopsis thaliana
  misc_feature (1)..(366): Ceres Seq. ID no. 12726322
  misc_feature: MA Experiment ID: 20000307 Result: Down-regulated in Transcription
  misc_feature: MA Experiment 20000307 PARAMETER Experiment Name: At_Germinating_Seeds_Sub_P Parameter: Age (hr) Value: 24 vs. 0
  misc_feature: MA Experiment 20000307 PARAMETER Experiment Name: At_Germinating_Seeds_Sub_P Parameter: Organism Value: A. thaliana
  misc_feature: MA Experiment 20000307 PARAMETER Experiment Name: At_Germinating_Seeds_Sub_P Parameter: Plant Line Value: WS
  misc_feature: MA Experiment 20000307 PARAMETER Experiment Name: At_Germinating_Seeds_Sub_P Parameter: Tissue Value: Germinating Seeds
  misc_feature: MA Experiment ID: 20000329 Result: Down-regulated in Transcription
  misc_feature: MA Experiment 20000329 PARAMETER Experiment Name: At_4deg_Cold_Sub_P Parameter: Age (day) Value: 14
  misc_feature: MA Experiment 20000329 PARAMETER Experiment Name: At_4deg_Cold_Sub_P Parameter: Organism Value: A. thaliana
  misc_feature: MA Experiment 20000329 PARAMETER Experiment Name: At_4deg_Cold_Sub_P Parameter: Plant Line Value: WS
  misc_feature: MA Experiment 20000329 PARAMETER Experiment Name: At_4deg_Cold_Sub_P Parameter: Temperature (deg C) Value: 4 vs. 22
  misc_feature: MA Experiment 20000329 PARAMETER Experiment Name: At_4deg_Cold_Sub_P Parameter: Timepoint (hr) Value: 6
  misc_feature: MA Experiment 20000329 PARAMETER Experiment Name: At_4deg_Cold_Sub_P Parameter: Tissue Value: Aerial
  misc_feature: MA Experiment ID: 20000332 Result: Down-regulated in Transcription
  misc_feature: MA Experiment 20000332 PARAMETER Experiment Name: At_4deg_Cold_Sub_P Parameter: Age (day) Value: 14
  misc_feature: MA Experiment 20000332 PARAMETER Experiment Name: At_4deg_Cold_Sub_P Parameter: Organism Value: A. thaliana
  misc_feature: MA Experiment 20000332 PARAMETER Experiment Name: At_4deg_Cold_Sub_P Parameter: Plant Line Value: WS
  misc_feature: MA Experiment 20000332 PARAMETER Experiment Name: At_4deg_Cold_Sub_P Parameter: Temperature (deg C) Value: 4 vs. 22
  misc_feature: MA Experiment 20000332 PARAMETER Experiment Name: At_4deg_Cold_Sub_P Parameter: Timepoint (hr) Value: 2
  misc_feature: MA Experiment 20000332 PARAMETER Experiment Name: At_4deg_Cold_Sub_P Parameter: Tissue Value: Aerial
  misc_feature: MA Experiment ID: 20000352 Result: Up-regulated in Transcription
  misc_feature: MA Experiment 20000352 PARAMETER Experiment Name: At_Drought_Sub_P Parameter: Age (day) Value: 7
  misc_feature: MA Experiment 20000352 PARAMETER Experiment Name: At_Drought_Sub_P Parameter: Organism Value: A. thaliana
  misc_feature: MA Experiment 20000352 PARAMETER Experiment Name: At_Drought_Sub_P Parameter: Plant Line Value: WS
  misc_feature: MA Experiment 20000352 PARAMETER Experiment Name: At_Drought_Sub_P Parameter: Timepoint (hr) Value: 6
  misc_feature: MA Experiment 20000352 PARAMETER Experiment Name: At_Drought_Sub_P Parameter: Tissue Value: Whole Plant
  misc_feature: MA Experiment 20000352 PARAMETER Experiment Name: At_Drought_Sub_P Parameter: Treatment Value: Drought vs. No Drought
  misc_feature: MA Experiment ID: 20000355 Result: Down-regulated in Transcription
  misc_feature: MA Experiment 20000355 PARAMETER Experiment Name: At_Siliques_Sub_P Parameter: Age (day) Value: 21
  misc_feature: MA Experiment 20000355 PARAMETER Experiment Name: At_Siliques_Sub_P Parameter: Organism Value: A. thaliana
  misc_feature: MA Experiment 20000355 PARAMETER Experiment Name: At_Siliques_Sub_P Parameter: Plant Line Value: WS
  misc_feature: MA Experiment 20000355 PARAMETER Experiment Name: At_Siliques_Sub_P Parameter: Tissue Value: Less Than 5mm Siliques vs. Whole Plant
atggactgcgaagggtgcgagagacgggtgaggaagtcggtggaaggcatgaaaggagtcagcaaagtcaccgtcgatcctaaacagagcaaactcacggtcgagggattcgtccaaccgagcaaggtggtgcatcgggtgatgcatcggacagggaagaaggcggagctgtggccttacgtaccttacgaggtggtgccacacccttacgcacctggtgcctacgacaagaaggcccctcctggttacgttcgtaatgcactcgccgaccctctagtggccccgcttgctcgtgccagctccttcgaggtcaaatacacttctgctttcagcgatgacaatcccaacgcttgtaccatcatgtga

SEQ ID NO: 91058 - protein, 121 aa, Arabidopsis thaliana
  peptide (1)..(121): Ceres Seq. ID no. 12726323
  misc_feature (1)..(57): Pfam Name: Heavy-metal-associated domain Pfam Description: Heavy-metal-associated domain
  misc_feature (1)..(121): Homolog of NCBI NO: 15239266 NR Description: expressed protein; protein id: At5g66110.1
MDCEGCERRVRKSVEGMKGVSKVTVDPKQSKLTVEGFVQPSKVVHRVMHRTGKKAELWPYVPYEVVPHPYAPGAYDKKAPPGYVRNALADPLVAPLARASSFEVKYTSAFSDDNPNACTIM

SEQ ID NO: 91059 - protein, 105 aa, Arabidopsis thaliana
  peptide (1)..(105): Ceres Seq. ID no. 12726324
  misc_feature (1)..(41): Pfam Name: Heavy-metal-associated domain Pfam Description: Heavy-metal-associated domain
  misc_feature (1)..(105): Homolog of NCBI NO: 15239266 NR Description: expressed protein; protein id: At5g66110.1
MKGVSKVTVDPKQSKLTVEGFVQPSKVVHRVMHRTGKKAELWPYVPYEVVPHPYAPGAYDKKAPPGYVRNALADPLVAPLARASSFEVKYTSAFSDDNPNACTIM

SEQ ID NO: 91060 - protein, 74 aa, Arabidopsis thaliana
  peptide (1)..(74): Ceres Seq. ID no. 12726325
  misc_feature (1)..(74): Homolog of NCBI NO: 15239266 NR Description: expressed protein; protein id: At5g66110.1
MHRTGKKAELWPYVPYEVVPHPYAPGAYDKKAPPGYVRNALADPLVAPLARASSFEVKYTSAFSDDNPNACTIM

SEQ ID NO: 91061 - DNA, 978 bp, Arabidopsis thaliana
  misc_feature (1)..(978): Ceres Seq. ID no. 12726330
  misc_feature: MA Experiment ID: 20000184 Result: Down-regulated in Transcription
  misc_feature: MA Experiment 20000184 PARAMETER Experiment Name: At_Shoots__P Parameter: Age (day) Value: 7
  misc_feature: MA Experiment 20000184 PARAMETER Experiment Name: At_Shoots__P Parameter: Tissue Value: Shoots vs. Whole Plant
  misc_feature: MA Experiment ID: 20001450 Result: Up-regulated in Transcription
  misc_feature: MA Experiment 20001450 PARAMETER Experiment Name: At_Far-red-induction_P Parameter: Age (day) Value: 7
  misc_feature: MA Experiment 20001450 PARAMETER Experiment Name: At_Far-red-induction_P Parameter: Light Value: Far-red vs. White
  misc_feature: MA Experiment 20001450 PARAMETER Experiment Name: At_Far-red-induction_P Parameter: Organism Value: A. thaliana
  misc_feature: MA Experiment 20001450 PARAMETER Experiment Name: At_Far-red-induction_P Parameter: Plant Line Value: Columbia
  misc_feature: MA Experiment 20001450 PARAMETER Experiment Name: At_Far-red-induction_P Parameter: Timepoint (hr) Value: 8
  misc_feature: MA Experiment 20001450 PARAMETER Experiment Name: At_Far-red-induction_P Parameter: Tissue Value: Whole Plant
  misc_feature: MA Experiment ID: 20001451 Result: Up-regulated in Transcription
  misc_feature: MA Experiment 20001451 PARAMETER Experiment Name: At_Far-red-induction_P Parameter: Age (day) Value: 7
  misc_feature: MA Experiment 20001451 PARAMETER Experiment Name: At_Far-red-induction_P Parameter: Light Value: Far-red vs. White
  misc_feature: MA Experiment 20001451 PARAMETER Experiment Name: At_Far-red-induction_P Parameter: Organism Value: A. thaliana
  misc_feature: MA Experiment 20001451 PARAMETER Experiment Name: At_Far-red-induction_P Parameter: Plant Line Value: Columbia
  misc_feature: MA Experiment 20001451 PARAMETER Experiment Name: At_Far-red-induction_P Parameter: Timepoint (hr) Value: 24
  misc_feature: MA Experiment 20001451 PARAMETER Experiment Name: At_Far-red-induction_P Parameter: Tissue Value: Whole Plant
atggaagaaacgtccaagctacagttaccggagagtttccttagctttctagaggcgaatggccttgatccttcaatctatactcacggagattcaattccacgttatgtaaggttgaaacctggattcgaggatgctttcgaagagattgaatccgaaattaactgtaaactggagaaggtgaattggttaccaggattttactccatccctccagatgttcatatagccagaaccaaggcctatcagcaaggcatgatgtacggaatcgatgcagcttccggtgccgctgtctcagctcttggtatctccccaggagaccatgtcttggatctttgtgctgctcctggtgagtcatgtgtggacgatcatgaagacacattcaagcagtggacctcccgtagaccttacaaagaaaggaaacaagaagctaaggcaaggaagaattctgttttgccgcagaatggacaggcagaaattattttctacggacagggttctggagtaatcgggctaaaaaagaatgaactttatagatcccttgaccaaaatgattatgcatcttatgggtatgataaggttcttgtggacgcagagtgcacacacgatggttcgatcaaacatatccagaaatttgagcaatggggttggaaaactctggaacgccgtgttctggatgctgagagaaccgatacaaacttaaaagctcttcagttgaatctactgagaaatggattcagattgttgaaagaagctggcactctagtgtacagcacctgcagtgggaagactaacagaaaactgggttatgacgatgcagagctacaagagattgaaatggccaaggattggccgtgtagaagtggtcgcacgcctaagacactgcggtttgatccttccacctcagcaaccagcggccttttcgttgcaaaaatcaggaaattgccacccaacgaagcaaagaagaatgtgttgtga

SEQ ID NO: 91062 - protein, 325 aa, Arabidopsis thaliana
  peptide (1)..(325): Ceres Seq. ID no. 12726331
  misc_feature (233)..(311): Pfam Name: NOL1/NOP2/sun family Pfam Description: NOL1/NOP2/sun family
  misc_feature (1)..(325): Homolog of NCBI NO: 15239280 NR Description: putative protein; protein id: At5g66180.1 thaliana] >gi|10177133|dbj|BAB10423.1| contains similarity to
  misc_feature (117)..(316): Homolog of NCBI NO: 18481712 NR Description: putative nucleolar protein [Sorghum bicolor]
  misc_feature (87)..(117): Homolog of NCBI NO: 18481712 NR Description: putative nucleolar protein [Sorghum bicolor]
  misc_feature (3)..(90): Homolog of NCBI NO: 18481711 NR Description: putative phosphate/phosphoenolpyruvate
  misc_feature (192)..(314): Homolog of NCBI NO: 20094206 NR Description: tRNA/rRNA cytosine-C5-methylase [Methanopyrus
  misc_feature (76)..(120): Homolog of NCBI NO: 20094206 NR Description: tRNA/rRNA cytosine-C5-methylase [Methanopyrus
  misc_feature (170)..(314): Homolog of NCBI NO: 18977637 NR Description: putative nucleolar protein II (nol1-nop2-sun [Pyrococcus furiosus DSM 3638] >gi|18893359|gb|AAL81389.1|
  misc_feature (76)..(117): Homolog of NCBI NO: 18977637 NR Description: putative nucleolar protein II (nol1-nop2-sun [Pyrococcus furiosus DSM 3638] >gi|18893359|gb|AAL81389.1|
MEETSKLQLPESFLSFLEANGLDPSIYTHGDSIPRYVRLKPGFEDAFEEIESEINCKLEKVNWLPGFYSIPPDVHIARTKAYQQGMMYGIDAASGAAVSALGISPGDHVLDLCAAPGESCVDDHEDTFKQWTSRRPYKERKQEAKARKNSVLPQNGQAEIIFYGQGSGVIGLKKNELYRSLDQNDYASYGYDKVLVDAECTHDGSIKHIQKFEQWGWKTLERRVLDAERTDTNLKALQLNLLRNGFRLLKEAGTLVYSTCSGKTNRKLGYDDAELQEIEMAKDWPCRSGRTPKTLRFDPSTSATSGLFVAKIRKLPPNEAKKNVL

SEQ ID NO: 91063 - protein, 240 aa, Arabidopsis thaliana
  peptide (1)..(240): Ceres Seq. ID no. 12726332
  misc_feature (148)..(226): Pfam Name: NOL1/NOP2/sun family Pfam Description: NOL1/NOP2/sun family
  misc_feature (1)..(240): Homolog of NCBI NO: 15239280 NR Description: putative protein; protein id: At5g66180.1 thaliana] >gi|10177133|dbj|BAB10423.1| contains similarity to
  misc_feature (32)..(231): Homolog of NCBI NO: 18481712 NR Description: putative nucleolar protein [Sorghum bicolor]
  misc_feature (2)..(32): Homolog of NCBI NO: 18481712 NR Description: putative nucleolar protein [Sorghum bicolor]
  misc_feature (107)..(229): Homolog of NCBI NO: 20094206 NR Description: tRNA/rRNA cytosine-C5-methylase [Methanopyrus
  misc_feature (1)..(35): Homolog of NCBI NO: 20094206 NR Description: tRNA/rRNA cytosine-C5-methylase [Methanopyrus
  misc_feature (85)..(229): Homolog of NCBI NO: 18977637 NR Description: putative nucleolar protein II (nol1-nop2-sun [Pyrococcus furiosus DSM 3638] >gi|18893359|gb|AAL81389.1|
  misc_feature (1)..(32): Homolog of NCBI NO: 18977637 NR Description: putative nucleolar protein II (nol1-nop2-sun [Pyrococcus furiosus DSM 3638] >gi|18893359|gb|AAL81389.1|
MMYGIDAASGAAVSALGISPGDHVLDLCAAPGESCVDDHEDTFKQWTSRRPYKERKQEAKARKNSVLPQNGQAEIIFYGQGSGVIGLKKNELYRSLDQNDYASYGYDKVLVDAECTHDGSIKHIQKFEQWGWKTLERRVLDAERTDTNLKALQLNLLRNGFRLLKEAGTLVYSTCSGKTNRKLGYDDAELQEIEMAKDWPCRSGRTPKTLRFDPSTSATSGLFVAKIRKLPPNEAKKNVL

SEQ ID NO: 91064 - protein, 239 aa, Arabidopsis thaliana
  peptide (1)..(239): Ceres Seq. ID no. 12726333
  misc_feature (147)..(225): Pfam Name: NOL1/NOP2/sun family Pfam Description: NOL1/NOP2/sun family
  misc_feature (1)..(239): Homolog of NCBI NO: 15239280 NR Description: putative protein; protein id: At5g66180.1 thaliana] >gi|10177133|dbj|BAB10423.1| contains similarity to
  misc_feature (31)..(230): Homolog of NCBI NO: 18481712 NR Description: putative nucleolar protein [Sorghum bicolor]
  misc_feature (1)..(31): Homolog of NCBI NO: 18481712 NR Description: putative nucleolar protein [Sorghum bicolor]
  misc_feature (106)..(228): Homolog of NCBI NO: 20094206 NR Description: tRNA/rRNA cytosine-C5-methylase [Methanopyrus
  misc_feature (1)..(34): Homolog of NCBI NO: 20094206 NR Description: tRNA/rRNA cytosine-C5-methylase [Methanopyrus
  misc_feature (84)..(228): Homolog of NCBI NO: 18977637 NR Description: putative nucleolar protein II (nol1-nop2-sun [Pyrococcus furiosus DSM 3638] >gi|18893359|gb|AAL81389.1|
  misc_feature (1)..(31): Homolog of NCBI NO: 18977637 NR Description: putative nucleolar protein II (nol1-nop2-sun [Pyrococcus furiosus DSM 3638] >gi|18893359|gb|AAL81389.1|
MYGIDAASGAAVSALGISPGDHVLDLCAAPGESCVDDHEDTFKQWTSRRPYKERKQEAKARKNSVLPQNGQAEIIFYGQGSGVIGLKKNELYRSLDQNDYASYGYDKVLVDAECTHDGSIKHIQKFEQWGWKTLERRVLDAERTDTNLKALQLNLLRNGFRLLKEAGTLVYSTCSGKTNRKLGYDDAELQEIEMAKDWPCRSGRTPKTLRFDPSTSATSGLFVAKIRKLPPNEAKKNVL

SEQ ID NO: 91065 - DNA, 1776 bp, Arabidopsis thaliana
  misc_feature (1)..(1776): Ceres Seq. ID no. 12726334
  misc_feature: MA Experiment ID: 20000307 Result: Down-regulated in Transcription
  misc_feature: MA Experiment 20000307 PARAMETER Experiment Name: At_Germinating_Seeds_Sub_P Parameter: Age (hr) Value: 24 vs. 0
  misc_feature: MA Experiment 20000307 PARAMETER Experiment Name: At_Germinating_Seeds_Sub_P Parameter: Organism Value: A. thaliana
  misc_feature: MA Experiment 20000307 PARAMETER Experiment Name: At_Germinating_Seeds_Sub_P Parameter: Plant Line Value: WS
  misc_feature: MA Experiment 20000307 PARAMETER Experiment Name: At_Germinating_Seeds_Sub_P Parameter: Tissue Value: Germinating Seeds
  misc_feature: MA Experiment ID: 20000315 Result: Down-regulated in Transcription
  misc_feature: MA Experiment 20000315 PARAMETER Experiment Name: At_14day_Shoots-Roots_Sub_P Parameter: Age (day) Value: 14
  misc_feature: MA Experiment 20000315 PARAMETER Experiment Name: At_14day_Shoots-Roots_Sub_P Parameter: Organism Value: A. thaliana
  misc_feature: MA Experiment 20000315 PARAMETER Experiment Name: At_14day_Shoots-Roots_Sub_P Parameter: Plant Line Value: WS
  misc_feature: MA Experiment 20000315 PARAMETER Experiment Name: At_14day_Shoots-Roots_Sub_P Parameter: Tissue Value: Shoots vs. Whole Plant
  misc_feature: MA Experiment ID: 20000328 Result: Down-regulated in Transcription
  misc_feature: MA Experiment 20000328 PARAMETER Experiment Name: At_42deg_Heat_Sub_P Parameter: Age (day) Value: 14
  misc_feature: MA Experiment 20000328 PARAMETER Experiment Name: At_42deg_Heat_Sub_P Parameter: Organism Value: A. thaliana
  misc_feature: MA Experiment 20000328 PARAMETER Experiment Name: At_42deg_Heat_Sub_P Parameter: Plant Line Value: WS
  misc_feature: MA Experiment 20000328 PARAMETER Experiment Name: At_42deg_Heat_Sub_P Parameter: Temperature (deg C) Value: 42 vs. 22
  misc_feature: MA Experiment 20000328 PARAMETER Experiment Name: At_42deg_Heat_Sub_P Parameter: Timepoint (hr) Value: 6
  misc_feature: MA Experiment 20000328 PARAMETER Experiment Name: At_42deg_Heat_Sub_P Parameter: Tissue Value: Aerial
atgttgaagtccataagcagcagcagcggcgacgatcatcttctttctctgatcgtatcttccaccggaaaactccatctccggcagattcacgccctcttactccgcacttccttaatcagaaactctgacgttttccaccatttcctctctcgtctcgctctctctctgattcctcgagacatcaattactcatgccgagttttctcccagagattgaacccaactctctctcactgcaacaccatgatcagagctttctctctcagccaaactccatgcgaagggtttcgcttgtttcgatctcttcgacgaaacagctctcttcctgctaatccgctctcgtcttcttttgctctcaagtgttgtatcaaatcaggtgacttactcggtggtttgcagattcacggcaagattttcagtgatgggtttctctcggatagtcttcttatgacgactctgatggatctttactccacttgcgaaaacagtactgatgcatgtaaagtgttcgacgaaattcccaagagagatactgtttcttggaatgtgctgttttcgtgttatctgcggaataaacgtacgagagatgttttagttttgtttgataagatgaagaacgatgtcgatggttgtgtaaaaccagatggtgtaacatgtttgttagctttacaagcttgtgctaacttgggggcgttggattttggtaaacaagttcatgactttatcgatgaaaatggactcagtggtgctttgaatttgagtaacactctggtttcaatgtactcacgttgcgggtctatggataaggcttaccaagtattttatggaatgcgtgaaagaaacgtagtctcgtggacggctctgatctcgggtttagctatgaatgggtttggaaaagaagccattgaagctttcaacgaaatgttgaagtttggaatctctccagaggaacagacactcactggtttattgtctgcctgtagccattccgggctggtcgctgaaggaatgatgtttttcgatagaatgaggagtggtgaatttaagataaagccaaatttacatcactatggctgcgttgttgacctcttgggacgtgctcgtctacttgataaagcttacagtctcattaagtcaatggagatgaaaccggactcaaccatttggcgtacgcttctcggggcttgtagagtccatggagatgtggaacttggggaacgtgtgatctctcatctcatcgaactcaaagccgaagaagctggagattacgttctgttactcaacacatactccacggttgggaaatgggagaaagtgactgaattgcgttctttaatgaaggagaaaagaatccatactaaacctggatgcagcgcgatcgagctacaaggaaccgttcatgagtttatagtagacgatgtttcgcatccgcggaaggaagaaatctataaaatgctggcggaaatcaatcagcagctgaagattgcggggtatgtggcggaaattacatcggaactgcacaatcttgagtcagaagaagaaaagggatacgcgttaagataccatagcgagaagctagctatagcctttgggattctggtgactccaccaggaacaaccattagagtgaccaagaatctcagaacttgtgttgattgtcataattttgcaaagtttgtatctgatgtttatgatcgtatcgtgatcgttagagaccgttccagatttcatcattttaaaggcggctcttgctcttgtaatgacttttggtga

SEQ ID NO: 91066 - protein, 591 aa, Arabidopsis thaliana
  peptide (1)..(591): Ceres Seq. ID no. 12726335
  misc_feature (180)..(214): Pfam Name: PPR repeat Pfam Description: PPR repeat
  misc_feature (149)..(591): Homolog of NCBI NO: 15239745 NR Description: selenium-binding protein-like; protein id:
  misc_feature (27)..(206): Homolog of NCBI NO: 15239745 NR Description: selenium-binding protein-like; protein id:
  misc_feature (14)..(591): Homolog of NCBI NO: 34393394 NR Description: putative pentatricopeptide (PPR)
  misc_feature (81)..(591): Homolog of NCBI NO: 15223099 NR Description: unknown protein; protein id: At1g08070.1 thaliana] >gi|8778839|gb|AAF79838.1|AC026875_18 T6D22.15
  misc_feature (2)..(591): Homolog of NCBI NO: 29124127 NR Description: hypothetical protein [Oryza sativa (japonica
  misc_feature (19)..(576): Homolog of NCBI NO: 7486979 NR Description: hypothetical protein T13K14.230 - Arabidopsis
  misc_feature (27)..(591): Homolog of NCBI NO: 15228954 NR Description: putative protein; protein id: At3g56550.1
  misc_feature (170)..(591): Homolog of NCBI NO: 34910298 NR Description: P0013F10.8 [Oryza sativa (japonica
  misc_feature (100)..(205): Homolog of NCBI NO: 34910298 NR Description: P0013F10.8 [Oryza sativa (japonica
  misc_feature (2)..(591): Homolog of NCBI NO: 8778758 NR Description: T30E16.32 [Arabidopsis thaliana]
MLKSISSSSGDDHLLSLIVSSTGKLHLRQIHALLLRTSLIRNSDVFHHFLSRLALSLIPRDINYSCRVFSQRLNPTLSHCNTMIRAFSLSQTPCEGFRLFRSLRRNSSLPANPLSSSFALKCCIKSGDLLGGLQIHGKIFSDGFLSDSLLMTTLMDLYSTCENSTDACKVFDEIPKRDTVSWNVLFSCYLRNKRTRDVLVLFDKMKNDVDGCVKPDGVTCLLALQACANLGALDFGKQVHDFIDENGLSGALNLSNTLVSMYSRCGSMDKAYQVFYGMRERNVVSWTALISGLAMNGFGKEAIEAFNEMLKFGISPEEQTLTGLLSACSHSGLVAEGMMFFDRMRSGEFKIKPNLHHYGCVVDLLGRARLLDKAYSLIKSMEMKPDSTIWRTLLGACRVHGDVELGERVISHLIELKAEEAGDYVLLLNTYSTVGKWEKVTELRSLMKEKRIHTKPGCSAIELQGTVHEFIVDDVSHPRKEEIYKMLAEINQQLKIAGYVAEITSELHNLESEEEKGYALRYHSEKLAIAFGILVTPPGTTIRVTKNLRTCVDCHNFAKFVSDVYDRIVIVRDRSRFHHFKGGSCSCNDFW

SEQ ID NO: 91067 - protein, 509 aa, Arabidopsis thaliana
  peptide (1)..(509): Ceres Seq. ID no. 12726336
  misc_feature (98)..(132): Pfam Name: PPR repeat Pfam Description: PPR repeat
  misc_feature (67)..(509): Homolog of NCBI NO: 15239745 NR Description: selenium-binding protein-like; protein id:
  misc_feature (1)..(124): Homolog of NCBI NO: 15239745 NR Description: selenium-binding protein-like; protein id:
  misc_feature (1)..(509): Homolog of NCBI NO: 34393394 NR Description: putative pentatricopeptide (PPR)
  misc_feature (1)..(509): Homolog of NCBI NO: 15223099 NR Description: unknown protein; protein id: At1g08070.1 thaliana] >gi|8778839|gb|AAF79838.1|AC026875_18 T6D22.15
  misc_feature (1)..(509): Homolog of NCBI NO: 29124127 NR Description: hypothetical protein [Oryza sativa (japonica
  misc_feature (1)..(494): Homolog of NCBI NO: 7486979 NR Description: hypothetical protein T13K14.230 - Arabidopsis
  misc_feature (1)..(509): Homolog of NCBI NO: 15228954 NR Description: putative protein; protein id: At3g56550.1
  misc_feature (88)..(509): Homolog of NCBI NO: 34910298 NR Description: P0013F10.8 [Oryza sativa (japonica
  misc_feature (18)..(123): Homolog of NCBI NO: 34910298 NR Description: P0013F10.8 [Oryza sativa (japonica
  misc_feature (1)..(509): Homolog of NCBI NO: 8778758 NR Description: T30E16.32 [Arabidopsis thaliana]
MIRAFSLSQTPCEGFRLFRSLRRNSSLPANPLSSSFALKCCIKSGDLLGGLQIHGKIFSDGFLSDSLLMTTLMDLYSTCENSTDACKVFDEIPKRDTVSWNVLFSCYLRNKRTRDVLVLFDKMKNDVDGCVKPDGVTCLLALQACANLGALDFGKQVHDFIDENGLSGALNLSNTLVSMYSRCGSMDKAYQVFYGMRERNVVSWTALISGLAMNGFGKEAIEAFNEMLKFGISPEEQTLTGLLSACSHSGLVAEGMMFFDRMRSGEFKIKPNLHHYGCVVDLLGRARLLDKAYSLIKSMEMKPDSTIWRTLLGACRVHGDVELGERVISHLIELKAEEAGDYVLLLNTYSTVGKWEKVTELRSLMKEKRIHTKPGCSAIELQGTVHEFIVDDVSHPRKEEIYKMLAEINQQLKIAGYVAEITSELHNLESEEEKGYALRYHSEKLAIAFGILVTPPGTTIRVTKNLRTCVDCHNFAKFVSDVYDRIVIVRDRSRFHHFKGGSCSCNDFW

SEQ ID NO: 91068 - protein, 441 aa, Arabidopsis thaliana
  peptide (1)..(441): Ceres Seq. ID no. 12726337
  misc_feature (30)..(64): Pfam Name: PPR repeat Pfam Description: PPR repeat
  misc_feature (1)..(441): Homolog of NCBI NO: 15239745 NR Description: selenium-binding protein-like; protein id:
  misc_feature (1)..(56): Homolog of NCBI NO: 15239745 NR Description: selenium-binding protein-like; protein id:
  misc_feature (1)..(441): Homolog of NCBI NO: 34393394 NR Description: putative pentatricopeptide (PPR)
  misc_feature (1)..(441): Homolog of NCBI NO: 15223099 NR Description: unknown protein; protein id: At1g08070.1 thaliana] >gi|8778839|gb|AAF79838.1|AC026875_18 T6D22.15
  misc_feature (1)..(441): Homolog of NCBI NO: 29124127 NR Description: hypothetical protein [Oryza sativa (japonica
  misc_feature (1)..(426): Homolog of NCBI NO: 7486979 NR Description: hypothetical protein T13K14.230 - Arabidopsis
  misc_feature (1)..(441): Homolog of NCBI NO: 15228954 NR Description: putative protein; protein id: At3g56550.1
  misc_feature (20)..(441): Homolog of NCBI NO: 34910298 NR Description: P0013F10.8 [Oryza sativa (japonica
  misc_feature (1)..(55): Homolog of NCBI NO: 34910298 NR Description: P0013F10.8 [Oryza sativa (japonica
  misc_feature (1)..(441): Homolog of NCBI NO: 8778758 NR Description: T30E16.32 [Arabidopsis thaliana]
MTTLMDLYSTCENSTDACKVFDEIPKRDTVSWNVLFSCYLRNKRTRDVLVLFDKMKNDVDGCVKPDGVTCLLALQACANLGALDFGKQVHDFIDENGLSGALNLSNTLVSMYSRCGSMDKAYQVFYGMRERNVVSWTALISGLAMNGFGKEAIEAFNEMLKFGISPEEQTLTGLLSACSHSGLVAEGMMFFDRMRSGEFKIKPNLHHYGCVVDLLGRARLLDKAYSLIKSMEMKPDSTIWRTLLGACRVHGDVELGERVISHLIELKAEEAGDYVLLLNTYSTVGKWEKVTELRSLMKEKRIHTKPGCSAIELQGTVHEFIVDDVSHPRKEEIYKMLAEINQQLKIAGYVAEITSELHNLESEEEKGYALRYHSEKLAIAFGILVTPPGTTIRVTKNLRTCVDCHNFAKFVSDVYDRIVIVRDRSRFHHFKGGSCSCNDFW

SEQ ID NO: 91069 - DNA, 3316 bp, Arabidopsis thaliana
  misc_feature (1)..(3316): Ceres Seq. ID no. 12726341
  misc_feature: MA Experiment ID: 20000315 Result: Down-regulated in Transcription
  misc_feature: MA Experiment 20000315 PARAMETER Experiment Name: At_14day_Shoots-Roots_Sub_P Parameter: Age (day) Value: 14
  misc_feature: MA Experiment 20000315 PARAMETER Experiment Name: At_14day_Shoots-Roots_Sub_P Parameter: Organism Value: A. thaliana
  misc_feature: MA Experiment 20000315 PARAMETER Experiment Name: At_14day_Shoots-Roots_Sub_P Parameter: Plant Line Value: WS
  misc_feature: MA Experiment 20000315 PARAMETER Experiment Name: At_14day_Shoots-Roots_Sub_P Parameter: Tissue Value: Shoots vs. Whole Plant
  misc_feature: MA Experiment ID: 20000355 Result: Down-regulated in Transcription
  misc_feature: MA Experiment 20000355 PARAMETER Experiment Name: At_Siliques_Sub_P Parameter: Age (day) Value: 21
  misc_feature: MA Experiment 20000355 PARAMETER Experiment Name: At_Siliques_Sub_P Parameter: Organism Value: A. thaliana
  misc_feature: MA Experiment 20000355 PARAMETER Experiment Name: At_Siliques_Sub_P Parameter: Plant Line Value: WS
  misc_feature: MA Experiment 20000355 PARAMETER Experiment Name: At_Siliques_Sub_P Parameter: Tissue Value: Less Than 5mm Siliques vs. Whole Plant
  misc_feature: MA Experiment ID: 20000440 Result: Down-regulated in Transcription
  misc_feature: MA Experiment 20000440 PARAMETER Experiment Name: At_Closed-Flower__Sub_P Parameter: Tissue Value: Closed Flower vs. Whole Plant
aggcattttaatttgcaattgcttcgcctcttatatgttcattttcctgcaaaacatgagaagcatcaaaagctttttaaccaccatttgtttttttggaaagcatgagactgtttcttttacttgctttcaatgctctcatgctacttgaaacacatggttttaccgatgaaactgataggcaagctttgcttcagttcaagtctcaagtttctgaagacaaaagagttgtcttgtcctcatggaaccactcattcccactctgcaattggaagggcgttacatgtggccgtaaaaacaaaagagttactcatctggaactcggaagattgcaactaggcggagtgatatcaccatccattggtaatctatcgtttcttgtatcacttgatctctatgaaaacttttttggtggtactattcctcaagaggtgggacagttgtctagactcgaatacttggatatgggcataaattatcttaggggaccgattccattaggtctatacaattgctctagattgttgaaccttcgtttagattcaaatcgtcttgggggaagtgttccttcagagctaggatcattgacgaaccttgttcagttaaatctttatggaaacaatatgagaggaaagctccctacatcactaggaaacttgacgttactagaacaacttgcattgtcgcataacaatctggaaggagaaattccgagtgatgtagctcaactgactcaaatatggagtcttcaattagtagccaacaatttctccggtgtttttcctcccgctctctacaacttgtcctcacttaagcttctaggtatcggttataatcatttctcgggtcgccttagacctgacttaggtattctactaccaaatcttctatcgtttaatatgggagggaattatttcacagggtccattccaacaactctttccaatatctctactcttgaaagattgggtatgaatgagaacaatctgacaggaagtattcctacattcggaaatgttccaaatttaaaattgttatttcttcataccaattctttaggaagtgattcttctagagatcttgaattcctcacttctttgacaaactgcacccaactagagaccttagggattggcagaaataggcttgggggtgacttgcctatatctattgcgaacctatccgcaaaactcgtaactctagaccttggaggaaccctcatttccggaagcattccttatgacattggaaatctcataaacctacaaaagcttattttagatcaaaatatgttgagtggaccactcccaacctctcttggaaagcttttgaatttgaggtatttaagtctattttcaaatagattatcaggaggtataccagcttttataggcaacatgactatgttagaaacacttgatttgtccaacaatggttttgaaggtattgttcctacaagtcttggcaactgtagtcacctactagaattgtggattggggataataagttgaatgggactatacctctggaaattatgaaaattcagcagcttcttcgcctagacatgtcaggaaattctttgatcggctctctcccgcaggatatcggagcgctacaaaatcttggtacactatcacttggggataataaattatcagggaaacttccacaaactttgggaaactgtcttacaatggaaagtctttttttggaaggaaatttgttttatggagatattccagatttaaaagggttggtgggtgttaaagaagttgatttgtctaacaatgatctctctggaagtatacctgaatactttgcaagcttttccaagttggagtatctcaatctatcttttaacaatcttgagggaaaggtgccagtgaaaggaatatttgagaatgctactacagtttccatagttgggaacaatgatttatgtggaggtattatggggtttcaactaaagccatgcctttcgcaagcaccatctgtggtgaagaagcattcatctcgtttaaagaaagttgtgattggagttagcgtaggcataactttgcttttgttgttgttcatggcttcagttactttgatttggttgagaaagagaaagaagaacaaagaaaccaataatccaactccttctactttggaagtcttgcatgagaagataagttatggagatcttcgtaatgcgacgaatggcttctcttcgagcaatatggtcgggtctggcagttttggtaccgtatataaggcattgctcctgacggagaaaaaggttgttgcagtgaaagttttaaacatgcagagacgtggagcgatgaagagctttatggcagaatgtgaatccttgaaggacataagacatcgtaatcttgtgaaactattgacagcttgttcgagtattgattttcaaggaaatgaatttagagctctcatctatgagttcatgcctaatggaagtttagatatgtggctgcacccagaggaagtggaagagattcataggccctcaagaactttgacccttcttgaaaggcttaacattgccatagacgtggcttctgttttggattatctccatgttcattgtcatgaacctatagctcattgcgatcttaagccaagcaacgtccttctagacgatgatctaaccgcccatgttagtgactttggtctagctcgtcttctcctcaaattcgacgaggagtccttcttcaaccaactaagctcagccggtgttagaggaaccatcggctatgccgcaccagagtatggagtgggaggacagccatctataaatggtgatgtatatagttttgggattctccttttagaaatgttcactggaaaaagaccaaccaatgagctatttggaggaaactttaccctgaacagctacactaagtcggcattgccggaaagaatattggacattgtagacgaatcaattcttcacattggtctcagagtcggtttccctgttgttgagtgcttgacaatggtttttgaggtgggccttaggtgttgtgaagaatctccgatgaaccggttggcaacgagtatagtcgtcaaggagttgatctcaatcagagagaggttctttaaagccagtagaacgacttggcgttgaagtgtttggttttgtctacaaactttgcaacccaataaaaaggcttataatatcttatttcataaattggggttttgtctaagaatgcttgtagaatattgctaatgaaatgcttgtgttaattaataaaaatgtatgaatgttgtggtaccaattttatatggagacaacgtagcttt

SEQ ID NO: 91070 - protein, 1010 aa, Arabidopsis thaliana
  peptide (1)..(1010): Ceres Seq. ID no. 12726342
  misc_feature (1)..(1008): Homolog of NCBI NO: 15241369 NR Description: leucine-rich repeat transmembrane protein kinase, protein id: At5g20480.1, supported by cDNA: gi_18700170
  misc_feature (1)..(1008): Homolog of NCBI NO: 18700171 NR Description: AT5g20480/F7C8_70 [Arabidopsis thaliana]
  misc_feature (1)..(1007): Homolog of NCBI NO: 15232728 NR Description: leucine-rich repeat transmembrane protein kinase, protein id: At3g47110.1 [Arabidopsis thaliana]
  misc_feature (3)..(999): Homolog of NCBI NO: 2130082 NR Description: protein kinase Xa21 (EC 2.7.1.-), receptor type
  misc_feature (7)..(891): Homolog of NCBI NO: 34895840 NR Description: putative protein kinase Xa21 [Oryza sativa
  misc_feature (25)..(616): Homolog of NCBI NO: 34904254 NR Description: Oryza sativa leucine rich repeat containing
  misc_feature (722)..(1001): Homolog of NCBI NO: 34904254 NR Description: Oryza sativa leucine rich repeat containing
  misc_feature (71)..(890): Homolog of NCBI NO: 5852092 NR Description: zwh15.1 [Oryza sativa (indica cultivar-group)]
  misc_feature (66)..(831): Homolog of NCBI NO: 34904254 NR Description: Oryza sativa leucine rich repeat containing
  misc_feature (64)..(1003): Homolog of NCBI NO: 29119653 NR Description: LRR receptor-like kinase 2 [Arabidopsis thaliana]
MRLFLLLAFNALMLLETHGFTDETDRQALLQFKSQVSEDKRVVLSSWNHSFPLCNWKGVTCGRKNKRVTHLELGRLQLGGVISPSIGNLSFLVSLDLYENFFGGTIPQEVGQLSRLEYLDMGINYLRGPIPLGLYNCSRLLNLRLDSNRLGGSVPSELGSLTNLVQLNLYGNNMRGKLPTSLGNLTLLEQLALSHNNLEGEIPSDVAQLTQIWSLQLVANNFSGVFPPALYNLSSLKLLGIGYNHFSGRLRPDLGILLPNLLSFNMGGNYFTGSIPTTLSNISTLERLGMNENNLTGSIPTFGNVPNLKLLFLHTNSLGSDSSRDLEFLTSLTNCTQLETLGIGRNRLGGDLPISIANLSAKLVTLDLGGTLISGSIPYDIGNLINLQKLILDQNMLSGPLPTSLGKLLNLRYLSLFSNRLSGGIPAFIGNMTMLETLDLSNNGFEGIVPTSLGNCSHLLELWIGDNKLNGTIPLEIMKIQQLLRLDMSGNSLIGSLPQDIGALQNLGTLSLGDNKLSGKLPQTLGNCLTMESLFLEGNLFYGDIPDLKGLVGVKEVDLSNNDLSGSIPEYFASFSKLEYLNLSFNNLEGKVPVKGIFENATTVSIVGNNDLCGGIMGFQLKPCLSQAPSVVKKHSSRLKKVVIGVSVGITLLLLLFMASVTLIWLRKRKKNKETNNPTPSTLEVLHEKISYGDLRNATNGFSSSNMVGSGSFGTVYKALLLTEKKVVAVKVLNMQRRGAMKSFMAECESLKDIRHRNLVKLLTACSSIDFQGNEFRALIYEFMPNGSLDMWLHPEEVEEIHRPSRTLTLLERLNIAIDVASVLDYLHVHCHEPIAHCDLKPSNVLLDDDLTAHVSDFGLARLLLKFDEESFFNQLSSAGVRGTIGYAAPEYGVGGQPSINGDVYSFGILLLEMFTGKRPTNELFGGNFTLNSYTKSALPERILDIVDESILHIGLRVGFPVVECLTMVFEVGLRCCEESPMNRLATSIVVKELISIRERFFKASRTTWR

SEQ ID NO: 91071 - protein, 998 aa, Arabidopsis thaliana
  peptide (1)..(998): Ceres Seq. ID no. 12726343
  misc_feature (1)..(996): Homolog of NCBI NO: 15241369 NR Description: leucine-rich repeat transmembrane protein kinase, protein id: At5g20480.1, supported by cDNA: gi_18700170
  misc_feature (1)..(996): Homolog of NCBI NO: 18700171 NR Description: AT5g20480/F7C8_70 [Arabidopsis thaliana]
  misc_feature (1)..(995): Homolog of NCBI NO: 15232728 NR Description: leucine-rich repeat transmembrane protein kinase, protein id: At3g47110.1 [Arabidopsis thaliana]
  misc_feature (1)..(987): Homolog of NCBI NO: 2130082 NR Description: protein kinase Xa21 (EC 2.7.1.-), receptor type
  misc_feature (1)..(879): Homolog of NCBI NO: 34895840 NR Description: putative protein kinase Xa21 [Oryza sativa
  misc_feature (13)..(604): Homolog of NCBI NO: 34904254 NR Description: Oryza sativa leucine rich repeat containing
  misc_feature (710)..(989): Homolog of NCBI NO: 34904254 NR Description: Oryza sativa leucine rich repeat containing
  misc_feature (59)..(878): Homolog of NCBI NO: 5852092 NR Description: zwh15.1 [Oryza sativa (indica cultivar-group)]
  misc_feature (54)..(819): Homolog of NCBI NO: 34904254 NR Description: Oryza sativa leucine rich repeat containing
  misc_feature (52)..(991): Homolog of NCBI NO: 29119653 NR Description: LRR receptor-like kinase 2 [Arabidopsis thaliana]
MLLETHGFTDETDRQALLQFKSQVSEDKRVVLSSWNHSFPLCNWKGVTCGRKNKRVTHLELGRLQLGGVISPSIGNLSFLVSLDLYENFFGGTIPQEVGQLSRLEYLDMGINYLRGPIPLGLYNCSRLLNLRLDSNRLGGSVPSELGSLTNLVQLNLYGNNMRGKLPTSLGNLTLLEQLALSHNNLEGEIPSDVAQLTQIWSLQLVANNFSGVFPPALYNLSSLKLLGIGYNHFSGRLRPDLGILLPNLLSFNMGGNYFTGSIPTTLSNISTLERLGMNENNLTGSIPTFGNVPNLKLLFLHTNSLGSDSSRDLEFLTSLTNCTQLETLGIGRNRLGGDLPISIANLSAKLVTLDLGGTLISGSIPYDIGNLINLQKLILDQNMLSGPLPTSLGKLLNLRYLSLFSNRLSGGIPAFIGNMTMLETLDLSNNGFEGIVPTSLGNCSHLLELWIGDNKLNGTIPLEIMKIQQLLRLDMSGNSLIGSLPQDIGALQNLGTLSLGDNKLSGKLPQTLGNCLTMESLFLEGNLFYGDIPDLKGLVGVKEVDLSNNDLSGSIPEYFASFSKLEYLNLSFNNLEGKVPVKGIFENATTVSIVGNNDLCGGIMGFQLKPCLSQAPSVVKKHSSRLKKVVIGVSVGITLLLLLFMASVTLIWLRKRKKNKETNNPTPSTLEVLHEKISYGDLRNATNGFSSSNMVGSGSFGTVYKALLLTEKKVVAVKVLNMQRRGAMKSFMAECESLKDIRHRNLVKLLTACSSIDFQGNEFRALIYEFMPNGSLDMWLHPEEVEEIHRPSRTLTLLERLNIAIDVASVLDYLHVHCHEPIAHCDLKPSNVLLDDDLTAHVSDFGLARLLLKFDEESFFNQLSSAGVRGTIGYAAPEYGVGGQPSINGDVYSFGILLLEMFTGKRPTNELFGGNFTLNSYTKSALPERILDIVDESILHIGLRVGFPVVECLTMVFEVGLRCCEESPMNRLATSIVVKELISIRERFFKASRTTWR

SEQ ID NO: 91072 - protein, 890 aa, Arabidopsis thaliana
  peptide (1)..(890): Ceres Seq. ID no. 12726344
  misc_feature (1)..(888): Homolog of NCBI NO: 15241369 NR Description: leucine-rich repeat transmembrane protein kinase, protein id: At5g20480.1, supported by cDNA: gi_18700170
  misc_feature (1)..(888): Homolog of NCBI NO: 18700171 NR Description: AT5g20480/F7C8_70 [Arabidopsis thaliana]
  misc_feature (1)..(887): Homolog of NCBI NO: 15232728 NR Description: leucine-rich repeat transmembrane protein kinase, protein id: At3g47110.1 [Arabidopsis thaliana]
  misc_feature (1)..(879): Homolog of NCBI NO: 2130082 NR Description: protein kinase Xa21 (EC 2.7.1.-), receptor type
  misc_feature (1)..(771): Homolog of NCBI NO: 34895840 NR Description: putative protein kinase Xa21 [Oryza sativa
  misc_feature (1)..(496): Homolog of NCBI NO: 34904254 NR Description: Oryza sativa leucine rich repeat containing
  misc_feature (602)..(881): Homolog of NCBI NO: 34904254 NR Description: Oryza sativa leucine rich repeat containing
  misc_feature (1)..(770): Homolog of NCBI NO: 5852092 NR Description: zwh15.1 [Oryza sativa (indica cultivar-group)]
  misc_feature (1)..(711): Homolog of NCBI NO: 34904254 NR Description: Oryza sativa leucine rich repeat containing
  misc_feature (1)..(883): Homolog of NCBI NO: 29119653 NR Description: LRR receptor-like kinase 2 [Arabidopsis thaliana]
MGINYLRGPIPLGLYNCSRLLNLRLDSNRLGGSVPSELGSLTNLVQLNLYGNNMRGKLPTSLGNLTLLEQLALSHNNLEGEIPSDVAQLTQIWSLQLVANNFSGVFPPALYNLSSLKLLGIGYNHFSGRLRPDLGILLPNLLSFNMGGNYFTGSIPTTLSNISTLERLGMNENNLTGSIPTFGNVPNLKLLFLHTNSLGSDSSRDLEFLTSLTNCTQLETLGIGRNRLGGDLPISIANLSAKLVTLDLGGTLISGSIPYDIGNLINLQKLILDQNMLSGPLPTSLGKLLNLRYLSLFSNRLSGGIPAFIGNMTMLETLDLSNNGFEGIVPTSLGNCSHLLELWIGDNKLNGTIPLEIMKIQQLLRLDMSGNSLIGSLPQDIGALQNLGTLSLGDNKLSGKLPQTLGNCLTMESLFLEGNLFYGDIPDLKGLVGVKEVDLSNNDLSGSIPEYFASFSKLEYLNLSFNNLEGKVPVKGIFENATTVSIVGNNDLCGGIMGFQLKPCLSQAPSVVKKHSSRLKKVVIGVSVGITLLLLLFMASVTLIWLRKRKKNKETNNPTPSTLEVLHEKISYGDLRNATNGFSSSNMVGSGSFGTVYKALLLTEKKVVAVKVLNMQRRGAMKSFMAECESLKDIRHRNLVKLLTACSSIDFQGNEFRALIYEFMPNGSLDMWLHPEEVEEIHRPSRTLTLLERLNIAIDVASVLDYLHVHCHEPIAHCDLKPSNVLLDDDLTAHVSDFGLARLLLKFDEESFFNQLSSAGVRGTIGYAAPEYGVGGQPSINGDVYSFGILLLEMFTGKRPTNELFGGNFTLNSYTKSALPERILDIVDESILHIGLRVGFPVVECLTMVFEVGLRCCEESPMNRLATSIVVKELISIRERFFKASRTTWR

SEQ ID NO: 91073 - DNA, 3312 bp, Arabidopsis thaliana
  misc_feature (1)..(3312): Ceres Seq. ID no. 12726345
  misc_feature: MA Experiment ID: 20000315 Result: Down-regulated in Transcription
  misc_feature: MA Experiment 20000315 PARAMETER Experiment Name: At_14day_Shoots-Roots_Sub_P Parameter: Age (day) Value: 14
  misc_feature: MA Experiment 20000315 PARAMETER Experiment Name: At_14day_Shoots-Roots_Sub_P Parameter: Organism Value: A. thaliana
  misc_feature: MA Experiment 20000315 PARAMETER Experiment Name: At_14day_Shoots-Roots_Sub_P Parameter: Plant Line Value: WS
  misc_feature: MA Experiment 20000315 PARAMETER Experiment Name: At_14day_Shoots-Roots_Sub_P Parameter: Tissue Value: Shoots vs. Whole Plant
  misc_feature: MA Experiment ID: 20000327 Result: Down-regulated in Transcription
  misc_feature: MA Experiment 20000327 PARAMETER Experiment Name: At_42deg_Heat_Sub_P Parameter: Age (day) Value: 14
  misc_feature: MA Experiment 20000327 PARAMETER Experiment Name: At_42deg_Heat_Sub_P Parameter: Organism Value: A. thaliana
  misc_feature: MA Experiment 20000327 PARAMETER Experiment Name: At_42deg_Heat_Sub_P Parameter: Plant Line Value: WS
  misc_feature: MA Experiment 20000327 PARAMETER Experiment Name: At_42deg_Heat_Sub_P Parameter: Temperature (deg C) Value: 42 vs. 22
  misc_feature: MA Experiment 20000327 PARAMETER Experiment Name: At_42deg_Heat_Sub_P Parameter: Timepoint (hr) Value: 1
  misc_feature: MA Experiment 20000327 PARAMETER Experiment Name: At_42deg_Heat_Sub_P Parameter: Tissue Value: Aerial
  misc_feature: MA Experiment ID: 20000328 Result: Down-regulated in Transcription
  misc_feature: MA Experiment 20000328 PARAMETER Experiment Name: At_42deg_Heat_Sub_P Parameter: Age (day) Value: 14
  misc_feature: MA Experiment 20000328 PARAMETER Experiment Name: At_42deg_Heat_Sub_P Parameter: Organism Value: A. thaliana
  misc_feature: MA Experiment 20000328 PARAMETER Experiment Name: At_42deg_Heat_Sub_P Parameter: Plant Line Value: WS
  misc_feature: MA Experiment 20000328 PARAMETER Experiment Name: At_42deg_Heat_Sub_P Parameter: Temperature (deg C) Value: 42 vs. 22
  misc_feature: MA Experiment 20000328 PARAMETER Experiment Name: At_42deg_Heat_Sub_P Parameter: Timepoint (hr) Value: 6
  misc_feature: MA Experiment 20000328 PARAMETER Experiment Name: At_42deg_Heat_Sub_P Parameter: Tissue Value: Aerial
  misc_feature: MA Experiment ID: 20000347 Result: Up-regulated in Transcription
  misc_feature: MA Experiment 20000347 PARAMETER Experiment Name: At_2mM_SA_Sub_P Parameter: Age (day) Value: 14
  misc_feature: MA Experiment 20000347 PARAMETER Experiment Name: At_2mM_SA_Sub_P Parameter: Organism Value: A. thaliana
  misc_feature: MA Experiment 20000347 PARAMETER Experiment Name: At_2mM_SA_Sub_P Parameter: Plant Line Value: WS
  misc_feature: MA Experiment 20000347 PARAMETER Experiment Name: At_2mM_SA_Sub_P Parameter: Timepoint (hr) Value: 6
  misc_feature: MA Experiment 20000347 PARAMETER Experiment Name: At_2mM_SA_Sub_P Parameter: Tissue Value: Aerial
  misc_feature: MA Experiment 20000347 PARAMETER Experiment Name: At_2mM_SA_Sub_P Parameter: Treatment Value: 2mM SA vs. No Treatment
  misc_feature: MA Experiment ID: 20000348 Result: Up-regulated in Transcription
  misc_feature: MA Experiment 20000348 PARAMETER Experiment Name: At_100uM_ABA_Sub_P Parameter: Age (day) Value: 14
  misc_feature: MA Experiment 20000348 PARAMETER Experiment Name: At_100uM_ABA_Sub_P Parameter: Organism Value: A. thaliana
  misc_feature: MA Experiment 20000348 PARAMETER Experiment Name: At_100uM_ABA_Sub_P Parameter: Plant Line Value: WS
  misc_feature: MA Experiment 20000348 PARAMETER Experiment Name: At_100uM_ABA_Sub_P Parameter: Timepoint (hr) Value: 1
  misc_feature: MA Experiment 20000348 PARAMETER Experiment Name: At_100uM_ABA_Sub_P Parameter: Tissue Value: Aerial
  misc_feature: MA Experiment 20000348 PARAMETER Experiment Name: At_100uM_ABA_Sub_P Parameter: Treatment Value: 100uM ABA vs. No Treatment
acaaaaacattcaaaatataaaaataaactttgagaaggatgaaactatttcttttactttctttcagtgctcatttgttactgggagcagatgggtttaccgatgaaactgataggcaagcattgttggagttcaagtctcaagtttctgaaggcaaaagagatgtcttatcctcatggaataactcattccctctatgcaactggaagtgggttacatgtggtcgtaaacacaagagagttactcatttgaacctcgggggattacagttgggcgggatagtatcaccatctatcggtaatgtatcgtttctcatatcacttgatctgtctgataacgcttttgggggtatcatccctcgagaggtgggaaacttgtttagacttgaacacttgtatatggccttcaattctctagagggagggattccagccactctatctaactgctctagattgttgaaccttgatttatattcaaatcctcttagacaaggtgttccttctgaactagggtcattgacgaaactcgttattttagatcttggtcgaaacaacctgaaaggcaagctccctagatctctaggaaacttgacctctttaaaatcgcttggcttcacagataacaatatagaaggagaagttccagatgaattagctagactgagtcaaatggtgggtcttgggttatcaatgaacaaattctttggcgtttttcctcccgccatctacaatttgtccgcacttgaggacttattcctctttggtagtggcttctcgggtagcctaaagcctgattttggtaatctgctaccaaacattcgtgagttaaatctgggagaaaatgatctagtgggagccattccaacaacactttccaatatttcaactctacaaaagtttggaatcaacaaaaacatgatgacaggaggtatatatccgaactttggaaaagtaccgagtttgcaatacctagatcttagtgagaatcctctaggaagttacacttttggagatcttgaatttattgattctttgactaattgcacccatttgcaactcttaagtgttggttacactaggcttgggggtgccttgcctacatccattgccaatatgtccacagaactcatcagtttaaaccttataggaaaccacttttttggaagcattcctcaagatattgggaatctcataggcctacaaagacttcagttgggaaaaaatatgttgaccggaccactcccaacttctttgggaaagcttctaagattggggttattaagtctatattcaaataggatgtcaggagagattccatcttttataggcaacctaactcaattagaaatactatatttgtccaacaatagttttgagggaattgttcctccgagtctcgggaagtgtagtcacatgcttgatttacgcattgggtataacaagttgaatgggactataccgaaggaaattatgcaaatcccaacccttgttaacctaagcatggaaggtaactctttgagcggctctctaccaaatgatattggaagtctacaaaatcttgtaaaactatcacttgagaacaataagttttcaggacatctcccacaaaccttgggaaattgtctcgcgatggaacaactttttctacaaggaaattcttttgatggagcaattccaaatataagagggttgatgggtgtaagaagagttgatttgtcaaacaatgatctatcgggaagtatacctgaatattttgcaaacttctccaagttggaatatctcaatctatctattaacaattttacgggaaaggtgccttccaaaggaaattttcagaactctacaatagtttttgtatttggaaacaaaaacctatgtggaggcatcaaggatctgaaactaaagccatgcctcgcccaagaaccaccagtggagacaaagcattcctctcatttaaagaaagttgcaattttagtaagcataggcatagctttgctattgctgttggtcatagcttcgatggttctgtgttggttcagaaaaagaaggaagaaccagcagacaaataacctggttccttctaagttggagattttccatgagaagataagctatggagatctacgaaatgcgacaaatggcttctcttcaagcaatatggttgggtcaggtagttttggtactgtgttcaaggcattgctcccgacggagagcaagattgttgcagtgaaagttctaaacatgcagagacgtggagctatgaagagctttatggcagaatgtgaatccttgaaagacacaaggcatcgtaatcttgtgaaattactgacagcttgcgctagtactgatttccaaggaaacgaattcagagcgcttatctatgagtacttgccgaatggaagcgtggatatgtggctgcacccagaggaagtcgaagagatacgtaggcccccacgaaccttgacacttcttgaaaggcttaatattgtcatagacgtggcttctgttttggactatcttcatgttcactgtcatgagcctatagctcattgcgatctcaagccaagcaacgtccttctagaagatgatttgaccgcccatgttagtgattttggtctggctcggcttctactcaaattcgacaaggagtcattccttaaccaactaagctcagccggagttagaggaaccatcggctatgccgcaccagaatatggaatgggaggacaaccatcaatacatggtgatgtgtatagctttggggttctccttttagaaatgttcaccgggaaacgaccaactgatgagttatttgggggaaatttaacactacatagctacaccaagttagcgttgccagaaaaagtattcgaaattgcagacaaagcgattcttcacattggtcttagagttggtttccgtactgctgagtgcttgacactggttttggaggtgggacttaggtgctgtgaagaatatcctacgaaccggttggcaacgagtgaagtcgcaaaagagttgatctcaatcagagaaaggttctttaaaaccagaagaacacctagacgttgaagtttttatggttttgcctacaaactttgcagtccactcaaaaggcctatataacattgtcttttacaatttgtgttttcttcttctctattaaacatacttatgctatacgtgtttctaagctctattaaaacatactaagatggcttgcagaatattgttaatgaatgcttgtgttttttgcagacaatatatgtatgttgtgtaaccagttttatcatatatatcagtgttccc

SEQ ID NO: 91074 - protein, 1011 aa, Arabidopsis thaliana
  peptide (1)..(1011): Ceres Seq. ID no. 12726346
  misc_feature (21)..(1008): Homolog of NCBI NO: 15232728 NR Description: leucine-rich repeat transmembrane protein kinase, protein id: At3g47110.1 [Arabidopsis thaliana]
  misc_feature (1)..(1008): Homolog of NCBI NO: 15241369 NR Description: leucine-rich repeat transmembrane protein kinase, protein id: At5g20480.1, supported by cDNA: gi_18700170
  misc_feature (1)..(1008): Homolog of NCBI NO: 18700171 NR Description: AT5g20480/F7C8_70 [Arabidopsis thaliana]
  misc_feature (3)..(1000): Homolog of NCBI NO: 2130082 NR Description: protein kinase Xa21 (EC 2.7.1.-), receptor type
  misc_feature (1)..(892): Homolog of NCBI NO: 34895840 NR Description: putative protein kinase Xa21 [Oryza sativa
  misc_feature (66)..(797): Homolog of NCBI NO: 34904254 NR Description: Oryza sativa leucine rich repeat containing
  misc_feature (776)..(1002): Homolog of NCBI NO: 34904254 NR Description: Oryza sativa leucine rich repeat containing
  misc_feature (25)..(595): Homolog of NCBI NO: 34904254 NR Description: Oryza sativa leucine rich repeat containing
  misc_feature (68)..(923): Homolog of NCBI NO: 15219699 NR Description: leucine-rich repeat transmembrane protein kinase, protein id: At1g35710.1 [Arabidopsis thaliana]
  misc_feature (77)..(891): Homolog of NCBI NO: 5852092 NR Description: zwh15.1 [Oryza sativa (indica cultivar-group)]
MKLFLLLSFSAHLLLGADGFTDETDRQALLEFKSQVSEGKRDVLSSWNNSFPLCNWKWVTCGRKHKRVTHLNLGGLQLGGIVSPSIGNVSFLISLDLSDNAFGGIIPREVGNLFRLEHLYMAFNSLEGGIPATLSNCSRLLNLDLYSNPLRQGVPSELGSLTKLVILDLGRNNLKGKLPRSLGNLTSLKSLGFTDNNIEGEVPDELARLSQMVGLGLSMNKFFGVFPPAIYNLSALEDLFLFGSGFSGSLKPDFGNLLPNIRELNLGENDLVGAIPTTLSNISTLQKFGINKNMMTGGIYPNFGKVPSLQYLDLSENPLGSYTFGDLEFIDSLTNCTHLQLLSVGYTRLGGALPTSIANMSTELISLNLIGNHFFGSIPQDIGNLIGLQRLQLGKNMLTGPLPTSLGKLLRLGLLSLYSNRMSGEIPSFIGNLTQLEILYLSNNSFEGIVPPSLGKCSHMLDLRIGYNKLNGTIPKEIMQIPTLVNLSMEGNSLSGSLPNDIGSLQNLVKLSLENNKFSGHLPQTLGNCLAMEQLFLQGNSFDGAIPNIRGLMGVRRVDLSNNDLSGSIPEYFANFSKLEYLNLSINNFTGKVPSKGNFQNSTIVFVFGNKNLCGGIKDLKLKPCLAQEPPVETKHSSHLKKVAILVSIGIALLLLLVIASMVLCWFRKRRKNQQTNNLVPSKLEIFHEKISYGDLRNATNGFSSSNMVGSGSFGTVFKALLPTESKIVAVKVLNMQRRGAMKSFMAECESLKDTRHRNLVKLLTACASTDFQGNEFRALIYEYLPNGSVDMWLHPEEVEEIRRPPRTLTLLERLNIVIDVASVLDYLHVHCHEPIAHCDLKPSNVLLEDDLTAHVSDFGLARLLLKFDKESFLNQLSSAGVRGTIGYAAPEYGMGGQPSIHGDVYSFGVLLLEMFTGKRPTDELFGGNLTLHSYTKLALPEKVFEIADKAILHIGLRVGFRTAECLTLVLEVGLRCCEEYPTNRLATSEVAKELISIRERFFKTRRTPRR

SEQ ID NO: 91075 - protein, 891 aa, Arabidopsis thaliana
  peptide (1)..(891): Ceres Seq. ID no. 12726347
  misc_feature (1)..(888): Homolog of NCBI NO: 15232728 NR Description: leucine-rich repeat transmembrane protein kinase, protein id: At3g47110.1 [Arabidopsis thaliana]
  misc_feature (1)..(888): Homolog of NCBI NO: 15241369 NR Description: leucine-rich repeat transmembrane protein kinase, protein id: At5g20480.1, supported by cDNA: gi_18700170
  misc_feature (1)..(888): Homolog of NCBI NO: 18700171 NR Description: AT5g20480/F7C8_70 [Arabidopsis thaliana]
  misc_feature (1)..(880): Homolog of NCBI NO: 2130082 NR Description: protein kinase Xa21 (EC 2.7.1.-), receptor type
  misc_feature (1)..(772): Homolog of NCBI NO: 34895840 NR Description: putative protein kinase Xa21 [Oryza sativa
  misc_feature (1)..(677): Homolog of NCBI NO: 34904254 NR Description: Oryza sativa leucine rich repeat containing
  misc_feature (656)..(882): Homolog of NCBI NO: 34904254 NR Description: Oryza sativa leucine rich repeat containing
  misc_feature (1)..(475): Homolog of NCBI NO: 34904254 NR Description: Oryza sativa leucine rich repeat containing
  misc_feature (1)..(803): Homolog of NCBI NO: 15219699 NR Description: leucine-rich repeat transmembrane protein kinase, protein id: At1g35710.1 [Arabidopsis thaliana]
  misc_feature (1)..(771): Homolog of NCBI NO: 5852092 NR Description: zwh15.1 [Oryza sativa (indica cultivar-group)]
MAFNSLEGGIPATLSNCSRLLNLDLYSNPLRQGVPSELGSLTKLVILDLGRNNLKGKLPRSLGNLTSLKSLGFTDNNIEGEVPDELARLSQMVGLGLSMNKFFGVFPPAIYNLSALEDLFLFGSGFSGSLKPDFGNLLPNIRELNLGENDLVGAIPTTLSNISTLQKFGINKNMMTGGIYPNFGKVPSLQYLDLSENPLGSYTFGDLEFIDSLTNCTHLQLLSVGYTRLGGALPTSIANMSTELISLNLIGNHFFGSIPQDIGNLIGLQRLQLGKNMLTGPLPTSLGKLLRLGLLSLYSNRMSGEIPSFIGNLTQLEILYLSNNSFEGIVPPSLGKCSHMLDLRIGYNKLNGTIPKEIMQIPTLVNLSMEGNSLSGSLPNDIGSLQNLVKLSLENNKFSGHLPQTLGNCLAMEQLFLQGNSFDGAIPNIRGLMGVRRVDLSNNDLSGSIPEYFANFSKLEYLNLSINNFTGKVPSKGNFQNSTIVFVFGNKNLCGGIKDLKLKPCLAQEPPVETKHSSHLKKVAILVSIGIALLLLLVIASMVLCWFRKRRKNQQTNNLVPSKLEIFHEKISYGDLRNATNGFSSSNMVGSGSFGTVFKALLPTESKIVAVKVLNMQRRGAMKSFMAECESLKDTRHRNLVKLLTACASTDFQGNEFRALIYEYLPNGSVDMWLHPEEVEEIRRPPRTLTLLERLNIVIDVASVLDYLHVHCHEPIAHCDLKPSNVLLEDDLTAHVSDFGLARLLLKFDKESFLNQLSSAGVRGTIGYAAPEYGMGGQPSIHGDVYSFGVLLLEMFTGKRPTDELFGGNLTLHSYTKLALPEKVFEIADKAILHIGLRVGFRTAECLTLVLEVGLRCCEEYPTNRLATSEVAKELISIRERFFKTRRTPRR

SEQ ID NO: 91076 - protein, 800 aa, Arabidopsis thaliana
  peptide (1)..(800): Ceres Seq. ID no. 12726348
  misc_feature (1)..(797): Homolog of NCBI NO: 15232728 NR Description: leucine-rich repeat transmembrane protein kinase, protein id: At3g47110.1 [Arabidopsis thaliana]
  misc_feature (1)..(797): Homolog of NCBI NO: 15241369 NR Description: leucine-rich repeat transmembrane protein kinase, protein id: At5g20480.1, supported by cDNA: gi_18700170
  misc_feature (1)..(797): Homolog of NCBI NO: 18700171 NR Description: AT5g20480/F7C8_70 [Arabidopsis thaliana]
  misc_feature (1)..(789): Homolog of NCBI NO: 2130082 NR Description: protein kinase Xa21 (EC 2.7.1.-), receptor type
  misc_feature (1)..(681): Homolog of NCBI NO: 34895840 NR Description: putative protein kinase Xa21 [Oryza sativa
  misc_feature (1)..(586): Homolog of NCBI NO: 34904254 NR Description: Oryza sativa leucine rich repeat containing
  misc_feature (565)..(791): Homolog of NCBI NO: 34904254 NR Description: Oryza sativa leucine rich repeat containing
  misc_feature (1)..(384): Homolog of NCBI NO: 34904254 NR Description: Oryza sativa leucine rich repeat containing
  misc_feature (1)..(712): Homolog of NCBI NO: 15219699 NR Description: leucine-rich repeat transmembrane protein kinase, protein id: At1g35710.1 [Arabidopsis thaliana]
  misc_feature (1)..(680): Homolog of NCBI NO: 5852092 NR Description: zwh15.1 [Oryza sativa (indica cultivar-group)]
MVGLGLSMNKFFGVFPPAIYNLSALEDLFLFGSGFSGSLKPDFGNLLPNIRELNLGENDLVGAIPTTLSNISTLQKFGINKNMMTGGIYPNFGKVPSLQYLDLSENPLGSYTFGDLEFIDSLTNCTHLQLLSVGYTRLGGALPTSIANMSTELISLNLIGNHFFGSIPQDIGNLIGLQRLQLGKNMLTGPLPTSLGKLLRLGLLSLYSNRMSGEIPSFIGNLTQLEILYLSNNSFEGIVPPSLGKCSHMLDLRIGYNKLNGTIPKEIMQIPTLVNLSMEGNSLSGSLPNDIGSLQNLVKLSLENNKFSGHLPQTLGNCLAMEQLFLQGNSFDGAIPNIRGLMGVRRVDLSNNDLSGSIPEYFANFSKLEYLNLSINNFTGKVPSKGNFQNSTIVFVFGNKNLCGGIKDLKLKPCLAQEPPVETKHSSHLKKVAILVSIGIALLLLLVIASMVLCWFRKRRKNQQTNNLVPSKLEIFHEKISYGDLRNATNGFSSSNMVGSGSFGTVFKALLPTESKIVAVKVLNMQRRGAMKSFMAECESLKDTRHRNLVKLLTACASTDFQGNEFRALIYEYLPNGSVDMWLHPEEVEEIRRPPRTLTLLERLNIVIDVASVLDYLHVHCHEPIAHCDLKPSNVLLEDDLTAHVSDFGLARLLLKFDKESFLNQLSSAGVRGTIGYAAPEYGMGGQPSIHGDVYSFGVLLLEMFTGKRPTDELFGGNLTLHSYTKLALPEKVFEIADKAILHIGLRVGFRTAECLTLVLEVGLRCCEEYPTNRLATSEVAKELISIRERFFKTRRTPRR

SEQ ID NO: 91077 - DNA, 1754 bp, Arabidopsis thaliana
  misc_feature (1)..(1754): Ceres Seq. ID no. 12726349
  misc_feature: MA Experiment ID: 20000227 Result: Down-regulated in Transcription
  misc_feature: MA Experiment 20000227 PARAMETER Experiment Name: At_Root-Tips-vs-Tops_P Parameter: Tissue Value: Root Tips vs. Root Tops
  misc_feature: MA Experiment ID: 20000234 Result: Down-regulated in Transcription
  misc_feature: MA Experiment 20000234 PARAMETER Experiment Name: At_Siliques_P Parameter: Age (day) Value: 21
  misc_feature: MA Experiment 20000234 PARAMETER Experiment Name: At_Siliques_P Parameter: Organism Value: A. thaliana
  misc_feature: MA Experiment 20000234 PARAMETER Experiment Name: At_Siliques_P Parameter: Plant Line Value: WS
  misc_feature: MA Experiment 20000234 PARAMETER Experiment Name: At_Siliques_P Parameter: Tissue Value: Less Than 5mm Siliques vs. Whole Plant
  misc_feature: MA Experiment ID: 20000264 Result: Down-regulated in Transcription
  misc_feature: MA Experiment 20000264 PARAMETER Experiment Name: At_Open_Flower_P Parameter: Age (day) Value: 21
  misc_feature: MA Experiment 20000264 PARAMETER Experiment Name: At_Open_Flower_P Parameter: Plant Line Value: WS
  misc_feature: MA Experiment 20000264 PARAMETER Experiment Name: At_Open_Flower_P Parameter: Tissue Value: Open Flower vs. Whole Plant
  misc_feature: MA Experiment ID: 20000265 Result: Down-regulated in Transcription
  misc_feature: MA Experiment 20000265 PARAMETER Experiment Name: At_Open_Flower_P Parameter: Age (day) Value: 21
  misc_feature: MA Experiment 20000265 PARAMETER Experiment Name: At_Open_Flower_P Parameter: Plant Line Value: WS
  misc_feature: MA Experiment 20000265 PARAMETER Experiment Name: At_Open_Flower_P Parameter: Tissue Value: Closed Flower vs. Whole Plant
  misc_feature: MA Experiment ID: 20000286 Result: Down-regulated in Transcription
  misc_feature: MA Experiment 20000286 PARAMETER Experiment Name: At_Open_Flower_P Parameter: Age (day) Value: 21
  misc_feature: MA Experiment 20000286 PARAMETER Experiment Name: At_Open_Flower_P Parameter: Plant Line Value: WS
  misc_feature: MA Experiment 20000286 PARAMETER Experiment Name: At_Open_Flower_P Parameter: Tissue Value: Half Open vs. Whole Plant
  misc_feature: MA Experiment ID: 20000451 Result: Down-regulated in Transcription
  misc_feature: MA Experiment 20000451 PARAMETER Experiment Name: At_CS6879_Shoots-Roots_P Parameter: Age (day) Value: 14
  misc_feature: MA Experiment 20000451 PARAMETER Experiment Name: At_CS6879_Shoots-Roots_P Parameter: Organism Value: A. thaliana
  misc_feature: MA Experiment 20000451 PARAMETER Experiment Name: At_CS6879_Shoots-Roots_P Parameter: Plant Line Value: CS6879 vs. WS
  misc_feature: MA Experiment 20000451 PARAMETER Experiment Name: At_CS6879_Shoots-Roots_P Parameter: Tissue Value: Roots
  misc_feature: MA Experiment ID: 20000794 Result: Down-regulated in Transcription
  misc_feature: MA Experiment 20000794 PARAMETER Experiment Name: At_Petals_P Parameter: Age (day) Value: 23-25 days
  misc_feature: MA Experiment 20000794 PARAMETER Experiment Name: At_Petals_P Parameter: Plant Line Value: WS
  misc_feature: MA Experiment 20000794 PARAMETER Experiment Name: At_Petals_P Parameter: Tissue Value: Petals vs. Whole plant
  misc_feature: MA Experiment ID: 20001247 Result: Up-regulated in Transcription
  misc_feature: MA Experiment 20001247 PARAMETER Experiment Name: At_Far-red-induction_P Parameter: Age (day) Value: 7
  misc_feature: MA Experiment 20001247 PARAMETER Experiment Name: At_Far-red-induction_P Parameter: Light Value: Far-red vs. White
  misc_feature: MA Experiment 20001247 PARAMETER Experiment Name: At_Far-red-induction_P Parameter: Organism Value: A. thaliana
  misc_feature: MA Experiment 20001247 PARAMETER Experiment Name: At_Far-red-induction_P Parameter: Plant Line Value: Columbia
  misc_feature: MA Experiment 20001247 PARAMETER Experiment Name: At_Far-red-induction_P Parameter: Timepoint (hr) Value: 1
  misc_feature: MA Experiment 20001247 PARAMETER Experiment Name: At_Far-red-induction_P Parameter: Tissue Value: Whole Plant
  misc_feature: MA Experiment ID: 20001450 Result: Up-regulated in Transcription
  misc_feature: MA Experiment 20001450 PARAMETER Experiment Name: At_Far-red-induction_P Parameter: Age (day) Value: 7
  misc_feature: MA Experiment 20001450 PARAMETER Experiment Name: At_Far-red-induction_P Parameter: Light Value: Far-red vs. White
  misc_feature: MA Experiment 20001450 PARAMETER Experiment Name: At_Far-red-induction_P Parameter: Organism Value: A. thaliana
  misc_feature: MA Experiment 20001450 PARAMETER Experiment Name: At_Far-red-induction_P Parameter: Plant Line Value: Columbia
  misc_feature: MA Experiment 20001450 PARAMETER Experiment Name: At_Far-red-induction_P Parameter: Timepoint (hr) Value: 8
  misc_feature: MA Experiment 20001450 PARAMETER Experiment Name: At_Far-red-induction_P Parameter: Tissue Value: Whole Plant
  misc_feature: MA Experiment ID: 20001451 Result: Up-regulated in Transcription
  misc_feature: MA Experiment 20001451 PARAMETER Experiment Name: At_Far-red-induction_P Parameter: Age (day) Value: 7
  misc_feature: MA Experiment 20001451 PARAMETER Experiment Name: At_Far-red-induction_P Parameter: Light Value: Far-red vs. White
  misc_feature: MA Experiment 20001451 PARAMETER Experiment Name: At_Far-red-induction_P Parameter: Organism Value: A. thaliana
  misc_feature: MA Experiment 20001451 PARAMETER Experiment Name: At_Far-red-induction_P Parameter: Plant Line Value: Columbia
  misc_feature: MA Experiment 20001451 PARAMETER Experiment Name: At_Far-red-induction_P Parameter: Timepoint (hr) Value: 24
  misc_feature: MA Experiment 20001451 PARAMETER Experiment Name: At_Far-red-induction_P Parameter: Tissue Value: Whole Plant
  misc_feature: MA Experiment ID: 20001560 Result: Down-regulated in Transcription
  misc_feature: MA Experiment 20001560 PARAMETER Experiment Name: At_Drought_Soil_Dry_P Parameter: Age (day) Value: 28
  misc_feature: MA Experiment 20001560 PARAMETER Experiment Name: At_Drought_Soil_Dry_P Parameter: Organism Value: A. thaliana
  misc_feature: MA Experiment 20001560 PARAMETER Experiment Name: At_Drought_Soil_Dry_P Parameter: Plant Line Value: WS
  misc_feature: MA Experiment 20001560 PARAMETER Experiment Name: At_Drought_Soil_Dry_P Parameter: Post Timepoint (hr) Value: None
  misc_feature: MA Experiment 20001560 PARAMETER Experiment Name: At_Drought_Soil_Dry_P Parameter: Post-Treatment Value: None
  misc_feature: MA Experiment 20001560 PARAMETER Experiment Name: At_Drought_Soil_Dry_P Parameter: Timepoint (day) Value: 14
  misc_feature: MA Experiment 20001560 PARAMETER Experiment Name: At_Drought_Soil_Dry_P Parameter: Treatment Value: Drought vs. No Drought
  misc_feature: MA Experiment ID: 20001757 Result: Up-regulated in Transcription
  misc_feature: MA Experiment 20001757 PARAMETER Experiment Name: At_50mM_NH4NO3_L-to-H_P Parameter: Timepoint (hr) Value: 6
  misc_feature: MA Experiment 20001757 PARAMETER Experiment Name: At_50mM_NH4NO3_L-to-H_P Parameter: Tissue Value: Leaf
  misc_feature: MA Experiment 20001757 PARAMETER Experiment Name: At_50mM_NH4NO3_L-to-H_P Parameter: Treatment Value: 50mM NH4NO3 vs 100mM Mannitol
aaaatatatataaaatagttatagctccccacttatatatgcaaaagccaacatcaagtatcttaaatgtcataatggacggtggagacagcgtcggaggaggaggaggagatgatcaccaccgtcacctccaccatcaccaccgccctactttcccttttcaactactcggaaaacacgaccccgacgacaaccatcaacaacaaccttccccttcctcctcctcctctctattttctctccatcaacaccaacaattatctcaatcgcaacctcaatcgcaatcgcaaaagtcacaaccgcagacaacgcaaaaagagttattacaaacgcaagaggaatctgcggtggtggcagctaaaaagccaccgttgaaacgagcgtcgacgaaagaccgacacacgaaagtagacggaagagggaggagaataaggatgccggcgttatgtgcagctagggtttttcagctaacgcgagagctaggtcataaatccgacggtgagacaatagagtggcttcttcaacaagctgaaccatctgtaatcgccgccaccggaaccggaacaatcccggcgaatttcacttctttaaacatctctctccgttcttcaggctcttccatgtctcttccttctcatttccgctccgccgcttccacttttagccctaataacatattttctccggcgatgcttcaacaacaacaacaacaacaacgtggtggtggtgttgggtttcatcatccccatctacagggacgtgcacctacgtcgtctttgtttcctggtattgataacttcacaccaacgacgtcgtttttgaactttcataatccaacaaagcaagaaggagatcaagattctgaagagttaaactcggagaagaaaagaagaatccaaacgacgtcggatttgcatcaacaacaacaacaacaccaacatgatcaaatcggaggatatacacttcaatctagcaacagtggatctacagccaccgcagccgccgcgcaacaaataccgggaaatttctggatggttgcggcggctgcggctgcaggtggtggtggtggtaataacaaccaaacaggtggtcttatgacagcttctattggtactggtggcggcggtggagagcctgtttggacgtttccttccattaacacggcagcggcagcgttatatagaagtggcgtttcgggcgttccaagcggcgcggtttctagcggtttacattttatgaatttcgcagcgccaatggcatttcttactggacaacaacagctagcaacaactagtaatcatgagattaatgaagatagtaataataatgaaggaggaagaagtgacggtggtggtgatcatcataatacacagagacatcatcatcatcaacaacaacatcatcataatattctctccggcttgaaccagtacggacggcaagtttccggcgactctcaagctagtggatcacttggaggtggtgatgaggaggatcagcaagattagacacacacaaaaacattttaacggtgggattttctgccgacggcggtagcggtgacggcgttcggcggctgtgtaaaacttttgttttcaccgttaattttttttattttctgtagtaattttttttgctaagtaaaaaaaaaaaaaaaaacacgtgagattttctttttaattttgatttttttacttgattttaaatttgatttttcttgtgagtgagtgattaaatagtacacgagatttttt

SEQ ID NO: 91078 - protein, 501 aa, Arabidopsis thaliana
  peptide (1)..(501): Ceres Seq. ID no. 12726350
  misc_feature (113)..(375): Pfam Name: TCP family transcription factor Pfam Description: TCP family transcription factor
  misc_feature (13)..(501): Homolog of NCBI NO: 22331641 NR Description: putative protein; protein id: At3g47620.1, by cDNA: gi_16604510 [Arabidopsis thaliana] AT3g47620/F1P2_170 [Arabidopsis thaliana]
  misc_feature (25)..(501): Homolog of NCBI NO: 11357581 NR Description: hypothetical protein F1P2.170 - Arabidopsis >gi|6522545|emb|CAB61988.1| putative protein [Arabidopsis
  misc_feature (33)..(243): Homolog of NCBI NO: 5731257 NR Description: auxin-induced basic helix-loop-helix
  misc_feature (81)..(235): Homolog of NCBI NO: 18409345 NR Description: expressed protein; protein id: At1g69690.1, by cDNA: gi_15912212, supported by cDNA: gi_19547990 [Arabidopsis
  misc_feature (100)..(461): Homolog of NCBI NO: 15217857 NR Description: auxin-induced basic helix-loop-helix factor, putative; protein id: At1g58100.1, supported by cDNA:
  misc_feature (93)..(452): Homolog of NCBI NO: 15218305 NR Description: unknown protein; protein id: At1g72010.1, by cDNA: gi_19423971 [Arabidopsis thaliana]
  misc_feature (110)..(251): Homolog of NCBI NO: 20975251 NR Description: transcription factor PCF3 [Oryza sativa (japonica
  misc_feature (114)..(210): Homolog of NCBI NO: 15219640 NR Description: DNA binding protein, putative; protein id: supported by cDNA: gi_15912302, supported by cDNA: gi_19548006
  misc_feature (112)..(310): Homolog of NCBI NO: 15237274 NR Description: unknown protein; protein id: At5g23280.1 thaliana] >gi|10177817|dbj|BAB11183.1| gene_id:MKD15.14~unknown
  misc_feature (112)..(310): Homolog of NCBI NO: 26452377 NR Description: unknown protein [Arabidopsis thaliana]
NIYKIVIAPHLYMQKPTSSILNVIMDGGDSVGGGGGDDHHRHLHHHHRPTFPFQLLGKHDPDDNHQQQPSPSSSSSLFSLHQHQQLSQSQPQSQSQKSQPQTTQKELLQTQEESAVVAAKKPPLKRASTKDRHTKVDGRGRRIRMPALCAARVFQLTRELGHKSDGETIEWLLQQAEPSVIAATGTGTIPANFTSLNISLRSSGSSMSLPSHFRSAASTFSPNNIFSPAMLQQQQQQQRGGGVGFHHPHLQGRAPTSSLFPGIDNFTPTTSFLNFHNPTKQEGDQDSEELNSEKKRRIQTTSDLHQQQQQHQHDQIGGYTLQSSNSGSTATAAAAQQIPGNFWMVAAAAAAGGGGGNNNQTGGLMTASIGTGGGGGEPVWTFPSINTAAAALYRSGVSGVPSGAVSSGLHFMNFAAPMAFLTGQQQLATTSNHEINEDSNNNEGGRSDGGGDHHNTQRHHHHQQQHHHNILSGLNQYGRQVSGDSQASGSLGGGDEEDQQD

SEQ ID NO: 91079 - protein, 489 aa, Arabidopsis thaliana
  peptide (1)..(489): Ceres Seq. ID no. 12726351
  misc_feature (101)..(363): Pfam Name: TCP family transcription factor Pfam Description: TCP family transcription factor
  misc_feature (1)..(489): Homolog of NCBI NO: 22331641 NR Description: putative protein; protein id: At3g47620.1, by cDNA: gi_16604510 [Arabidopsis thaliana] AT3g47620/F1P2_170 [Arabidopsis thaliana]
  misc_feature (13)..(489): Homolog of NCBI NO: 11357581 NR Description: hypothetical protein F1P2.170 - Arabidopsis >gi|6522545|emb|CAB61988.1| putative protein [Arabidopsis
  misc_feature (21)..(231): Homolog of NCBI NO: 5731257 NR Description: auxin-induced basic helix-loop-helix
  misc_feature (69)..(223): Homolog of NCBI NO: 18409345 NR Description: expressed protein; protein id: At1g69690.1, by cDNA: gi_15912212, supported by cDNA: gi_19547990 [Arabidopsis
  misc_feature (88)..(449): Homolog of NCBI NO: 15217857 NR Description: auxin-induced basic helix-loop-helix factor, putative; protein id: At1g58100.1, supported by cDNA:
  misc_feature (81)..(440): Homolog of NCBI NO: 15218305 NR Description: unknown protein; protein id: At1g72010.1, by cDNA: gi_19423971 [Arabidopsis thaliana]
  misc_feature (98)..(239): Homolog of NCBI NO: 20975251 NR Description: transcription factor PCF3 [Oryza sativa (japonica
  misc_feature (102)..(198): Homolog of NCBI NO: 15219640 NR Description: DNA binding protein, putative; protein id: supported by cDNA: gi_15912302, supported by cDNA: gi_19548006
  misc_feature (100)..(298): Homolog of NCBI NO: 15237274 NR Description: unknown protein; protein id: At5g23280.1 thaliana] >gi|10177817|dbj|BAB11183.1| gene_id:MKD15.14~unknown
  misc_feature (100)..(298): Homolog of NCBI NO: 26452377 NR Description: unknown protein [Arabidopsis thaliana]
MQKPTSSILNVIMDGGDSVGGGGGDDHHRHLHHHHRPTFPFQLLGKHDPDDNHQQQPSPSSSSSLFSLHQHQQLSQSQPQSQSQKSQPQTTQKELLQTQEESAVVAAKKPPLKRASTKDRHTKVDGRGRRIRMPALCAARVFQLTRELGHKSDGETIEWLLQQAEPSVIAATGTGTIPANFTSLNISLRSSGSSMSLPSHFRSAASTFSPNNIFSPAMLQQQQQQQRGGGVGFHHPHLQGRAPTSSLFPGIDNFTPTTSFLNFHNPTKQEGDQDSEELNSEKKRRIQTTSDLHQQQQQHQHDQIGGYTLQSSNSGSTATAAAAQQIPGNFWMVAAAAAAGGGGGNNNQTGGLMTASIGTGGGGGEPVWTFPSINTAAAALYRSGVSGVPSGAVSSGLHFMNFAAPMAFLTGQQQLATTSNHEINEDSNNNEGGRSDGGGDHHNTQRHHHHQQQHHHNILSGLNQYGRQVSGDSQASGSLGGGDEEDQQD

SEQ ID NO: 91080 - protein, 477 aa, Arabidopsis thaliana
  peptide (1)..(477): Ceres Seq. ID no. 12726352
  misc_feature (89)..(351): Pfam Name: TCP family transcription factor Pfam Description: TCP family transcription factor
  misc_feature (1)..(477): Homolog of NCBI NO: 22331641 NR Description: putative protein; protein id: At3g47620.1, by cDNA: gi_16604510 [Arabidopsis thaliana] AT3g47620/F1P2_170 [Arabidopsis thaliana]
  misc_feature (1)..(477): Homolog of NCBI NO: 11357581 NR Description: hypothetical protein F1P2.170 - Arabidopsis >gi|6522545|emb|CAB61988.1| putative protein [Arabidopsis
  misc_feature (9)..(219): Homolog of NCBI NO: 5731257 NR Description: auxin-induced basic helix-loop-helix
  misc_feature (57)..(211): Homolog of NCBI NO: 18409345 NR Description: expressed protein; protein id: At1g69690.1, by cDNA: gi_15912212, supported by cDNA: gi_19547990 [Arabidopsis
  misc_feature (76)..(437): Homolog of NCBI NO: 15217857 NR Description: auxin-induced basic helix-loop-helix factor, putative; protein id: At1g58100.1, supported by cDNA:
  misc_feature (69)..(428): Homolog of NCBI NO: 15218305 NR Description: unknown protein; protein id: At1g72010.1, by cDNA: gi_19423971 [Arabidopsis thaliana]
  misc_feature (86)..(227): Homolog of NCBI NO: 20975251 NR Description: transcription factor PCF3 [Oryza sativa (japonica
  misc_feature (90)..(186): Homolog of NCBI NO: 15219640 NR Description: DNA binding protein, putative; protein id: supported by cDNA: gi_15912302, supported by cDNA: gi_19548006
  misc_feature (88)..(286): Homolog of NCBI NO: 15237274 NR Description: unknown protein; protein id: At5g23280.1 thaliana] >gi|10177817|dbj|BAB11183.1| gene_id:MKD15.14~unknown
  misc_feature (88)..(286): Homolog of NCBI NO: 26452377 NR Description: unknown protein [Arabidopsis thaliana]
MDGGDSVGGGGGDDHHRHLHHHHRPTFPFQLLGKHDPDDNHQQQPSPSSSSSLFSLHQHQQLSQSQPQSQSQKSQPQTTQKELLQTQEESAVVAAKKPPLKRASTKDRHTKVDGRGRRIRMPALCAARVFQLTRELGHKSDGETIEWLLQQAEPSVIAATGTGTIPANFTSLNISLRSSGSSMSLPSHFRSAASTFSPNNIFSPAMLQQQQQQQRGGGVGFHHPHLQGRAPTSSLFPGIDNFTPTTSFLNFHNPTKQEGDQDSEELNSEKKRRIQTTSDLHQQQQQHQHDQIGGYTLQSSNSGSTATAAAAQQIPGNFWMVAAAAAAGGGGGNNNQTGGLMTASIGTGGGGGEPVWTFPSINTAAAALYRSGVSGVPSGAVSSGLHFMNFAAPMAFLTGQQQLATTSNHEINEDSNNNEGGRSDGGGDHHNTQRHHHHQQQHHHNILSGLNQYGRQVSGDSQASGSLGGGDEEDQQD

SEQ ID NO: 91081 - DNA, 2121 bp, Arabidopsis thaliana
  misc_feature (1)..(2121): Ceres Seq. ID no. 12726393
  misc_feature: MA Experiment ID: 20000315 Result: Down-regulated in Transcription
  misc_feature: MA Experiment 20000315 PARAMETER Experiment Name: At_14day_Shoots-Roots_Sub_P Parameter: Age (day) Value: 14
  misc_feature: MA Experiment 20000315 PARAMETER Experiment Name: At_14day_Shoots-Roots_Sub_P Parameter: Organism Value: A. thaliana
  misc_feature: MA Experiment 20000315 PARAMETER Experiment Name: At_14day_Shoots-Roots_Sub_P Parameter: Plant Line Value: WS
  misc_feature: MA Experiment 20000315 PARAMETER Experiment Name: At_14day_Shoots-Roots_Sub_P Parameter: Tissue Value: Shoots vs. Whole Plant
atgatttcgagtgtgagaaattgcggcacaatccaacggttttgtacaacttcgatttcattgctccagaaaccggttgaggagaacattgtccgtatctcgaatcaggtgatggtcaaatttgatcccaactctcaccttaggagtctcatcaatgcagggaatttgcgagctgctcgccaagtgttcgataaaatgccccacggagatattgtttcatggacatccatcattaaaagatacgtaactgcaaacaactctgacgaagcactgattttgttctccgcaatgcgtgttgttgatcatgccgtctcacctgatacctctgtgctaagtgttgtactcaaggcttgtggtcaaagctccaatattgcatatggagaatctttgcatgcttatgcggtgaaaacttcgcttctcagctctgtatatgtgggaagttctttactggatatgtataagagagttggaaagattgataagagttgcagagtctttagcgaaatgccttttagaaatgctgtaacatggacagcgattattacggggttggttcacgctggtcgttacaaggaaggtcttacgtacttttctgaaatgtcgagatcggaagaactatctgatacttatacatttgctattgccttgaaggcttgtgctggtttacgtcaagttaaatatggtaaggcgattcatactcatgtgatagtgagaggctttgttaccactctttgcgtggctaactcactcgcgacaatgtacactgaatgtggggaaatgcaggacggactttgtttgtttgaaaatatgagtgagagggatgtggtttcgtggacaagccttattgtggcttacaagcgaatcggtcaagaagtaaaagctgtggagacatttataaagatgagaaattctcaagtccctcctaatgaacaaacttttgcatcaatgttttctgcgtgtgcgagtctttctagacttgtgtggggcgagcagctccactgtaatgttttgtctctaggtttaaatgattctttgtcagtgagtaactcgatgatgaagatgtattctacatgtgggaatttagtctctgcttctgttttgtttcaaggaatgagatgcagggacattatttcgtggagtaccattattggagggtactgtcaagccggttttggagaagaaggttttaagtatttctcatggatgagacaatcagggacaaaaccaacagattttgctcttgctagtttgctgagtgtttcaggaaacatggcagttattgagggaggcaggcaagttcacgcgcttgctctttgttttggtttagaacagaactccacggttcgtagtagtctgattaatatgtactcgaaatgtggaagtatcaaagaagcttcaatgatattcggagaaacagatagagatgatattgtttctctgacagctatgatcaatggatatgcagaacatggaaagagcaaagaagctattgatctgtttgagaagagtctaaaggttggtttcagacccgactctgtaactttcatcagcgttctcaccgcctgcactcattcgggacagcttgaccttggttttcactatttcaacatgatgcaagagacgtataatatgagaccagccaaggaacattatggttgtatggttgatctgttatgtagagcaggacggctaagtgatgcagagaagatgatcaatgagatgtcatggaagaaagacgatgtagtctggaccacacttctcattgcgtgtaaggccaaaggagacattgaacgtgggagaagggctgctgagaggattctagagctggatcctacttgtgcaactgcacttgtaacactagccaatatatattcaagcacagggaacttggaagaagctgcaaatgtaagaaagaatatgaaagcaaaaggcgtgatcaaagagcccggatggtcatcaattaagatcaaggattgcgtttcagcgtttgtatctggtgatcggttccatccgcaaagtgaagatatatacaatatcttggaattagcagtatctggtgcagaagctcatagatttgattgcacattaaagagagcttttggggttaatttatattcctga

SEQ ID NO: 91082 - protein, 706 aa, Arabidopsis thaliana
  peptide (1)..(706): Ceres Seq. ID no. 12726394
  misc_feature (377)..(411): Pfam Name: PPR repeat Pfam Description: PPR repeat
  misc_feature (41)..(681): Homolog of NCBI NO: 34894002 NR Description: P0672D08.11 [Oryza sativa (japonica >gi|15128441|dbj|BAB62625.1| hypothetical protein~similar to thaliana chromosome 3, F28J7.34 [Oryza sativa (japonica F28J7.34
  misc_feature (25)..(94): Homolog of NCBI NO: 34894002 NR Description: P0672D08.11 [Oryza sativa (japonica >gi|15128441|dbj|BAB62625.1| hypothetical protein~similar to thaliana chromosome 3, F28J7.34 [Oryza sativa (japonica F28J7.34
  misc_feature (44)..(676): Homolog of NCBI NO: 15232837 NR Description: hypothetical protein; protein id: At3g02010.1 thaliana] >gi|6091739|gb|AAF03451.1|AC010797_27 hypothetical [Arabidopsis thaliana] >gi|6513930|gb|AAF14834.1|AC011664_16
  misc_feature (44)..(97): Homolog of NCBI NO: 15232837 NR Description: hypothetical protein; protein id: At3g02010.1 thaliana] >gi|6091739|gb|AAF03451.1|AC010797_27 hypothetical [Arabidopsis thaliana] >gi|6513930|gb|AAF14834.1|AC011664_16
  misc_feature (15)..(680): Homolog of NCBI NO: 15231798 NR Description: putative protein; protein id: At3g53360.1
  misc_feature (46)..(680): Homolog of NCBI NO: 15226150 NR Description: hypothetical protein; protein id: At2g33680.1
  misc_feature (44)..(681): Homolog of NCBI NO: 15219258 NR Description: hypothetical protein; protein id: At1g16480.1
  misc_feature (44)..(681): Homolog of NCBI NO: 25354624 NR Description: protein F3O9.28 [imported] - Arabidopsis thaliana
  misc_feature (63)..(688): Homolog of NCBI NO: 37536800 NR Description: putative PPR-repeat protein [Oryza sativa
  misc_feature (33)..(97): Homolog of NCBI NO: 37536800 NR Description: putative PPR-repeat protein [Oryza sativa
MISSVRNCGTIQRFCTTSISLLQKPVEENIVRISNQVMVKFDPNSHLRSLINAGNLRAARQVFDKMPHGDIVSWTSIIKRYVTANNSDEALILFSAMRVVDHAVSPDTSVLSVVLKACGQSSNIAYGESLHAYAVKTSLLSSVYVGSSLLDMYKRVGKIDKSCRVFSEMPFRNAVTWTAIITGLVHAGRYKEGLTYFSEMSRSEELSDTYTFAIALKACAGLRQVKYGKAIHTHVIVRGFVTTLCVANSLATMYTECGEMQDGLCLFENMSERDVVSWTSLIVAYKRIGQEVKAVETFIKMRNSQVPPNEQTFASMFSACASLSRLVWGEQLHCNVLSLGLNDSLSVSNSMMKMYSTCGNLVSASVLFQGMRCRDIISWSTIIGGYCQAGFGEEGFKYFSWMRQSGTKPTDFALASLLSVSGNMAVIEGGRQVHALALCFGLEQNSTVRSSLINMYSKCGSIKEASMIFGETDRDDIVSLTAMINGYAEHGKSKEAIDLFEKSLKVGFRPDSVTFISVLTACTHSGQLDLGFHYFNMMQETYNMRPAKEHYGCMVDLLCRAGRLSDAEKMINEMSWKKDDVVWTTLLIACKAKGDIERGRRAAERILELDPTCATALVTLANIYSSTGNLEEAANVRKNMKAKGVIKEPGWSSIKIKDCVSAFVSGDRFHPQSEDIYNILELAVSGAEAHRFDCTLKRAFGVNLYS

SEQ ID NO: 91083 - protein, 669 aa, Arabidopsis thaliana
  peptide (1)..(669): Ceres Seq. ID no. 12726395
  misc_feature (340)..(374): Pfam Name: PPR repeat Pfam Description: PPR repeat
  misc_feature (4)..(644): Homolog of NCBI NO: 34894002 NR Description: P0672D08.11 [Oryza sativa (japonica >gi|15128441|dbj|BAB62625.1| hypothetical protein~similar to thaliana chromosome 3, F28J7.34 [Oryza sativa (japonica F28J7.34
  misc_feature (1)..(57): Homolog of NCBI NO: 34894002 NR Description: P0672D08.11 [Oryza sativa (japonica >gi|15128441|dbj|BAB62625.1| hypothetical protein~similar to thaliana chromosome 3, F28J7.34 [Oryza sativa (japonica F28J7.34
  misc_feature (7)..(639): Homolog of NCBI NO: 15232837 NR Description: hypothetical protein; protein id: At3g02010.1 thaliana] >gi|6091739|gb|AAF03451.1|AC010797_27 hypothetical [Arabidopsis thaliana] >gi|6513930|gb|AAF14834.1|AC011664_16
  misc_feature (7)..(60): Homolog of NCBI NO: 15232837 NR Description: hypothetical protein; protein id: At3g02010.1 thaliana] >gi|6091739|gb|AAF03451.1|AC010797_27 hypothetical [Arabidopsis thaliana] >gi|6513930|gb|AAF14834.1|AC011664_16
  misc_feature (1)..(643): Homolog of NCBI NO: 15231798 NR Description: putative protein; protein id: At3g53360.1
  misc_feature (9)..(643): Homolog of NCBI NO: 15226150 NR Description: hypothetical protein; protein id: At2g33680.1
  misc_feature (7)..(644): Homolog of NCBI NO: 15219258 NR Description: hypothetical protein; protein id: At1g16480.1
  misc_feature (7)..(644): Homolog of NCBI NO: 25354624 NR Description: protein F3O9.28 [imported] - Arabidopsis thaliana
  misc_feature (26)..(651): Homolog of NCBI NO: 37536800 NR Description: putative PPR-repeat protein [Oryza sativa
  misc_feature (1)..(60): Homolog of NCBI NO: 37536800 NR Description: putative PPR-repeat protein [Oryza sativa
MVKFDPNSHLRSLINAGNLRAARQVFDKMPHGDIVSWTSIIKRYVTANNSDEALILFSAMRVVDHAVSPDTSVLSVVLKACGQSSNIAYGESLHAYAVKTSLLSSVYVGSSLLDMYKRVGKIDKSCRVFSEMPFRNAVTWTAIITGLVHAGRYKEGLTYFSEMSRSEELSDTYTFAIALKACAGLRQVKYGKAIHTHVIVRGFVTTLCVANSLATMYTECGEMQDGLCLFENMSERDVVSWTSLIVAYKRIGQEVKAVETFIKMRNSQVPPNEQTFASMFSACASLSRLVWGEQLHCNVLSLGLNDSLSVSNSMMKMYSTCGNLVSASVLFQGMRCRDIISWSTIIGGYCQAGFGEEGFKYFSWMRQSGTKPTDFALASLLSVSGNMAVIEGGRQVHALALCFGLEQNSTVRSSLINMYSKCGSIKEASMIFGETDRDDIVSLTAMINGYAEHGKSKEAIDLFEKSLKVGFRPDSVTFISVLTACTHSGQLDLGFHYFNMMQETYNMRPAKEHYGCMVDLLCRAGRLSDAEKMINEMSWKKDDVVWTTLLIACKAKGDIERGRRAAERILELDPTCATALVTLANIYSSTGNLEEAANVRKNMKAKGVIKEPGWSSIKIKDCVSAFVSGDRFHPQSEDIYNILELAVSGAEAHRFDCTLKRAFGVNLYS

SEQ ID NO: 91084 - protein, 641 aa, Arabidopsis thaliana
  peptide (1)..(641): Ceres Seq. ID no. 12726396
  misc_feature (312)..(346): Pfam Name: PPR repeat Pfam Description: PPR repeat
  misc_feature (1)..(616): Homolog of NCBI NO: 34894002 NR Description: P0672D08.11 [Oryza sativa (japonica >gi|15128441|dbj|BAB62625.1| hypothetical protein~similar to thaliana chromosome 3, F28J7.34 [Oryza sativa (japonica F28J7.34
  misc_feature (1)..(29): Homolog of NCBI NO: 34894002 NR Description: P0672D08.11 [Oryza sativa (japonica >gi|15128441|dbj|BAB62625.1| hypothetical protein~similar to thaliana chromosome 3, F28J7.34 [Oryza sativa (japonica F28J7.34
  misc_feature (1)..(611): Homolog of NCBI NO: 15232837 NR Description: hypothetical protein; protein id: At3g02010.1 thaliana] >gi|6091739|gb|AAF03451.1|AC010797_27 hypothetical [Arabidopsis thaliana] >gi|6513930|gb|AAF14834.1|AC011664_16
  misc_feature (1)..(32): Homolog of NCBI NO: 15232837 NR Description: hypothetical protein; protein id: At3g02010.1 thaliana] >gi|6091739|gb|AAF03451.1|AC010797_27 hypothetical [Arabidopsis thaliana] >gi|6513930|gb|AAF14834.1|AC011664_16
  misc_feature (1)..(615): Homolog of NCBI NO: 15231798 NR Description: putative protein; protein id: At3g53360.1
  misc_feature (1)..(615): Homolog of NCBI NO: 15226150 NR Description: hypothetical protein; protein id: At2g33680.1
  misc_feature (1)..(616): Homolog of NCBI NO: 15219258 NR Description: hypothetical protein; protein id: At1g16480.1
  misc_feature (1)..(616): Homolog of NCBI NO: 25354624 NR Description: protein F3O9.28 [imported] - Arabidopsis thaliana
  misc_feature (1)..(623): Homolog of NCBI NO: 37536800 NR Description: putative PPR-repeat protein [Oryza sativa
  misc_feature (1)..(32): Homolog of NCBI NO: 37536800 NR Description: putative PPR-repeat protein [Oryza sativa
MPHGDIVSWTSIIKRYVTANNSDEALILFSAMRVVDHAVSPDTSVLSVVLKACGQSSNIAYGESLHAYAVKTSLLSSVYVGSSLLDMYKRVGKIDKSCRVFSEMPFRNAVTWTAIITGLVHAGRYKEGLTYFSEMSRSEELSDTYTFAIALKACAGLRQVKYGKAIHTHVIVRGFVTTLCVANSLATMYTECGEMQDGLCLFENMSERDVVSWTSLIVAYKRIGQEVKAVETFIKMRNSQVPPNEQTFASMFSACASLSRLVWGEQLHCNVLSLGLNDSLSVSNSMMKMYSTCGNLVSASVLFQGMRCRDIISWSTIIGGYCQAGFGEEGFKYFSWMRQSGTKPTDFALASLLSVSGNMAVIEGGRQVHALALCFGLEQNSTVRSSLINMYSKCGSIKEASMIFGETDRDDIVSLTAMINGYAEHGKSKEAIDLFEKSLKVGFRPDSVTFISVLTACTHSGQLDLGFHYFNMMQETYNMRPAKEHYGCMVDLLCRAGRLSDAEKMINEMSWKKDDVVWTTLLIACKAKGDIERGRRAAERILELDPTCATALVTLANIYSSTGNLEEAANVRKNMKAKGVIKEPGWSSIKIKDCVSAFVSGDRFHPQSEDIYNILELAVSGAEAHRFDCTLKRAFGVNLYS

SEQ ID NO: 91085 - DNA, 1470 bp, Arabidopsis thaliana
  misc_feature (1)..(1470): Ceres Seq. ID no. 12726436
  misc_feature: MA Experiment ID: 20000180 Result: Down-regulated in Transcription
  misc_feature: MA Experiment 20000180 PARAMETER Experiment Name: At_Germinating_Seeds_P Parameter: Age (hr) Value: 24 vs. 0
  misc_feature: MA Experiment 20000180 PARAMETER Experiment Name: At_Germinating_Seeds_P Parameter: Tissue Value: Germinating Seeds
  misc_feature: MA Experiment ID: 20001451 Result: Up-regulated in Transcription
  misc_feature: MA Experiment 20001451 PARAMETER Experiment Name: At_Far-red-induction_P Parameter: Age (day) Value: 7
  misc_feature: MA Experiment 20001451 PARAMETER Experiment Name: At_Far-red-induction_P Parameter: Light Value: Far-red vs. White
  misc_feature: MA Experiment 20001451 PARAMETER Experiment Name: At_Far-red-induction_P Parameter: Organism Value: A. thaliana
  misc_feature: MA Experiment 20001451 PARAMETER Experiment Name: At_Far-red-induction_P Parameter: Plant Line Value: Columbia
  misc_feature: MA Experiment 20001451 PARAMETER Experiment Name: At_Far-red-induction_P Parameter: Timepoint (hr) Value: 24
  misc_feature: MA Experiment 20001451 PARAMETER Experiment Name: At_Far-red-induction_P Parameter: Tissue Value: Whole Plant
atgatgatcatgttctttctgttatgctcaataatctttgtagttaccatcataattttcagaaaacagaagagagggaagaaaagaaacacacttccgtcaccaccgggactaccgttgatcggaaaccttcatcaactcggccgccaccctcaccgatcactatgctctctcagccaccggtacggtcctcttatgcttcttcactttggccgtgtccccgttcttgtagtatcttcagctgaattggctagagacgttttgaagacgcatgaccgtgttttcgcaagccggccacggtcaaaaatcttcgagaaacttctttacgataagcatgatgtggcctcagctccttatggagagtactggaggcaaatgaaaagtgtgtgcgtcctccatctattcagcaacaaaatggtacgatcctttcgagaagtgagagaagaagagatcagtctgatgatggaaaagatcaggaaatcgatttctttgccggtaaatctaagcaagatcttggtgagtttaactaacgatgtgatatgtaaagttgctttgggacggaaatacggtggtgaaacggattttaaggagttaatggagagactaaataaactattggggacgtttagtgtggggagttatgtaccttggcttgcgtggattgattggatccgcggtttagactgtcaactagaaaagacggcaaacgatgttgataagttctttgagagagttgtgcaagatcatgtcgatggaaacagagatatgactgattttgtggatgtattgctcgctattcaaagagataagaccgtcgggtttgaaatcaaccgtgttagcataaaggcaattgtcatgaatgtttttgtgggtggtacggatacatcgtctacacttatggaatgggcaatgacagagcttctacgtcatccaaagtgtctgaaaagactccaagaagaagtccgcacgatttgcaaggataaatcaagtgtgtcagaagaagaaattcaaaacatgagctacttaaaagctgtaatcaaagaggcactcaggctccatcctccacttccattgatggttcctcacgaatcaacacaagatgtcagattaggagatcaccacataccagccggtacacaggtattgatcaatgcatgggcaatcgggagagaggctgcgacgtggggaccagacgtggaggagtttagaccagagaggcatttagattcgtctgttgattaccggggtcaggcttttgaactgattccattcggatcaggaagaaggatttgtccagcaatatcattcgctgtggtgttgaatgaggttgttttggctaacttagtgcatcggtttgattggagattatcagtcgaatctacagaagatcagaccgaggtcgctgaatcaacgggtattgcgatccaccgcatgttcccactctacgccattgcatcaaatactacttga

SEQ ID NO: 91086 - protein, 489 aa, Arabidopsis thaliana
  peptide (1)..(489): Ceres Seq. ID no. 12726437
  misc_feature (1)..(489): Homolog of NCBI NO: 22331672 NR Description: similar to cytochrome P450-like protein; protein At3g48270.1 [Arabidopsis thaliana]
  misc_feature (2)..(489): Homolog of NCBI NO: 22331680 NR Description: Expressed protein; protein id: At3g48310.1, by cDNA: gi_20465426 [Arabidopsis thaliana] Cytochrome P450 71A22 >gi|7430647|pir||T06711 probable cytochrome
  misc_feature (1)..(486): Homolog of NCBI NO: 22331676 NR Description: similar to cytochrome P450-like protein; protein At3g48290.1 [Arabidopsis thaliana]
  misc_feature (2)..(489): Homolog of NCBI NO: 22331682 NR Description: similar to cytochrome P450-like protein; protein At3g48320.1 [Arabidopsis thaliana]
  misc_feature (1)..(486): Homolog of NCBI NO: 22331674 NR Description: similar to cytochrome p450 family; protein id: [Arabidopsis thaliana] >gi|13878400|sp|Q9STK8|C71P_ARATH
  misc_feature (1)..(286): Homolog of NCBI NO: 7430651 NR Description: probable cytochrome P450 T29H11.190 - Arabidopsis
  misc_feature (287)..(486): Homolog of NCBI NO: 7430651 NR Description: probable cytochrome P450 T29H11.190 - Arabidopsis
  misc_feature (2)..(489): Homolog of NCBI NO: 13878402 NR Description: Cytochrome P450 71A23 >gi|7430648|pir||T06712
  misc_feature (66)..(489): Homolog of NCBI NO: 22331678 NR Description: similar to cytochrome P450-like protein; protein
  misc_feature (1)..(486): Homolog of NCBI NO: 15238664 NR Description: cytochrome P450-like protein; protein id: [Arabidopsis thaliana] >gi|13878366|sp|P58045|C71E_ARATH
MMIMFFLLCSIIFVVTIIIFRKQKRGKKRNTLPSPPGLPLIGNLHQLGRHPHRSLCSLSHRYGPLMLLHFGRVPVLVVSSAELARDVLKTHDRVFASRPRSKIFEKLLYDKHDVASAPYGEYWRQMKSVCVLHLFSNKMVRSFREVREEEISLMMEKIRKSISLPVNLSKILVSLTNDVICKVALGRKYGGETDFKELMERLNKLLGTFSVGSYVPWLAWIDWIRGLDCQLEKTANDVDKFFERVVQDHVDGNRDMTDFVDVLLAIQRDKTVGFEINRVSIKAIVMNVFVGGTDTSSTLMEWAMTELLRHPKCLKRLQEEVRTICKDKSSVSEEEIQNMSYLKAVIKEALRLHPPLPLMVPHESTQDVRLGDHHIPAGTQVLINAWAIGREAATWGPDVEEFRPERHLDSSVDYRGQAFELIPFGSGRRICPAISFAVVLNEVVLANLVHRFDWRLSVESTEDQTEVAESTGIAIHRMFPLYAIASNTT

SEQ ID NO: 91087 - protein, 488 aa, Arabidopsis thaliana
  peptide (1)..(488): Ceres Seq. ID no. 12726438
  misc_feature (1)..(488): Homolog of NCBI NO: 22331672 NR Description: similar to cytochrome P450-like protein; protein At3g48270.1 [Arabidopsis thaliana]
  misc_feature (1)..(488): Homolog of NCBI NO: 22331680 NR Description: Expressed protein; protein id: At3g48310.1, by cDNA: gi_20465426 [Arabidopsis thaliana] Cytochrome P450 71A22 >gi|7430647|pir||T06711 probable cytochrome
  misc_feature (1)..(485): Homolog of NCBI NO: 22331676 NR Description: similar to cytochrome P450-like protein; protein At3g48290.1 [Arabidopsis thaliana]
  misc_feature (1)..(488): Homolog of NCBI NO: 22331682 NR Description: similar to cytochrome P450-like protein; protein At3g48320.1 [Arabidopsis thaliana]
  misc_feature (1)..(485): Homolog of NCBI NO: 22331674 NR Description: similar to cytochrome p450 family; protein id: [Arabidopsis thaliana] >gi|13878400|sp|Q9STK8|C71P_ARATH
  misc_feature (1)..(285): Homolog of NCBI NO: 7430651 NR Description: probable cytochrome P450 T29H11.190 - Arabidopsis
  misc_feature (286)..(485): Homolog of NCBI NO: 7430651 NR Description: probable cytochrome P450 T29H11.190 - Arabidopsis
  misc_feature (1)..(488): Homolog of NCBI NO: 13878402 NR Description: Cytochrome P450 71A23 >gi|7430648|pir||T06712
  misc_feature (65)..(488): Homolog of NCBI NO: 22331678 NR Description: similar to cytochrome P450-like protein; protein
  misc_feature (1)..(485): Homolog of NCBI NO: 15238664 NR Description: cytochrome P450-like protein; protein id: [Arabidopsis thaliana] >gi|13878366|sp|P58045|C71E_ARATH
MIMFFLLCSIIFVVTIIIFRKQKRGKKRNTLPSPPGLPLIGNLHQLGRHPHRSLCSLSHRYGPLMLLHFGRVPVLVVSSAELARDVLKTHDRVFASRPRSKIFEKLLYDKHDVASAPYGEYWRQMKSVCVLHLFSNKMVRSFREVREEEISLMMEKIRKSISLPVNLSKILVSLTNDVICKVALGRKYGGETDFKELMERLNKLLGTFSVGSYVPWLAWIDWIRGLDCQLEKTANDVDKFFERVVQDHVDGNRDMTDFVDVLLAIQRDKTVGFEINRVSIKAIVMNVFVGGTDTSSTLMEWAMTELLRHPKCLKRLQEEVRTICKDKSSVSEEEIQNMSYLKAVIKEALRLHPPLPLMVPHESTQDVRLGDHHIPAGTQVLINAWAIGREAATWGPDVEEFRPERHLDSSVDYRGQAFELIPFGSGRRICPAISFAVVLNEVVLANLVHRFDWRLSVESTEDQTEVAESTGIAIHRMFPLYAIASNTT

SEQ ID NO: 91088 - protein, 486 aa, Arabidopsis thaliana
  peptide (1)..(486): Ceres Seq. ID no. 12726439
  misc_feature (1)..(486): Homolog of NCBI NO: 22331672 NR Description: similar to cytochrome P450-like protein; protein At3g48270.1 [Arabidopsis thaliana]
  misc_feature (1)..(486): Homolog of NCBI NO: 22331680 NR Description: Expressed protein; protein id: At3g48310.1, by cDNA: gi_20465426 [Arabidopsis thaliana] Cytochrome P450 71A22 >gi|7430647|pir||T06711 probable cytochrome
  misc_feature (1)..(483): Homolog of NCBI NO: 22331676 NR Description: similar to cytochrome P450-like protein; protein At3g48290.1 [Arabidopsis thaliana]
  misc_feature (1)..(486): Homolog of NCBI NO: 22331682 NR Description: similar to cytochrome P450-like protein; protein At3g48320.1 [Arabidopsis thaliana]
  misc_feature (1)..(483): Homolog of NCBI NO: 22331674 NR Description: similar to cytochrome p450 family; protein id: [Arabidopsis thaliana] >gi|13878400|sp|Q9STK8|C71P_ARATH
  misc_feature (1)..(283): Homolog of NCBI NO: 7430651 NR Description: probable cytochrome P450 T29H11.190 - Arabidopsis
  misc_feature (284)..(483): Homolog of NCBI NO: 7430651 NR Description: probable cytochrome P450 T29H11.190 - Arabidopsis
  misc_feature (1)..(486): Homolog of NCBI NO: 13878402 NR Description: Cytochrome P450 71A23 >gi|7430648|pir||T06712
  misc_feature (63)..(486): Homolog of NCBI NO: 22331678 NR Description: similar to cytochrome P450-like protein; protein
  misc_feature (1)..(483): Homolog of NCBI NO: 15238664 NR Description: cytochrome P450-like protein; protein id: [Arabidopsis thaliana] >gi|13878366|sp|P58045|C71E_ARATH
MFFLLCSIIFVVTIIIFRKQKRGKKRNTLPSPPGLPLIGNLHQLGRHPHRSLCSLSHRYGPLMLLHFGRVPVLVVSSAELARDVLKTHDRVFASRPRSKIFEKLLYDKHDVASAPYGEYWRQMKSVCVLHLFSNKMVRSFREVREEEISLMMEKIRKSISLPVNLSKILVSLTNDVICKVALGRKYGGETDFKELMERLNKLLGTFSVGSYVPWLAWIDWIRGLDCQLEKTANDVDKFFERVVQDHVDGNRDMTDFVDVLLAIQRDKTVGFEINRVSIKAIVMNVFVGGTDTSSTLMEWAMTELLRHPKCLKRLQEEVRTICKDKSSVSEEEIQNMSYLKAVIKEALRLHPPLPLMVPHESTQDVRLGDHHIPAGTQVLINAWAIGREAATWGPDVEEFRPERHLDSSVDYRGQAFELIPFGSGRRICPAISFAVVLNEVVLANLVHRFDWRLSVESTEDQTEVAESTGIAIHRMFPLYAIASNTT

SEQ ID NO: 91089 - DNA, 1461 bp, Arabidopsis thaliana
  misc_feature (1)..(1461): Ceres Seq. ID no. 12726440
  misc_feature: MA Experiment ID: 20000184 Result: Up-regulated in Transcription
  misc_feature: MA Experiment 20000184 PARAMETER Experiment Name: At_Shoots__P Parameter: Age (day) Value: 7
  misc_feature: MA Experiment 20000184 PARAMETER Experiment Name: At_Shoots__P Parameter: Tissue Value: Shoots vs. Whole Plant
  misc_feature: MA Experiment ID: 20000185 Result: Up-regulated in Transcription
  misc_feature: MA Experiment 20000185 PARAMETER Experiment Name: At_Roots__P Parameter: Age (day) Value: 7 vs. 21
  misc_feature: MA Experiment 20000185 PARAMETER Experiment Name: At_Roots__P Parameter: Organism Value: A. thaliana
  misc_feature: MA Experiment 20000185 PARAMETER Experiment Name: At_Roots__P Parameter: Tissue Value: Roots vs. Whole Plant
  misc_feature: MA Experiment ID: 20000269 Result: Down-regulated in Transcription
  misc_feature: MA Experiment 20000269 PARAMETER Experiment Name: At_1mM_KNO3_L-vs-H_Roots_P Parameter: Age (day) Value: 7,10,12
  misc_feature: MA Experiment 20000269 PARAMETER Experiment Name: At_1mM_KNO3_L-vs-H_Roots_P Parameter: Organism Value: A. thaliana
  misc_feature: MA Experiment 20000269 PARAMETER Experiment Name: At_1mM_KNO3_L-vs-H_Roots_P Parameter: Plant Line Value: WS
  misc_feature: MA Experiment 20000269 PARAMETER Experiment Name: At_1mM_KNO3_L-vs-H_Roots_P Parameter: Timepoint (day) Value: 7,10,12
  misc_feature: MA Experiment 20000269 PARAMETER Experiment Name: At_1mM_KNO3_L-vs-H_Roots_P Parameter: Tissue Value: Roots
  misc_feature: MA Experiment 20000269 PARAMETER Experiment Name: At_1mM_KNO3_L-vs-H_Roots_P Parameter: Treatment Value: 1mM KNO3 vs. 50mM KNO3
  misc_feature: MA Experiment ID: 20000437 Result: Up-regulated in Transcription
  misc_feature: MA Experiment 20000437 PARAMETER Experiment Name: At_Drought_P Parameter: Age (day) Value: 8
  misc_feature: MA Experiment 20000437 PARAMETER Experiment Name: At_Drought_P Parameter: Organism Value: A. thaliana
  misc_feature: MA Experiment 20000437 PARAMETER Experiment Name: At_Drought_P Parameter: Plant Line Value: WS
  misc_feature: MA Experiment 20000437 PARAMETER Experiment Name: At_Drought_P Parameter: Timepoint (hr) Value: 24
  misc_feature: MA Experiment 20000437 PARAMETER Experiment Name: At_Drought_P Parameter: Tissue Value: Whole Plant
  misc_feature: MA Experiment 20000437 PARAMETER Experiment Name: At_Drought_P Parameter: Treatment Value: Drought vs. No Drought
  misc_feature: MA Experiment ID: 20000438 Result: Up-regulated in Transcription
  misc_feature: MA Experiment 20000438 PARAMETER Experiment Name: At_Shoots__P Parameter: Age (day) Value: 14
  misc_feature: MA Experiment 20000438 PARAMETER Experiment Name: At_Shoots__P Parameter: Tissue Value: Shoots vs. Whole Plant
  misc_feature: MA Experiment ID: 20000439 Result: Up-regulated in Transcription
  misc_feature: MA Experiment 20000439 PARAMETER Experiment Name: At_Roots__P Parameter: Age (day) Value: 14 vs. 21
  misc_feature: MA Experiment 20000439 PARAMETER Experiment Name: At_Roots__P Parameter: Organism Value: A. thaliana
  misc_feature: MA Experiment 20000439 PARAMETER Experiment Name: At_Roots__P Parameter: Tissue Value: Roots vs. Whole Plant
  misc_feature: MA Experiment ID: 20000453 Result: Up-regulated in Transcription
  misc_feature: MA Experiment 20000453 PARAMETER Experiment Name: At_100uM_ABA_P Parameter: Age (day) Value: 15
  misc_feature: MA Experiment 20000453 PARAMETER Experiment Name: At_100uM_ABA_P Parameter: Organism Value: A. thaliana
  misc_feature: MA Experiment 20000453 PARAMETER Experiment Name: At_100uM_ABA_P Parameter: Plant Line Value: WS
  misc_feature: MA Experiment 20000453 PARAMETER Experiment Name: At_100uM_ABA_P Parameter: Timepoint (hr) Value: 24
  misc_feature: MA Experiment 20000453 PARAMETER Experiment Name: At_100uM_ABA_P Parameter: Tissue Value: Aerial
  misc_feature: MA Experiment 20000453 PARAMETER Experiment Name: At_100uM_ABA_P Parameter: Treatment Value: 100uM ABA vs. No Treatment
atgatgatgatgatcatacttctcttatgctcaataatactcataaccattctcttcttcaaaaaacagtcgagagggaagaagagcaacgcacctccatcaccaccgagacttcctctgataagaaaccttcatcagctcgggcgccaccctcaccgatcattatgctccctcagccaccgttacggtcctctgatgctcctccactttggcagtgtccctgttcttgtagtctcctccgcagatgcggctaaagacgttttgaagacgcatgaccgcgtttttgctagccgtccacggtcaaaaatctttgataagattttttacaacgggcgagatgtggccttagctccttatggagagtattggaggcaaatgaaaagtgtgtgcgtcctccatctctttagtaacaaaatggtacgatcctttcgagacgttagacaagaagagatcagcctgatgattgagaagatccgaatatcgagttctttgcggataaatttaagcgagatcctggtgaatcttacaaacaatgtaatatgtagagttgctttgggacggaaatacggcggtaagaccgattttaaagacttaatgaaaaggctaacgaggctactaggcgagtttagtgtcgggagttatgtatcgtggctcgcatggattgactggatccgcggtttggatggtcaacttataaagataagcaatgatcttgatgaattcttggagagggttgtccaagatcatgtagatggggatggacacaagaatgattttgtggatttcttgctcacaattgagagagagaagagcgttgggtttgaaatcgaccggttaagcataaaagcaattatcttggatgtttttgtgggtgatatggacacaacatacactcttttggaatgggcaatgacagagctactatgccaccatgagtgtctagacagactccaagaagaagttcgtatggtttgtaaagacaaatcgggtgtatcagaagacgaccttcaagacatgaaatacttaaaagctgtgattaaagagacactaaggctacatcctccacttccattgatggttcctcacgaatcaacacatgatgtcaaattaagagactatcacatacctgccggtacacatgtaatgatcaatgcttgggcaatcgggagagaggctgcgacatggggaccagacgcggaagagtttagaccagagagacatttgaattcgtatgttgattaccgaggtcaggatacggagctggtcccgtttggagcagggagaaggatttgcccagcaatatcatttgctgtggtattggatgaggtggttttggctaacttagtgcatcagtttgattggacactaccggaggaatctacagaatatcagactgatgtcgctgaatcaaccggtatggcggttcatcgcatgttcccactcttcgccatgactacttga

SEQ ID NO: 91090 - protein, 486 aa, Arabidopsis thaliana
  peptide (1)..(486): Ceres Seq. ID no. 12726441
  misc_feature (1)..(486): Homolog of NCBI NO: 22331676 NR Description: similar to cytochrome P450-like protein; protein At3g48290.1 [Arabidopsis thaliana]
  misc_feature (1)..(286): Homolog of NCBI NO: 7430651 NR Description: probable cytochrome P450 T29H11.190 - Arabidopsis
  misc_feature (287)..(486): Homolog of NCBI NO: 7430651 NR Description: probable cytochrome P450 T29H11.190 - Arabidopsis
  misc_feature (3)..(486): Homolog of NCBI NO: 22331680 NR Description: Expressed protein; protein id: At3g48310.1, by cDNA: gi_20465426 [Arabidopsis thaliana] Cytochrome P450 71A22 >gi|7430647|pir||T06711 probable cytochrome
  misc_feature (2)..(486): Homolog of NCBI NO: 22331672 NR Description: similar to cytochrome P450-like protein; protein At3g48270.1 [Arabidopsis thaliana]
  misc_feature (3)..(486): Homolog of NCBI NO: 22331682 NR Description: similar to cytochrome P450-like protein; protein At3g48320.1 [Arabidopsis thaliana]
  misc_feature (2)..(486): Homolog of NCBI NO: 22331674 NR Description: similar to cytochrome p450 family; protein id: [Arabidopsis thaliana] >gi|13878400|sp|Q9STK8|C71P_ARATH
  misc_feature (5)..(484): Homolog of NCBI NO: 13878402 NR Description: Cytochrome P450 71A23 >gi|7430648|pir||T06712
  misc_feature (66)..(484): Homolog of NCBI NO: 22331678 NR Description: similar to cytochrome P450-like protein; protein
  misc_feature (2)..(481): Homolog of NCBI NO: 15238664 NR Description: cytochrome P450-like protein; protein id: [Arabidopsis thaliana] >gi|13878366|sp|P58045|C71E_ARATH
MMMMIILLLCSIILITILFFKKQSRGKKSNAPPSPPRLPLIRNLHQLGRHPHRSLCSLSHRYGPLMLLHFGSVPVLVVSSADAAKDVLKTHDRVFASRPRSKIFDKIFYNGRDVALAPYGEYWRQMKSVCVLHLFSNKMVRSFRDVRQEEISLMIEKIRISSSLRINLSEILVNLTNNVICRVALGRKYGGKTDFKDLMKRLTRLLGEFSVGSYVSWLAWIDWIRGLDGQLIKISNDLDEFLERVVQDHVDGDGHKNDFVDFLLTIEREKSVGFEIDRLSIKAIILDVFVGDMDTTYTLLEWAMTELLCHHECLDRLQEEVRMVCKDKSGVSEDDLQDMKYLKAVIKETLRLHPPLPLMVPHESTHDVKLRDYHIPAGTHVMINAWAIGREAATWGPDAEEFRPERHLNSYVDYRGQDTELVPFGAGRRICPAISFAVVLDEVVLANLVHQFDWTLPEESTEYQTDVAESTGMAVHRMFPLFAMTT

SEQ ID NO: 91091 - protein, 485 aa, Arabidopsis thaliana
  peptide (1)..(485): Ceres Seq. ID no. 12726442
  misc_feature (1)..(485): Homolog of NCBI NO: 22331676 NR Description: similar to cytochrome P450-like protein; protein At3g48290.1 [Arabidopsis thaliana]
  misc_feature (1)..(285): Homolog of NCBI NO: 7430651 NR Description: probable cytochrome P450 T29H11.190 - Arabidopsis
  misc_feature (286)..(485): Homolog of NCBI NO: 7430651 NR Description: probable cytochrome P450 T29H11.190 - Arabidopsis
  misc_feature (2)..(485): Homolog of NCBI NO: 22331680 NR Description: Expressed protein; protein id: At3g48310.1, by cDNA: gi_20465426 [Arabidopsis thaliana] Cytochrome P450 71A22 >gi|7430647|pir||T06711 probable cytochrome
  misc_feature (1)..(485): Homolog of NCBI NO: 22331672 NR Description: similar to cytochrome P450-like protein; protein At3g48270.1 [Arabidopsis thaliana]
  misc_feature (2)..(485): Homolog of NCBI NO: 22331682 NR Description: similar to cytochrome P450-like protein; protein At3g48320.1 [Arabidopsis thaliana]
  misc_feature (1)..(485): Homolog of NCBI NO: 22331674 NR Description: similar to cytochrome p450 family; protein id: [Arabidopsis thaliana] >gi|13878400|sp|Q9STK8|C71P_ARATH
  misc_feature (4)..(483): Homolog of NCBI NO: 13878402 NR Description: Cytochrome P450 71A23 >gi|7430648|pir||T06712
  misc_feature (65)..(483): Homolog of NCBI NO: 22331678 NR Description: similar to cytochrome P450-like protein; protein
  misc_feature (1)..(480): Homolog of NCBI NO: 15238664 NR Description: cytochrome P450-like protein; protein id: [Arabidopsis thaliana] >gi|13878366|sp|P58045|C71E_ARATH
MMMIILLLCSIILITILFFKKQSRGKKSNAPPSPPRLPLIRNLHQLGRHPHRSLCSLSHRYGPLMLLHFGSVPVLVVSSADAAKDVLKTHDRVFASRPRSKIFDKIFYNGRDVALAPYGEYWRQMKSVCVLHLFSNKMVRSFRDVRQEEISLMIEKIRISSSLRINLSEILVNLTNNVICRVALGRKYGGKTDFKDLMKRLTRLLGEFSVGSYVSWLAWIDWIRGLDGQLIKISNDLDEFLERVVQDHVDGDGHKNDFVDFLLTIEREKSVGFEIDRLSIKAIILDVFVGDMDTTYTLLEWAMTELLCHHECLDRLQEEVRMVCKDKSGVSEDDLQDMKYLKAVIKETLRLHPPLPLMVPHESTHDVKLRDYHIPAGTHVMINAWAIGREAATWGPDAEEFRPERHLNSYVDYRGQDTELVPFGAGRRICPAISFAVVLDEVVLANLVHQFDWTLPEESTEYQTDVAESTGMAVHRMFPLFAMTT

SEQ ID NO: 91092 - protein, 484 aa, Arabidopsis thaliana
  peptide (1)..(484): Ceres Seq. ID no. 12726443
  misc_feature (1)..(484): Homolog of NCBI NO: 22331676 NR Description: similar to cytochrome P450-like protein; protein At3g48290.1 [Arabidopsis thaliana]
  misc_feature (1)..(284): Homolog of NCBI NO: 7430651 NR Description: probable cytochrome P450 T29H11.190 - Arabidopsis
  misc_feature (285)..(484): Homolog of NCBI NO: 7430651 NR Description: probable cytochrome P450 T29H11.190 - Arabidopsis
  misc_feature (1)..(484): Homolog of NCBI NO: 22331680 NR Description: Expressed protein; protein id: At3g48310.1, by cDNA: gi_20465426 [Arabidopsis thaliana] Cytochrome P450 71A22 >gi|7430647|pir||T06711 probable cytochrome
  misc_feature (1)..(484): Homolog of NCBI NO: 22331672 NR Description: similar to cytochrome P450-like protein; protein At3g48270.1 [Arabidopsis thaliana]
  misc_feature (1)..(484): Homolog of NCBI NO: 22331682 NR Description: similar to cytochrome P450-like protein; protein At3g48320.1 [Arabidopsis thaliana]
  misc_feature (1)..(484): Homolog of NCBI NO: 22331674 NR Description: similar to cytochrome p450 family; protein id: [Arabidopsis thaliana] >gi|13878400|sp|Q9STK8|C71P_ARATH
  misc_feature (3)..(482): Homolog of NCBI NO: 13878402 NR Description: Cytochrome P450 71A23 >gi|7430648|pir||T06712
  misc_feature (64)..(482): Homolog of NCBI NO: 22331678 NR Description: similar to cytochrome P450-like protein; protein
  misc_feature (1)..(479): Homolog of NCBI NO: 15238664 NR Description: cytochrome P450-like protein; protein id: [Arabidopsis thaliana] >gi|13878366|sp|P58045|C71E_ARATH
MMIILLLCSIILITILFFKKQSRGKKSNAPPSPPRLPLIRNLHQLGRHPHRSLCSLSHRYGPLMLLHFGSVPVLVVSSADAAKDVLKTHDRVFASRPRSKIFDKIFYNGRDVALAPYGEYWRQMKSVCVLHLFSNKMVRSFRDVRQEEISLMIEKIRISSSLRINLSEILVNLTNNVICRVALGRKYGGKTDFKDLMKRLTRLLGEFSVGSYVSWLAWIDWIRGLDGQLIKISNDLDEFLERVVQDHVDGDGHKNDFVDFLLTIEREKSVGFEIDRLSIKAIILDVFVGDMDTTYTLLEWAMTELLCHHECLDRLQEEVRMVCKDKSGVSEDDLQDMKYLKAVIKETLRLHPPLPLMVPHESTHDVKLRDYHIPAGTHVMINAWAIGREAATWGPDAEEFRPERHLNSYVDYRGQDTELVPFGAGRRICPAISFAVVLDEVVLANLVHQFDWTLPEESTEYQTDVAESTGMAVHRMFPLFAMTT

SEQ ID NO: 91093 - DNA, 1263 bp, Arabidopsis thaliana
  misc_feature (1)..(1263): Ceres Seq. ID no. 12726444
  misc_feature: MA Experiment ID: 20001905 Result: Up-regulated in Transcription
  misc_feature: MA Experiment 20001905 PARAMETER Experiment Name: At_Drought_Reproduction_P Parameter: Age (day) Value: 40
  misc_feature: MA Experiment 20001905 PARAMETER Experiment Name: At_Drought_Reproduction_P Parameter: Organism Value: A. thaliana
  misc_feature: MA Experiment 20001905 PARAMETER Experiment Name: At_Drought_Reproduction_P Parameter: Plant Line Value: WS
  misc_feature: MA Experiment 20001905 PARAMETER Experiment Name: At_Drought_Reproduction_P Parameter: Timepoint (day) Value: 10
  misc_feature: MA Experiment 20001905 PARAMETER Experiment Name: At_Drought_Reproduction_P Parameter: Tissue Value: Rosettes
  misc_feature: MA Experiment 20001905 PARAMETER Experiment Name: At_Drought_Reproduction_P Parameter: Treatment Value: Drought vs. No Drought
  misc_feature: MA Experiment ID: 20001906 Result: Up-regulated in Transcription
  misc_feature: MA Experiment 20001906 PARAMETER Experiment Name: At_Drought_Reproduction_P Parameter: Age (day) Value: 35
  misc_feature: MA Experiment 20001906 PARAMETER Experiment Name: At_Drought_Reproduction_P Parameter: Organism Value: A. thaliana
  misc_feature: MA Experiment 20001906 PARAMETER Experiment Name: At_Drought_Reproduction_P Parameter: Plant Line Value: WS
  misc_feature: MA Experiment 20001906 PARAMETER Experiment Name: At_Drought_Reproduction_P Parameter: Timepoint (day) Value: 5
  misc_feature: MA Experiment 20001906 PARAMETER Experiment Name: At_Drought_Reproduction_P Parameter: Tissue Value: Siliques
  misc_feature: MA Experiment 20001906 PARAMETER Experiment Name: At_Drought_Reproduction_P Parameter: Treatment Value: Drought vs. No Drought
  misc_feature: MA Experiment ID: 20001908 Result: Up-regulated in Transcription
  misc_feature: MA Experiment 20001908 PARAMETER Experiment Name: At_Drought_Reproduction_P Parameter: Age (day) Value: 40
  misc_feature: MA Experiment 20001908 PARAMETER Experiment Name: At_Drought_Reproduction_P Parameter: Organism Value: A. thaliana
  misc_feature: MA Experiment 20001908 PARAMETER Experiment Name: At_Drought_Reproduction_P Parameter: Plant Line Value: WS
  misc_feature: MA Experiment 20001908 PARAMETER Experiment Name: At_Drought_Reproduction_P Parameter: Timepoint (day) Value: 10
  misc_feature: MA Experiment 20001908 PARAMETER Experiment Name: At_Drought_Reproduction_P Parameter: Tissue Value: Siliques
  misc_feature: MA Experiment 20001908 PARAMETER Experiment Name: At_Drought_Reproduction_P Parameter: Treatment Value: Drought vs. No Drought
  misc_feature: Pfam Name: p450 Pfam Description: Cytochrome P450
atgctcctccacttcggaagtgtccccgttattgtagcctctacagcagaagcagctcgagacgttttaaagacgcatgatcgcgtttttgctagccgtccacggtcaaaaatcttcgaaaagcttctttacaagagccgtaatatggcctcagctccttatggagagtattggcgacaaatgaagagtgttagtgttctccatctcctcagcaacaaaatggtacggtcctttcaagacgtgagacaagaagagatcactctgatgatggaaacgatccgtaaatcgagttctaaaccggtaaatcttagcaagatcttgtcgagtttaactaacgatgttatatgtagagtagctttgggacggaaatatggtgttggaacagattttaaagagttaatagacaggctcatgaggcaacttggtacgtttactatcgggagttatgtaccgtggcttgcgtggactgattgggtcagcggtttggaggctcgactggaaaagaccgctaatgattttgataagctattggagagaattgtgcaggatcatgaagatggagacggcgacaagactgattttgtggatgtattgctcgcagctcagagagacaagagtttcgggttcgatattgaccggttaagcataaaagcaatcgtcttggatgcttttgtgggtggtacagacacatcctccacgcttgtggaatgggaaatgacagagcttctacgacacccaacgtgtctaaaaaaacttcaagaggaagtccgtacgatttgtaagggaaaatcaagtgtgtctgaagatgacattcaaggaatggaatacttaaaagctgtggtcaaagaggcactcaggctacatccaccagttccattgatggttcctcatcaatcaacacaagatgttaggttaagagataaccatatacctgccggtacgcaggttatagtcaatctttgggccgtcgggagagaggctgcgacgtggggaccagatgcgaatgagtttagaccggagaggcatttagagtcgccttctgatttccggggtcaggattttgagctgattccttttggagcagggagaaggatgtgtccaggaatatcatttgctgtggtgctgaatgaggtagtcttggctaacttagtgcatgggtttgattggcaatctatagacgatgagaccgatgttgctgaatcaatcggtagtgtgattcgccgcatgcaccctctttacgtcattccatcatctactacttga

SEQ ID NO: 91094 - protein, 420 aa, Arabidopsis thaliana; identical to SEQ ID NO: 86699
  peptide (1)..(420): Ceres Seq. ID no. 12726445
  misc_feature: Pfam Name: p450 Pfam Description: Cytochrome P450
  misc_feature (1)..(420): Homolog of NCBI NO: 13878402 NR Description: Cytochrome P450 71A23 >gi|7430648|pir||T06712
  misc_feature (1)..(420): Homolog of NCBI NO: 22331678 NR Description: similar to cytochrome P450-like protein; protein
  misc_feature (1)..(420): Homolog of NCBI NO: 22331672 NR Description: similar to cytochrome P450-like protein; protein At3g48270.1 [Arabidopsis thaliana]
  misc_feature (1)..(420): Homolog of NCBI NO: 22331680 NR Description: Expressed protein; protein id: At3g48310.1, by cDNA: gi_20465426 [Arabidopsis thaliana] Cytochrome P450 71A22 >gi|7430647|pir||T06711 probable cytochrome
  misc_feature (1)..(417): Homolog of NCBI NO: 22331674 NR Description: similar to cytochrome p450 family; protein id: [Arabidopsis thaliana] >gi|13878400|sp|Q9STK8|C71P_ARATH
  misc_feature (1)..(415): Homolog of NCBI NO: 22331676 NR Description: similar to cytochrome P450-like protein; protein At3g48290.1 [Arabidopsis thaliana]
  misc_feature (1)..(420): Homolog of NCBI NO: 22331682 NR Description: similar to cytochrome P450-like protein; protein At3g48320.1 [Arabidopsis thaliana]
  misc_feature (1)..(417): Homolog of NCBI NO: 15238664 NR Description: cytochrome P450-like protein; protein id: [Arabidopsis thaliana] >gi|13878366|sp|P58045|C71E_ARATH
  misc_feature (1)..(418): Homolog of NCBI NO: 13878406 NR Description: Cytochrome P450 71A20 >gi|7430641|pir||T06288
  misc_feature (1)..(418): Homolog of NCBI NO: 15224570 NR Description: cytochrome p450 family; protein id: At2g30770.1

SEQ ID NO: 91095 - protein, 372 aa, Arabidopsis thaliana; identical to SEQ ID NO: 86700
  peptide (1)..(372): Ceres Seq. ID no. 12726446
  misc_feature: Pfam Name: p450 Pfam Description: Cytochrome P450
  misc_feature (1)..(372): Homolog of NCBI NO: 13878402 NR Description: Cytochrome P450 71A23 >gi|7430648|pir||T06712
  misc_feature (1)..(372): Homolog of NCBI NO: 22331678 NR Description: similar to cytochrome P450-like protein; protein
  misc_feature (1)..(372): Homolog of NCBI NO: 22331672 NR Description: similar to cytochrome P450-like protein; protein At3g48270.1 [Arabidopsis thaliana]
  misc_feature (1)..(372): Homolog of NCBI NO: 22331680 NR Description: Expressed protein; protein id: At3g48310.1, by cDNA: gi_20465426 [Arabidopsis thaliana] Cytochrome P450 71A22 >gi|7430647|pir||T06711 probable cytochrome
  misc_feature (1)..(369): Homolog of NCBI NO: 22331674 NR Description: similar to cytochrome p450 family; protein id: [Arabidopsis thaliana] >gi|13878400|sp|Q9STK8|C71P_ARATH
  misc_feature (1)..(367): Homolog of NCBI NO: 22331676 NR Description: similar to cytochrome P450-like protein; protein At3g48290.1 [Arabidopsis thaliana]
  misc_feature (1)..(372): Homolog of NCBI NO: 22331682 NR Description: similar to cytochrome P450-like protein; protein At3g48320.1 [Arabidopsis thaliana]
  misc_feature (1)..(369): Homolog of NCBI NO: 15238664 NR Description: cytochrome P450-like protein; protein id: [Arabidopsis thaliana] >gi|13878366|sp|P58045|C71E_ARATH
  misc_feature (1)..(370): Homolog of NCBI NO: 13878406 NR Description: Cytochrome P450 71A20 >gi|7430641|pir||T06288
  misc_feature (1)..(370): Homolog of NCBI NO: 15224570 NR Description: cytochrome p450 family; protein id: At2g30770.1

SEQ ID NO: 91096 - protein, 360 aa, Arabidopsis thaliana
  peptide (1)..(360): Ceres Seq. ID no. 12726447
  misc_feature: Pfam Name: p450 Pfam Description: Cytochrome P450
  misc_feature (1)..(360): Homolog of NCBI NO: 13878402 NR Description: Cytochrome P450 71A23 >gi|7430648|pir||T06712
  misc_feature (1)..(360): Homolog of NCBI NO: 22331678 NR Description: similar to cytochrome P450-like protein; protein
  misc_feature (1)..(360): Homolog of NCBI NO: 22331672 NR Description: similar to cytochrome P450-like protein; protein At3g48270.1 [Arabidopsis thaliana]
  misc_feature (1)..(360): Homolog of NCBI NO: 22331680 NR Description: Expressed protein; protein id: At3g48310.1, by cDNA: gi_20465426 [Arabidopsis thaliana] Cytochrome P450 71A22 >gi|7430647|pir||T06711 probable cytochrome
  misc_feature (1)..(357): Homolog of NCBI NO: 22331674 NR Description: similar to cytochrome p450 family; protein id: [Arabidopsis thaliana] >gi|13878400|sp|Q9STK8|C71P_ARATH
  misc_feature (1)..(355): Homolog of NCBI NO: 22331676 NR Description: similar to cytochrome P450-like protein; protein At3g48290.1 [Arabidopsis thaliana]
  misc_feature (1)..(360): Homolog of NCBI NO: 22331682 NR Description: similar to cytochrome P450-like protein; protein At3g48320.1 [Arabidopsis thaliana]
  misc_feature (1)..(357): Homolog of NCBI NO: 15238664 NR Description: cytochrome P450-like protein; protein id: [Arabidopsis thaliana] >gi|13878366|sp|P58045|C71E_ARATH
  misc_feature (1)..(358): Homolog of NCBI NO: 13878406 NR Description: Cytochrome P450 71A20 >gi|7430641|pir||T06288
  misc_feature (1)..(358): Homolog of NCBI NO: 15224570 NR Description: cytochrome p450 family; protein id: At2g30770.1
MKSVSVLHLLSNKMVRSFQDVRQEEITLMMETIRKSSSKPVNLSKILSSLTNDVICRVALGRKYGVGTDFKELIDRLMRQLGTFTIGSYVPWLAWTDWVSGLEARLEKTANDFDKLLERIVQDHEDGDGDKTDFVDVLLAAQRDKSFGFDIDRLSIKAIVLDAFVGGTDTSSTLVEWEMTELLRHPTCLKKLQEEVRTICKGKSSVSEDDIQGMEYLKAVVKEALRLHPPVPLMVPHQSTQDVRLRDNHIPAGTQVIVNLWAVGREAATWGPDANEFRPERHLESPSDFRGQDFELIPFGAGRRMCPGISFAVVLNEVVLANLVHGFDWQSIDDETDVAESIGSVIRRMHPLYVIPSSTT

SEQ ID NO: 91097 - DNA, 1605 bp, Arabidopsis thaliana
  misc_feature (1)..(1605): Ceres Seq. ID no. 12726448
  misc_feature: MA Experiment ID: 20000235 Result: Down-regulated in Transcription
  misc_feature: MA Experiment 20000235 PARAMETER Experiment Name: At_Siliques_P Parameter: Age (day) Value: 21
  misc_feature: MA Experiment 20000235 PARAMETER Experiment Name: At_Siliques_P Parameter: Organism Value: A. thaliana
  misc_feature: MA Experiment 20000235 PARAMETER Experiment Name: At_Siliques_P Parameter: Plant Line Value: WS
  misc_feature: MA Experiment 20000235 PARAMETER Experiment Name: At_Siliques_P Parameter: Tissue Value: 5-10mm Siliques vs. Whole Plant
  misc_feature: MA Experiment ID: 20000437 Result: Down-regulated in Transcription
  misc_feature: MA Experiment 20000437 PARAMETER Experiment Name: At_Drought_P Parameter: Age (day) Value: 8
  misc_feature: MA Experiment 20000437 PARAMETER Experiment Name: At_Drought_P Parameter: Organism Value: A. thaliana
  misc_feature: MA Experiment 20000437 PARAMETER Experiment Name: At_Drought_P Parameter: Plant Line Value: WS
  misc_feature: MA Experiment 20000437 PARAMETER Experiment Name: At_Drought_P Parameter: Timepoint (hr) Value: 24
  misc_feature: MA Experiment 20000437 PARAMETER Experiment Name: At_Drought_P Parameter: Tissue Value: Whole Plant
  misc_feature: MA Experiment 20000437 PARAMETER Experiment Name: At_Drought_P Parameter: Treatment Value: Drought vs. No Drought
  misc_feature: MA Experiment ID: 20000495 Result: Down-regulated in Transcription
  misc_feature: MA Experiment 20000495 PARAMETER Experiment Name: At_Guard_Cells_P Parameter: Harvest Date Value: 8/2/2002
  misc_feature: MA Experiment 20000495 PARAMETER Experiment Name: At_Guard_Cells_P Parameter: Organism Value: A. thaliana
  misc_feature: MA Experiment 20000495 PARAMETER Experiment Name: At_Guard_Cells_P Parameter: Tissue Value: Guard Cells vs. Leaves
  misc_feature: MA Experiment ID: 20000574 Result: Up-regulated in Transcription
  misc_feature: MA Experiment 20000574 PARAMETER Experiment Name: At_100uM_ABA_Mutants__P Parameter: Organism Value: A. thaliana
  misc_feature: MA Experiment 20000574 PARAMETER Experiment Name: At_100uM_ABA_Mutants__P Parameter: Plant Line Value: CS23 vs. Ler wt
  misc_feature: MA Experiment 20000574 PARAMETER Experiment Name: At_100uM_ABA_Mutants__P Parameter: Timepoint (hr) Value: N/A
  misc_feature: MA Experiment 20000574 PARAMETER Experiment Name: At_100uM_ABA_Mutants__P Parameter: Tissue Value: Whole Plant
  misc_feature: MA Experiment 20000574 PARAMETER Experiment Name: At_100uM_ABA_Mutants__P Parameter: Treatment Value: None
  misc_feature: MA Experiment ID: 20001248 Result: Down-regulated in Transcription
  misc_feature: MA Experiment 20001248 PARAMETER Experiment Name: At_Far-red-induction_P Parameter: Age (day) Value: 7
  misc_feature: MA Experiment 20001248 PARAMETER Experiment Name: At_Far-red-induction_P Parameter: Light Value: Far-red vs. White
  misc_feature: MA Experiment 20001248 PARAMETER Experiment Name: At_Far-red-induction_P Parameter: Organism Value: A. thaliana
  misc_feature: MA Experiment 20001248 PARAMETER Experiment Name: At_Far-red-induction_P Parameter: Plant Line Value: Columbia
  misc_feature: MA Experiment 20001248 PARAMETER Experiment Name: At_Far-red-induction_P Parameter: Timepoint (hr) Value: 4
  misc_feature: MA Experiment 20001248 PARAMETER Experiment Name: At_Far-red-induction_P Parameter: Tissue Value: Whole Plant
  misc_feature: MA Experiment ID: 20001560 Result: Down-regulated in Transcription
  misc_feature: MA Experiment 20001560 PARAMETER Experiment Name: At_Drought_Soil_Dry_P Parameter: Age (day) Value: 28
  misc_feature: MA Experiment 20001560 PARAMETER Experiment Name: At_Drought_Soil_Dry_P Parameter: Organism Value: A. thaliana
  misc_feature: MA Experiment 20001560 PARAMETER Experiment Name: At_Drought_Soil_Dry_P Parameter: Plant Line Value: WS
  misc_feature: MA Experiment 20001560 PARAMETER Experiment Name: At_Drought_Soil_Dry_P Parameter: Post Timepoint (hr) Value: None
  misc_feature: MA Experiment 20001560 PARAMETER Experiment Name: At_Drought_Soil_Dry_P Parameter: Post-Treatment Value: None
  misc_feature: MA Experiment 20001560 PARAMETER Experiment Name: At_Drought_Soil_Dry_P Parameter: Timepoint (day) Value: 14
  misc_feature: MA Experiment 20001560 PARAMETER Experiment Name: At_Drought_Soil_Dry_P Parameter: Treatment Value: Drought vs. No Drought
atgactcagatcatctaagttcaaaaagaagaccacaaattcttagaaactctttactagaaaatcttgacgaaacttgaagaatacaagcatggaatcaatgatcaggataattctgctaagcttgataatcttcattaccatcctctttttcataaaacagaaaaaagggaagaaaagcaacacacctgcgtcaccaccgagacttccgttgataggaaaccttcatcaactcggtcgccaccctcaccgatcactatgctctctcagcaatcgttacggccctcttatgctccttcgttttggccttgtccccgttcttgtagtctcttccgcagatgtggctcgagatattttgaagacgtatgaccgcgtttttgcaagccggccacggtcaaaaatctttgagaaaatattttatgaggcccgtgatgtggccttagctccttatggagagtattggaggcaaatgaagagcgtgtgcgtcctccatctcctcaccaacaaaatggtcagatcctttcgaaacgtgagacaagaagagatcagtctgatgatggagaagatccagaaatcaagttctttgcaagtgaatctaagcgagctcttggggagtttaactaacgatgtgatatctagagttgctttgggacggaaatatagtgatgaaacggattttaaggagttaatgaaaaggctcacgaagctactgggcgagttttgtgtggggacttatgtaccatggcttgcatggattgattggatcagcggtttggatggacaactaaaaaagacaggtaatgatcttgatgaattcttggagaaagttgtccaagatcatgaagatggcgacgcacaaaggactgactttgtggatgtattgctcagaatccagagggagaagagcgtcgggtttgaaatcgaccggttaagcataaaggcaatcatcttggatgttgttgtgggtggtacggatacatcgtacgcacttatggagtgggcaatgacagagcttcttcatcgcccagagtgtctgaacagactccaagaagaagtccgtacgatttgtaagggaaattcgagtgtatcagaagatgacatcaaagacatgaactacttaaaagctgtgatcaaagagactatgaggctacatcctccacttccattgatggttcctcacgaatcaacacaagatgtcagattaggagattaccacatacctgcgggtacacaggtaatgatcaatgcttgggcgatcgggagagaggctgcgacgtggggaccagacgcggagaagtttagaccggagagacatttaaattcgtctgtcgatttccgaggtcacaattttgagcttattccatttggagcagggagaaggatttgtccagcaatatcattcgctgtgatcttgattgaggtgactttggctaacttagtgcatcggtatgattggagattaccggaggaatatatagaagatcaaaccaatgtcgctgaatcaaccggtatggtgattcaccgtttattccctctttacgccattgtatcatctactacttgatggatgcattatacataaatgcttactattatgttatgtct

SEQ ID NO: 91098 - protein, 490 aa, Arabidopsis thaliana
  peptide (1)..(490): Ceres Seq. ID no. 12726449
  misc_feature (33)..(460): Pfam Name: Cytochrome P450 Pfam Description: Cytochrome P450
  misc_feature (1)..(490): Homolog of NCBI NO: 22331680 NR Description: Expressed protein; protein id: At3g48310.1, by cDNA: gi_20465426 [Arabidopsis thaliana] Cytochrome P450 71A22 >gi|7430647|pir||T06711 probable cytochrome
  misc_feature (1)..(490): Homolog of NCBI NO: 22331682 NR Description: similar to cytochrome P450-like protein; protein At3g48320.1 [Arabidopsis thaliana]
  misc_feature (4)..(487): Homolog of NCBI NO: 22331676 NR Description: similar to cytochrome P450-like protein; protein At3g48290.1 [Arabidopsis thaliana]
  misc_feature (4)..(490): Homolog of NCBI NO: 22331672 NR Description: similar to cytochrome P450-like protein; protein At3g48270.1 [Arabidopsis thaliana]
  misc_feature (4)..(287): Homolog of NCBI NO: 7430651 NR Description: probable cytochrome P450 T29H11.190 - Arabidopsis
  misc_feature (288)..(487): Homolog of NCBI NO: 7430651 NR Description: probable cytochrome P450 T29H11.190 - Arabidopsis
  misc_feature (4)..(487): Homolog of NCBI NO: 22331674 NR Description: similar to cytochrome p450 family; protein id: [Arabidopsis thaliana] >gi|13878400|sp|Q9STK8|C71P_ARATH
  misc_feature (4)..(490): Homolog of NCBI NO: 13878402 NR Description: Cytochrome P450 71A23 >gi|7430648|pir||T06712
  misc_feature (67)..(490): Homolog of NCBI NO: 22331678 NR Description: similar to cytochrome P450-like protein; protein
  misc_feature (1)..(487): Homolog of NCBI NO: 15238664 NR Description: cytochrome P450-like protein; protein id: [Arabidopsis thaliana] >gi|13878366|sp|P58045|C71E_ARATH
MESMIRIILLSLIIFITILFFIKQKKGKKSNTPASPPRLPLIGNLHQLGRHPHRSLCSLSNRYGPLMLLRFGLVPVLVVSSADVARDILKTYDRVFASRPRSKIFEKIFYEARDVALAPYGEYWRQMKSVCVLHLLTNKMVRSFRNVRQEEISLMMEKIQKSSSLQVNLSELLGSLTNDVISRVALGRKYSDETDFKELMKRLTKLLGEFCVGTYVPWLAWIDWISGLDGQLKKTGNDLDEFLEKVVQDHEDGDAQRTDFVDVLLRIQREKSVGFEIDRLSIKAIILDVVVGGTDTSYALMEWAMTELLHRPECLNRLQEEVRTICKGNSSVSEDDIKDMNYLKAVIKETMRLHPPLPLMVPHESTQDVRLGDYHIPAGTQVMINAWAIGREAATWGPDAEKFRPERHLNSSVDFRGHNFELIPFGAGRRICPAISFAVILIEVTLANLVHRYDWRLPEEYIEDQTNVAESTGMVIHRLFPLYAIVSSTT

SEQ ID NO: 91099 - protein, 487 aa, Arabidopsis thaliana
  peptide (1)..(487): Ceres Seq. ID no. 12726450
  misc_feature (30)..(457): Pfam Name: Cytochrome P450 Pfam Description: Cytochrome P450
  misc_feature (1)..(487): Homolog of NCBI NO: 22331680 NR Description: Expressed protein; protein id: At3g48310.1, by cDNA: gi_20465426 [Arabidopsis thaliana] Cytochrome P450 71A22 >gi|7430647|pir||T06711 probable cytochrome
  misc_feature (1)..(487): Homolog of NCBI NO: 22331682 NR Description: similar to cytochrome P450-like protein; protein At3g48320.1 [Arabidopsis thaliana]
  misc_feature (1)..(484): Homolog of NCBI NO: 22331676 NR Description: similar to cytochrome P450-like protein; protein At3g48290.1 [Arabidopsis thaliana]
  misc_feature (1)..(487): Homolog of NCBI NO: 22331672 NR Description: similar to cytochrome P450-like protein; protein At3g48270.1 [Arabidopsis thaliana]
  misc_feature (1)..(284): Homolog of NCBI NO: 7430651 NR Description: probable cytochrome P450 T29H11.190 - Arabidopsis
  misc_feature (285)..(484): Homolog of NCBI NO: 7430651 NR Description: probable cytochrome P450 T29H11.190 - Arabidopsis
  misc_feature (1)..(484): Homolog of NCBI NO: 22331674 NR Description: similar to cytochrome p450 family; protein id: [Arabidopsis thaliana] >gi|13878400|sp|Q9STK8|C71P_ARATH
  misc_feature (1)..(487): Homolog of NCBI NO: 13878402 NR Description: Cytochrome P450 71A23 >gi|7430648|pir||T06712
  misc_feature (64)..(487): Homolog of NCBI NO: 22331678 NR Description: similar to cytochrome P450-like protein; protein
  misc_feature (1)..(484): Homolog of NCBI NO: 15238664 NR Description: cytochrome P450-like protein; protein id: [Arabidopsis thaliana] >gi|13878366|sp|P58045|C71E_ARATH
MIRIILLSLIIFITILFFIKQKKGKKSNTPASPPRLPLIGNLHQLGRHPHRSLCSLSNRYGPLMLLRFGLVPVLVVSSADVARDILKTYDRVFASRPRSKIFEKIFYEARDVALAPYGEYWRQMKSVCVLHLLTNKMVRSFRNVRQEEISLMMEKIQKSSSLQVNLSELLGSLTNDVISRVALGRKYSDETDFKELMKRLTKLLGEFCVGTYVPWLAWIDWISGLDGQLKKTGNDLDEFLEKVVQDHEDGDAQRTDFVDVLLRIQREKSVGFEIDRLSIKAIILDVVVGGTDTSYALMEWAMTELLHRPECLNRLQEEVRTICKGNSSVSEDDIKDMNYLKAVIKETMRLHPPLPLMVPHESTQDVRLGDYHIPAGTQVMINAWAIGREAATWGPDAEKFRPERHLNSSVDFRGHNFELIPFGAGRRICPAISFAVILIEVTLANLVHRYDWRLPEEYIEDQTNVAESTGMVIHRLFPLYAIVSSTT

SEQ ID NO: 91100 - protein, 424 aa, Arabidopsis thaliana
  peptide (1)..(424): Ceres Seq. ID no. 12726451
  misc_feature (1)..(394): Pfam Name: Cytochrome P450 Pfam Description: Cytochrome P450
  misc_feature (1)..(424): Homolog of NCBI NO: 22331680 NR Description: Expressed protein; protein id: At3g48310.1, by cDNA: gi_20465426 [Arabidopsis thaliana] Cytochrome P450 71A22 >gi|7430647|pir||T06711 probable cytochrome
  misc_feature (1)..(424): Homolog of NCBI NO: 22331682 NR Description: similar to cytochrome P450-like protein; protein At3g48320.1 [Arabidopsis thaliana]
  misc_feature (1)..(421): Homolog of NCBI NO: 22331676 NR Description: similar to cytochrome P450-like protein; protein At3g48290.1 [Arabidopsis thaliana]
  misc_feature (1)..(424): Homolog of NCBI NO: 22331672 NR Description: similar to cytochrome P450-like protein; protein At3g48270.1 [Arabidopsis thaliana]
  misc_feature (1)..(221): Homolog of NCBI NO: 7430651 NR Description: probable cytochrome P450 T29H11.190 - Arabidopsis
  misc_feature (222)..(421): Homolog of NCBI NO: 7430651 NR Description: probable cytochrome P450 T29H11.190 - Arabidopsis
  misc_feature (1)..(421): Homolog of NCBI NO: 22331674 NR Description: similar to cytochrome p450 family; protein id: [Arabidopsis thaliana] >gi|13878400|sp|Q9STK8|C71P_ARATH
  misc_feature (1)..(424): Homolog of NCBI NO: 13878402 NR Description: Cytochrome P450 71A23 >gi|7430648|pir||T06712
  misc_feature (1)..(424): Homolog of NCBI NO: 22331678 NR Description: similar to cytochrome P450-like protein; protein
  misc_feature (1)..(421): Homolog of NCBI NO: 15238664 NR Description: cytochrome P450-like protein; protein id: [Arabidopsis thaliana] >gi|13878366|sp|P58045|C71E_ARATH
MLLRFGLVPVLVVSSADVARDILKTYDRVFASRPRSKIFEKIFYEARDVALAPYGEYWRQMKSVCVLHLLTNKMVRSFRNVRQEEISLMMEKIQKSSSLQVNLSELLGSLTNDVISRVALGRKYSDETDFKELMKRLTKLLGEFCVGTYVPWLAWIDWISGLDGQLKKTGNDLDEFLEKVVQDHEDGDAQRTDFVDVLLRIQREKSVGFEIDRLSIKAIILDVVVGGTDTSYALMEWAMTELLHRPECLNRLQEEVRTICKGNSSVSEDDIKDMNYLKAVIKETMRLHPPLPLMVPHESTQDVRLGDYHIPAGTQVMINAWAIGREAATWGPDAEKFRPERHLNSSVDFRGHNFELIPFGAGRRICPAISFAVILIEVTLANLVHRYDWRLPEEYIEDQTNVAESTGMVIHRLFPLYAIVSSTT

SEQ ID NO: 91101 - DNA, 693 bp, Arabidopsis thaliana
  misc_feature (1)..(693): Ceres Seq. ID no. 12726452
  misc_feature: MA Experiment ID: 20000179 Result: Up-regulated in Transcription
  misc_feature: MA Experiment 20000179 PARAMETER Experiment Name: At_Germinating_Seeds_P Parameter: Age (hr) Value: 6 vs. 0
  misc_feature: MA Experiment 20000179 PARAMETER Experiment Name: At_Germinating_Seeds_P Parameter: Tissue Value: Germinating Seeds
  misc_feature: MA Experiment ID: 20000495 Result: Up-regulated in Transcription
  misc_feature: MA Experiment 20000495 PARAMETER Experiment Name: At_Guard_Cells_P Parameter: Harvest Date Value: 8/2/2002
  misc_feature: MA Experiment 20000495 PARAMETER Experiment Name: At_Guard_Cells_P Parameter: Organism Value: A. thaliana
  misc_feature: MA Experiment 20000495 PARAMETER Experiment Name: At_Guard_Cells_P Parameter: Tissue Value: Guard Cells vs. Leaves
  misc_feature: MA Experiment ID: 20000794 Result: Up-regulated in Transcription
  misc_feature: MA Experiment 20000794 PARAMETER Experiment Name: At_Petals_P Parameter: Age (day) Value: 23-25 days
  misc_feature: MA Experiment 20000794 PARAMETER Experiment Name: At_Petals_P Parameter: Plant Line Value: WS
  misc_feature: MA Experiment 20000794 PARAMETER Experiment Name: At_Petals_P Parameter: Tissue Value: Petals vs. Whole plant
atgaagcaattctggagtccaagtagtatcaacaagaacaaagctatggttgagaatctgcaaaatcatggtatagttacttcagatgaagttgctaaagctatggaggctgtggatagaggcgtatttgtaacagatcgttcctctgcttatgttgatagtcccatgtctattggttataatgtgactatatcagctcctcatatgcatgcaatgtgtcttcaacttcttgaaaaacatttgaaaccgggaatgcgtgtacttgatgttggctcggggaccgggtacttaactgcttgctttgcggttatggttggaaccgaagggcgtgctattggtgtggaacatattcctgaattggtggcttcttctgttaagaatattgaagcgagtgctgcttcgccatttctgaaagaaaggtctcttgctgttcatgttggtgatgggaggcaaggatgggctgagtttgctccgtatgatgctattcacgtcggagcagcagcaccggagatcccagaggcgttgattgatcagttgaagcccggtgggagactggtgattccggttgggaacatattccaagatctgcaagtggtggataagaactcagatggttctgttagcatcaaggatgaaacttcagttcgttatgttcctttgactagccgtgaagcccagctgagaggggactga

SEQ ID NO: 91102 - protein, 230 aa, Arabidopsis thaliana
  peptide (1)..(230): Ceres Seq. ID no. 12726453
  misc_feature (11)..(225): Pfam Name: Protein-L-isoaspartate(D-aspartate) Pfam Description: Protein-L-isoaspartate(D-aspartate)
  misc_feature (1)..(230): Homolog of NCBI NO: 22331684 NR Description: similar to protein-L-isoaspartate(D-aspartate);
  misc_feature (1)..(230): Homolog of NCBI NO: 1322021 NR Description: L-isoaspartyl methyltransferase
  misc_feature (1)..(228): Homolog of NCBI NO: 38345249 NR Description: OSJNBb0011N17.10 [Oryza sativa (japonica
  misc_feature (14)..(229): Homolog of NCBI NO: 26451260 NR Description: unknown protein [Arabidopsis thaliana]
  misc_feature (1)..(228): Homolog of NCBI NO: 2499570 NR Description: PROTEIN-L-ISOASPARTATE O-METHYLTRANSFERASE
  misc_feature (5)..(230): Homolog of NCBI NO: 37589722 NR Description: Unknown (protein for MGC:73268) [Danio rerio]
  misc_feature (5)..(230): Homolog of NCBI NO: 29436595 NR Description: protein-L-isoaspartate (D-aspartate)
  misc_feature (5)..(226): Homolog of NCBI NO: 417489 NR Description: PROTEIN-L-ISOASPARTATE(D-ASPARTATE)
  misc_feature (5)..(230): Homolog of NCBI NO: 88512 NR Description: protein-L-isoaspartate(D-aspartate)
  misc_feature (16)..(230): Homolog of NCBI NO: 18859221 NR Description: l-isoaspartyl protein carboxyl methyltransferase
MKQFWSPSSINKNKAMVENLQNHGIVTSDEVAKAMEAVDRGVFVTDRSSAYVDSPMSIGYNVTISAPHMHAMCLQLLEKHLKPGMRVLDVGSGTGYLTACFAVMVGTEGRAIGVEHIPELVASSVKNIEASAASPFLKERSLAVHVGDGRQGWAEFAPYDAIHVGAAAPEIPEALIDQLKPGGRLVIPVGNIFQDLQVVDKNSDGSVSIKDETSVRYVPLTSREAQLRGD

SEQ ID NO: 91103 - protein, 215 aa, Arabidopsis thaliana
  peptide (1)..(215): Ceres Seq. ID no. 12726454
  misc_feature (1)..(210): Pfam Name: Protein-L-isoaspartate(D-aspartate) Pfam Description: Protein-L-isoaspartate(D-aspartate)
  misc_feature (1)..(215): Homolog of NCBI NO: 22331684 NR Description: similar to protein-L-isoaspartate(D-aspartate);
  misc_feature (1)..(215): Homolog of NCBI NO: 1322021 NR Description: L-isoaspartyl methyltransferase
  misc_feature (1)..(213): Homolog of NCBI NO: 38345249 NR Description: OSJNBb0011N17.10 [Oryza sativa (japonica
  misc_feature (1)..(214): Homolog of NCBI NO: 26451260 NR Description: unknown protein [Arabidopsis thaliana]
  misc_feature (1)..(213): Homolog of NCBI NO: 2499570 NR Description: PROTEIN-L-ISOASPARTATE O-METHYLTRANSFERASE
  misc_feature (1)..(215): Homolog of NCBI NO: 37589722 NR Description: Unknown (protein for MGC:73268) [Danio rerio]
  misc_feature (1)..(215): Homolog of NCBI NO: 29436595 NR Description: protein-L-isoaspartate (D-aspartate)
  misc_feature (1)..(211): Homolog of NCBI NO: 417489 NR Description: PROTEIN-L-ISOASPARTATE(D-ASPARTATE)
  misc_feature (1)..(215): Homolog of NCBI NO: 88512 NR Description: protein-L-isoaspartate(D-aspartate)
  misc_feature (1)..(215): Homolog of NCBI NO: 18859221 NR Description: l-isoaspartyl protein carboxyl methyltransferase
MVENLQNHGIVTSDEVAKAMEAVDRGVFVTDRSSAYVDSPMSIGYNVTISAPHMHAMCLQLLEKHLKPGMRVLDVGSGTGYLTACFAVMVGTEGRAIGVEHIPELVASSVKNIEASAASPFLKERSLAVHVGDGRQGWAEFAPYDAIHVGAAAPEIPEALIDQLKPGGRLVIPVGNIFQDLQVVDKNSDGSVSIKDETSVRYVPLTSREAQLRGD

SEQ ID NO: 91104 - protein, 196 aa, Arabidopsis thaliana
  peptide (1)..(196): Ceres Seq. ID no. 12726455
  misc_feature (1)..(191): Pfam Name: Protein-L-isoaspartate(D-aspartate) Pfam Description: Protein-L-isoaspartate(D-aspartate)
  misc_feature (1)..(196): Homolog of NCBI NO: 22331684 NR Description: similar to protein-L-isoaspartate(D-aspartate);
  misc_feature (1)..(196): Homolog of NCBI NO: 1322021 NR Description: L-isoaspartyl methyltransferase
  misc_feature (1)..(194): Homolog of NCBI NO: 38345249 NR Description: OSJNBb0011N17.10 [Oryza sativa (japonica
  misc_feature (1)..(195): Homolog of NCBI NO: 26451260 NR Description: unknown protein [Arabidopsis thaliana]
  misc_feature (1)..(194): Homolog of NCBI NO: 2499570 NR Description: PROTEIN-L-ISOASPARTATE O-METHYLTRANSFERASE
  misc_feature (1)..(196): Homolog of NCBI NO: 37589722 NR Description: Unknown (protein for MGC:73268) [Danio rerio]
  misc_feature (1)..(196): Homolog of NCBI NO: 29436595 NR Description: protein-L-isoaspartate (D-aspartate)
  misc_feature (1)..(192): Homolog of NCBI NO: 417489 NR Description: PROTEIN-L-ISOASPARTATE(D-ASPARTATE)
  misc_feature (1)..(196): Homolog of NCBI NO: 88512 NR Description: protein-L-isoaspartate(D-aspartate)
  misc_feature (1)..(196): Homolog of NCBI NO: 18859221 NR Description: l-isoaspartyl protein carboxyl methyltransferase
MEAVDRGVFVTDRSSAYVDSPMSIGYNVTISAPHMHAMCLQLLEKHLKPGMRVLDVGSGTGYLTACFAVMVGTEGRAIGVEHIPELVASSVKNIEASAASPFLKERSLAVHVGDGRQGWAEFAPYDAIHVGAAAPEIPEALIDQLKPGGRLVIPVGNIFQDLQVVDKNSDGSVSIKDETSVRYVPLTSREAQLRGD

SEQ ID NO: 91105 - DNA, 1056 bp, Arabidopsis thaliana
  misc_feature (1)..(1056): Ceres Seq. ID no. 12726456
  misc_feature: MA Experiment ID: 20000180 Result: Up-regulated in Transcription
  misc_feature: MA Experiment 20000180 PARAMETER Experiment Name: At_Germinating_Seeds_P Parameter: Age (hr) Value: 24 vs. 0
  misc_feature: MA Experiment 20000180 PARAMETER Experiment Name: At_Germinating_Seeds_P Parameter: Tissue Value: Germinating Seeds
  misc_feature: MA Experiment ID: 20000184 Result: Down-regulated in Transcription
  misc_feature: MA Experiment 20000184 PARAMETER Experiment Name: At_Shoots__P Parameter: Age (day) Value: 7
  misc_feature: MA Experiment 20000184 PARAMETER Experiment Name: At_Shoots__P Parameter: Tissue Value: Shoots vs. Whole Plant
  misc_feature: MA Experiment ID: 20000185 Result: Up-regulated in Transcription
  misc_feature: MA Experiment 20000185 PARAMETER Experiment Name: At_Roots__P Parameter: Age (day) Value: 7 vs. 21
  misc_feature: MA Experiment 20000185 PARAMETER Experiment Name: At_Roots__P Parameter: Organism Value: A. thaliana
  misc_feature: MA Experiment 20000185 PARAMETER Experiment Name: At_Roots__P Parameter: Tissue Value: Roots vs. Whole Plant
  misc_feature: MA Experiment ID: 20000227 Result: Up-regulated in Transcription
  misc_feature: MA Experiment 20000227 PARAMETER Experiment Name: At_Root-Tips-vs-Tops_P Parameter: Tissue Value: Root Tips vs. Root Tops
  misc_feature: MA Experiment ID: 20000264 Result: Up-regulated in Transcription
  misc_feature: MA Experiment 20000264 PARAMETER Experiment Name: At_Open_Flower_P Parameter: Age (day) Value: 21
  misc_feature: MA Experiment 20000264 PARAMETER Experiment Name: At_Open_Flower_P Parameter: Plant Line Value: WS
  misc_feature: MA Experiment 20000264 PARAMETER Experiment Name: At_Open_Flower_P Parameter: Tissue Value: Open Flower vs. Whole Plant
  misc_feature: MA Experiment ID: 20000265 Result: Down-regulated in Transcription
  misc_feature: MA Experiment 20000265 PARAMETER Experiment Name: At_Open_Flower_P Parameter: Age (day) Value: 21
  misc_feature: MA Experiment 20000265 PARAMETER Experiment Name: At_Open_Flower_P Parameter: Plant Line Value: WS
  misc_feature: MA Experiment 20000265 PARAMETER Experiment Name: At_Open_Flower_P Parameter: Tissue Value: Closed Flower vs. Whole Plant
  misc_feature: MA Experiment ID: 20000286 Result: Up-regulated in Transcription
  misc_feature: MA Experiment 20000286 PARAMETER Experiment Name: At_Open_Flower_P Parameter: Age (day) Value: 21
  misc_feature: MA Experiment 20000286 PARAMETER Experiment Name: At_Open_Flower_P Parameter: Plant Line Value: WS
  misc_feature: MA Experiment 20000286 PARAMETER Experiment Name: At_Open_Flower_P Parameter: Tissue Value: Half Open vs. Whole Plant
  misc_feature: MA Experiment ID: 20000438 Result: Down-regulated in Transcription
  misc_feature: MA Experiment 20000438 PARAMETER Experiment Name: At_Shoots__P Parameter: Age (day) Value: 14
  misc_feature: MA Experiment 20000438 PARAMETER Experiment Name: At_Shoots__P Parameter: Tissue Value: Shoots vs. Whole Plant
  misc_feature: MA Experiment ID: 20000439 Result: Up-regulated in Transcription
  misc_feature: MA Experiment 20000439 PARAMETER Experiment Name: At_Roots__P Parameter: Age (day) Value: 14 vs. 21
  misc_feature: MA Experiment 20000439 PARAMETER Experiment Name: At_Roots__P Parameter: Organism Value: A. thaliana
  misc_feature: MA Experiment 20000439 PARAMETER Experiment Name: At_Roots__P Parameter: Tissue Value: Roots vs. Whole Plant
  misc_feature: MA Experiment ID: 20000527 Result: Down-regulated in Transcription
  misc_feature: MA Experiment 20000527 PARAMETER Experiment Name: At_10percent_PEG_P Parameter: Age (day) Value: 20
  misc_feature: MA Experiment 20000527 PARAMETER Experiment Name: At_10percent_PEG_P Parameter: Organism Value: A. thaliana
  misc_feature: MA Experiment 20000527 PARAMETER Experiment Name: At_10percent_PEG_P Parameter: Plant Line Value: WS
  misc_feature: MA Experiment 20000527 PARAMETER Experiment Name: At_10percent_PEG_P Parameter: Timepoint (day) Value: 20
  misc_feature: MA Experiment 20000527 PARAMETER Experiment Name: At_10percent_PEG_P Parameter: Tissue Value: Whole Plant
  misc_feature: MA Experiment 20000527 PARAMETER Experiment Name: At_10percent_PEG_P Parameter: Treatment Value: 10percent PEG vs. No Treatment
  misc_feature: MA Experiment ID: 20000794 Result: Up-regulated in Transcription
  misc_feature: MA Experiment 20000794 PARAMETER Experiment Name: At_Petals_P Parameter: Age (day) Value: 23-25 days
  misc_feature: MA Experiment 20000794 PARAMETER Experiment Name: At_Petals_P Parameter: Plant Line Value: WS
  misc_feature: MA Experiment 20000794 PARAMETER Experiment Name: At_Petals_P Parameter: Tissue Value: Petals vs. Whole plant
  misc_feature: MA Experiment ID: 20001451 Result: Up-regulated in Transcription
  misc_feature: MA Experiment 20001451 PARAMETER Experiment Name: At_Far-red-induction_P Parameter: Age (day) Value: 7
  misc_feature: MA Experiment 20001451 PARAMETER Experiment Name: At_Far-red-induction_P Parameter: Light Value: Far-red vs. White
  misc_feature: MA Experiment 20001451 PARAMETER Experiment Name: At_Far-red-induction_P Parameter: Organism Value: A. thaliana
  misc_feature: MA Experiment 20001451 PARAMETER Experiment Name: At_Far-red-induction_P Parameter: Plant Line Value: Columbia
  misc_feature: MA Experiment 20001451 PARAMETER Experiment Name: At_Far-red-induction_P Parameter: Timepoint (hr) Value: 24
  misc_feature: MA Experiment 20001451 PARAMETER Experiment Name: At_Far-red-induction_P Parameter: Tissue Value: Whole Plant
  misc_feature: MA Experiment ID: 20001554 Result: Up-regulated in Transcription
  misc_feature: MA Experiment 20001554 PARAMETER Experiment Name: At_Drought_Soil_Dry_P Parameter: Age (day) Value: 21
  misc_feature: MA Experiment 20001554 PARAMETER Experiment Name: At_Drought_Soil_Dry_P Parameter: Organism Value: A. thaliana
  misc_feature: MA Experiment 20001554 PARAMETER Experiment Name: At_Drought_Soil_Dry_P Parameter: Plant Line Value: WS
  misc_feature: MA Experiment 20001554 PARAMETER Experiment Name: At_Drought_Soil_Dry_P Parameter: Post Timepoint (hr) Value: None
  misc_feature: MA Experiment 20001554 PARAMETER Experiment Name: At_Drought_Soil_Dry_P Parameter: Post-Treatment Value: None
  misc_feature: MA Experiment 20001554 PARAMETER Experiment Name: At_Drought_Soil_Dry_P Parameter: Timepoint (day) Value: 7
  misc_feature: MA Experiment 20001554 PARAMETER Experiment Name: At_Drought_Soil_Dry_P Parameter: Treatment Value: Drought vs. No Drought
  misc_feature: MA Experiment ID: 20001556 Result: Up-regulated in Transcription
  misc_feature: MA Experiment 20001556 PARAMETER Experiment Name: At_Drought_Soil_Dry_P Parameter: Age (day) Value: 26
  misc_feature: MA Experiment 20001556 PARAMETER Experiment Name: At_Drought_Soil_Dry_P Parameter: Organism Value: A. thaliana
  misc_feature: MA Experiment 20001556 PARAMETER Experiment Name: At_Drought_Soil_Dry_P Parameter: Plant Line Value: WS
  misc_feature: MA Experiment 20001556 PARAMETER Experiment Name: At_Drought_Soil_Dry_P Parameter: Post Timepoint (hr) Value: None
  misc_feature: MA Experiment 20001556 PARAMETER Experiment Name: At_Drought_Soil_Dry_P Parameter: Post-Treatment Value: None
  misc_feature: MA Experiment 20001556 PARAMETER Experiment Name: At_Drought_Soil_Dry_P Parameter: Timepoint (day) Value: 12
  misc_feature: MA Experiment 20001556 PARAMETER Experiment Name: At_Drought_Soil_Dry_P Parameter: Treatment Value: Drought vs. No Drought
  misc_feature: MA Experiment ID: 20001558 Result: Up-regulated in Transcription
  misc_feature: MA Experiment 20001558 PARAMETER Experiment Name: At_Drought_Soil_Dry_P Parameter: Age (day) Value: 27
  misc_feature: MA Experiment 20001558 PARAMETER Experiment Name: At_Drought_Soil_Dry_P Parameter: Organism Value: A. thaliana
  misc_feature: MA Experiment 20001558 PARAMETER Experiment Name: At_Drought_Soil_Dry_P Parameter: Plant Line Value: WS
  misc_feature: MA Experiment 20001558 PARAMETER Experiment Name: At_Drought_Soil_Dry_P Parameter: Post Timepoint (hr) Value: 6
  misc_feature: MA Experiment 20001558 PARAMETER Experiment Name: At_Drought_Soil_Dry_P Parameter: Post-Treatment Value: Re-Water vs. No Drought
  misc_feature: MA Experiment 20001558 PARAMETER Experiment Name: At_Drought_Soil_Dry_P Parameter: Timepoint (day) Value: 13
  misc_feature: MA Experiment 20001558 PARAMETER Experiment Name: At_Drought_Soil_Dry_P Parameter: Treatment Value: Drought vs. No Drought
  misc_feature: MA Experiment ID: 20001904 Result: Up-regulated in Transcription
  misc_feature: MA Experiment 20001904 PARAMETER Experiment Name: At_Drought_Reproduction_P Parameter: Age (day) Value: 37
  misc_feature: MA Experiment 20001904 PARAMETER Experiment Name: At_Drought_Reproduction_P Parameter: Organism Value: A. thaliana
  misc_feature: MA Experiment 20001904 PARAMETER Experiment Name: At_Drought_Reproduction_P Parameter: Plant Line Value: WS
  misc_feature: MA Experiment 20001904 PARAMETER Experiment Name: At_Drought_Reproduction_P Parameter: Timepoint (day) Value: 7
  misc_feature: MA Experiment 20001904 PARAMETER Experiment Name: At_Drought_Reproduction_P Parameter: Tissue Value: Rosettes
  misc_feature: MA Experiment 20001904 PARAMETER Experiment Name: At_Drought_Reproduction_P Parameter: Treatment Value: Drought vs. No Drought
  misc_feature: MA Experiment ID: 20001905 Result: Up-regulated in Transcription
  misc_feature: MA Experiment 20001905 PARAMETER Experiment Name: At_Drought_Reproduction_P Parameter: Age (day) Value: 40
  misc_feature: MA Experiment 20001905 PARAMETER Experiment Name: At_Drought_Reproduction_P Parameter: Organism Value: A. thaliana
  misc_feature: MA Experiment 20001905 PARAMETER Experiment Name: At_Drought_Reproduction_P Parameter: Plant Line Value: WS
  misc_feature: MA Experiment 20001905 PARAMETER Experiment Name: At_Drought_Reproduction_P Parameter: Timepoint (day) Value: 10
  misc_feature: MA Experiment 20001905 PARAMETER Experiment Name: At_Drought_Reproduction_P Parameter: Tissue Value: Rosettes
  misc_feature: MA Experiment 20001905 PARAMETER Experiment Name: At_Drought_Reproduction_P Parameter: Treatment Value: Drought vs. No Drought
  misc_feature: MA Experiment ID: 20001906 Result: Up-regulated in Transcription
  misc_feature: MA Experiment 20001906 PARAMETER Experiment Name: At_Drought_Reproduction_P Parameter: Age (day) Value: 35
  misc_feature: MA Experiment 20001906 PARAMETER Experiment Name: At_Drought_Reproduction_P Parameter: Organism Value: A. thaliana
  misc_feature: MA Experiment 20001906 PARAMETER Experiment Name: At_Drought_Reproduction_P Parameter: Plant Line Value: WS
  misc_feature: MA Experiment 20001906 PARAMETER Experiment Name: At_Drought_Reproduction_P Parameter: Timepoint (day) Value: 5
  misc_feature: MA Experiment 20001906 PARAMETER Experiment Name: At_Drought_Reproduction_P Parameter: Tissue Value: Siliques
  misc_feature: MA Experiment 20001906 PARAMETER Experiment Name: At_Drought_Reproduction_P Parameter: Treatment Value: Drought vs. No Drought
atgaagaaacttcttttgatatttctcttttctcttgtcattctccaaactgcttgtggattcgattacgacgacaaggaaatagaaagcgaagagggcttatcaacgctttatgatagatggaggagccaccactccgttcctaggagtctaaatgaaagggagaagagattcaacgttttcagacacaatgtcatgcatgtccacaataccaacaagaagaaccgatcctacaaacttaagctcaacaagtttgcagatttaacaattaatgagttcaagaatgcatacaccggttccaacatcaagcatcacagaatgttgcaaggaccaaaacgcggctcaaaacagttcatgtatgatcatgagaatttatccaaattaccgtcctccgttgattggagaaagaaaggtgctgtcactgaaatcaagaatcaaggaaaatgtgctgttgagggaatcaacaagatcaagactaacaaactggtctcactgtctgaacaagaactagtggattgtgatactaagcagaatgaaggttgtaacggaggtcttatggagattgcatttgaattcatcaagaagaacggtggtatcaccactgaagatagctatccttatgaaggtatcgatggaaaatgcgacgcttcaaaggataacggcgtgcttgtgacgatagatgggcatgaagatgtacccgaaaacgacgaaaatgctcttcttaaggctgttgcaaaccaacctgtatctgttgcaattgatgctggaagttcagatttccagttttattcagagggagtgtttacgggatcttgtggaacagagctgaaccatggtgtggcagcggtcgggtatggatctgagagggggaaaaagtattggatagtgagaaactcatggggagctgaatggggagagggaggctatataaagattgaaagagagattgatgaaccggaagggcgttgcggtattgcgatggaggcatcgtatccgatcaagctatcgtcgtctaatcctaccccgaaagacggtgatgtcaaagatgagctctag

SEQ ID NO: 91106 - protein, 351 aa, Arabidopsis thaliana
  peptide (1)..(351): Ceres Seq. ID no. 12726457
  misc_feature (128)..(333): Pfam Name: Papain family cysteine protease Pfam Description: Papain family cysteine protease
  misc_feature (1)..(351): Homolog of NCBI NO: 22331686 NR Description: similar to cysteine proteinase; protein id:
  misc_feature (1)..(351): Homolog of NCBI NO: 7435811 NR Description: cysteine proteinase (EC 3.4.22.-) T29H11.140 -
  misc_feature (1)..(351): Homolog of NCBI NO: 7435817 NR Description: cysteine endopeptidase (EC 3.4.22.-) precursor - bean >gi|2944446|gb|AAC62396.1| cysteine endopeptidase precursor
  misc_feature (3)..(351): Homolog of NCBI NO: 18408616 NR Description: Expressed protein; protein id: At3g48350.1, by cDNA: 151603. [Arabidopsis thaliana] >gi|7435810|pir||T06707
MKKLLLIFLFSLVILQTACGFDYDDKEIESEEGLSTLYDRWRSHHSVPRSLNEREKRFNVFRHNVMHVHNTNKKNRSYKLKLNKFADLTINEFKNAYTGSNIKHHRMLQGPKRGSKQFMYDHENLSKLPSSVDWRKKGAVTEIKNQGKCAVEGINKIKTNKLVSLSEQELVDCDTKQNEGCNGGLMEIAFEFIKKNGGITTEDSYPYEGIDGKCDASKDNGVLVTIDGHEDVPENDENALLKAVANQPVSVAIDAGSSDFQFYSEGVFTGSCGTELNHGVAAVGYGSERGKKYWIVRNSWGAEWGEGGYIKIEREIDEPEGRCGIAMEASYPIKLSSSNPTPKDGDVKDEL

SEQ ID NO: 91107 - protein, 286 aa, Arabidopsis thaliana
  peptide (1)..(286): Ceres Seq. ID no. 12726458
  misc_feature (63)..(268): Pfam Name: Papain family cysteine protease Pfam Description: Papain family cysteine protease
  misc_feature (1)..(286): Homolog of NCBI NO: 22331686 NR Description: similar to cysteine proteinase; protein id:
  misc_feature (1)..(286): Homolog of NCBI NO: 7435811 NR Description: cysteine proteinase (EC 3.4.22.-) T29H11.140 -
  misc_feature (1)..(286): Homolog of NCBI NO: 7435817 NR Description: cysteine endopeptidase (EC 3.4.22.-) precursor - bean >gi|2944446|gb|AAC62396.1| cysteine endopeptidase precursor
  misc_feature (1)..(286): Homolog of NCBI NO: 18408616 NR Description: Expressed protein; protein id: At3g48350.1, by cDNA: 151603. [Arabidopsis thaliana] >gi|7435810|pir||T06707
MHVHNTNKKNRSYKLKLNKFADLTINEFKNAYTGSNIKHHRMLQGPKRGSKQFMYDHENLSKLPSSVDWRKKGAVTEIKNQGKCAVEGINKIKTNKLVSLSEQELVDCDTKQNEGCNGGLMEIAFEFIKKNGGITTEDSYPYEGIDGKCDASKDNGVLVTIDGHEDVPENDENALLKAVANQPVSVAIDAGSSDFQFYSEGVFTGSCGTELNHGVAAVGYGSERGKKYWIVRNSWGAEWGEGGYIKIEREIDEPEGRCGIAMEASYPIKLSSSNPTPKDGDVKDEL

SEQ ID NO: 91108 - protein, 245 aa, Arabidopsis thaliana
  peptide (1)..(245): Ceres Seq. ID no. 12726459
  misc_feature (22)..(227): Pfam Name: Papain family cysteine protease Pfam Description: Papain family cysteine protease
  misc_feature (1)..(245): Homolog of NCBI NO: 22331686 NR Description: similar to cysteine proteinase; protein id:
  misc_feature (1)..(245): Homolog of NCBI NO: 7435811 NR Description: cysteine proteinase (EC 3.4.22.-) T29H11.140 -
  misc_feature (1)..(245): Homolog of NCBI NO: 7435817 NR Description: cysteine endopeptidase (EC 3.4.22.-) precursor - bean >gi|2944446|gb|AAC62396.1| cysteine endopeptidase precursor
  misc_feature (1)..(245): Homolog of NCBI NO: 18408616 NR Description: Expressed protein; protein id: At3g48350.1, by cDNA: 151603. [Arabidopsis thaliana] >gi|7435810|pir||T06707
MLQGPKRGSKQFMYDHENLSKLPSSVDWRKKGAVTEIKNQGKCAVEGINKIKTNKLVSLSEQELVDCDTKQNEGCNGGLMEIAFEFIKKNGGITTEDSYPYEGIDGKCDASKDNGVLVTIDGHEDVPENDENALLKAVANQPVSVAIDAGSSDFQFYSEGVFTGSCGTELNHGVAAVGYGSERGKKYWIVRNSWGAEWGEGGYIKIEREIDEPEGRCGIAMEASYPIKLSSSNPTPKDGDVKDEL

SEQ ID NO: 91109 - DNA, 4065 bp, Arabidopsis thaliana
  misc_feature (1)..(4065): Ceres Seq. ID no. 12726468
  misc_feature: MA Experiment ID: 20000180 Result: Down-regulated in Transcription
  misc_feature: MA Experiment 20000180 PARAMETER Experiment Name: At_Germinating_Seeds_P Parameter: Age (hr) Value: 24 vs. 0
  misc_feature: MA Experiment 20000180 PARAMETER Experiment Name: At_Germinating_Seeds_P Parameter: Tissue Value: Germinating Seeds
  misc_feature: MA Experiment ID: 20000234 Result: Up-regulated in Transcription
  misc_feature: MA Experiment 20000234 PARAMETER Experiment Name: At_Siliques_P Parameter: Age (day) Value: 21
  misc_feature: MA Experiment 20000234 PARAMETER Experiment Name: At_Siliques_P Parameter: Organism Value: A. thaliana
  misc_feature: MA Experiment 20000234 PARAMETER Experiment Name: At_Siliques_P Parameter: Plant Line Value: WS
  misc_feature: MA Experiment 20000234 PARAMETER Experiment Name: At_Siliques_P Parameter: Tissue Value: Less Than 5mm Siliques vs. Whole Plant
  misc_feature: MA Experiment ID: 20000264 Result: Up-regulated in Transcription
  misc_feature: MA Experiment 20000264 PARAMETER Experiment Name: At_Open_Flower_P Parameter: Age (day) Value: 21
  misc_feature: MA Experiment 20000264 PARAMETER Experiment Name: At_Open_Flower_P Parameter: Plant Line Value: WS
  misc_feature: MA Experiment 20000264 PARAMETER Experiment Name: At_Open_Flower_P Parameter: Tissue Value: Open Flower vs. Whole Plant
  misc_feature: MA Experiment ID: 20000265 Result: Up-regulated in Transcription
  misc_feature: MA Experiment 20000265 PARAMETER Experiment Name: At_Open_Flower_P Parameter: Age (day) Value: 21
  misc_feature: MA Experiment 20000265 PARAMETER Experiment Name: At_Open_Flower_P Parameter: Plant Line Value: WS
  misc_feature: MA Experiment 20000265 PARAMETER Experiment Name: At_Open_Flower_P Parameter: Tissue Value: Closed Flower vs. Whole Plant
  misc_feature: MA Experiment ID: 20000286 Result: Up-regulated in Transcription
  misc_feature: MA Experiment 20000286 PARAMETER Experiment Name: At_Open_Flower_P Parameter: Age (day) Value: 21
  misc_feature: MA Experiment 20000286 PARAMETER Experiment Name: At_Open_Flower_P Parameter: Plant Line Value: WS
  misc_feature: MA Experiment 20000286 PARAMETER Experiment Name: At_Open_Flower_P Parameter: Tissue Value: Half Open vs. Whole Plant
  misc_feature: MA Experiment ID: 20000439 Result: Up-regulated in Transcription
  misc_feature: MA Experiment 20000439 PARAMETER Experiment Name: At_Roots__P Parameter: Age (day) Value: 14 vs. 21
  misc_feature: MA Experiment 20000439 PARAMETER Experiment Name: At_Roots__P Parameter: Organism Value: A. thaliana
  misc_feature: MA Experiment 20000439 PARAMETER Experiment Name: At_Roots__P Parameter: Tissue Value: Roots vs. Whole Plant
  misc_feature: MA Experiment ID: 20000794 Result: Up-regulated in Transcription
  misc_feature: MA Experiment 20000794 PARAMETER Experiment Name: At_Petals_P Parameter: Age (day) Value: 23-25 days
  misc_feature: MA Experiment 20000794 PARAMETER Experiment Name: At_Petals_P Parameter: Plant Line Value: WS
  misc_feature: MA Experiment 20000794 PARAMETER Experiment Name: At_Petals_P Parameter: Tissue Value: Petals vs. Whole plant
  misc_feature: MA Experiment ID: 20001451 Result: Down-regulated in Transcription
  misc_feature: MA Experiment 20001451 PARAMETER Experiment Name: At_Far-red-induction_P Parameter: Age (day) Value: 7
  misc_feature: MA Experiment 20001451 PARAMETER Experiment Name: At_Far-red-induction_P Parameter: Light Value: Far-red vs. White
  misc_feature: MA Experiment 20001451 PARAMETER Experiment Name: At_Far-red-induction_P Parameter: Organism Value: A. thaliana
  misc_feature: MA Experiment 20001451 PARAMETER Experiment Name: At_Far-red-induction_P Parameter: Plant Line Value: Columbia
  misc_feature: MA Experiment 20001451 PARAMETER Experiment Name: At_Far-red-induction_P Parameter: Timepoint (hr) Value: 24
  misc_feature: MA Experiment 20001451 PARAMETER Experiment Name: At_Far-red-induction_P Parameter: Tissue Value: Whole Plant
atggcggtttcagagcagagtcaagatgtgtttccatggcttaaatcgttaccggttgctccagagttcagacctactctagcagagtttcaagatccgatcgcttacattttgaagattgaagaagaagcttctagatatggaatctgtaaaattctgcctccactgcctcctccttccaaaaaaacctcgatttctaatctcaaccgttctctggcggcaagagcggcggcgagggttcgtgacggcggctttggcgcgtgtgattatgacggtggtcccacattcgccacgcgccagcagcagatcgggttttgccctaggaaacagcgtccagtgcagagacctgtgtggcagagtggagaggagtactcttttggtgagttcgagtttaaagctaagaactttgagaagaattatctcaagaaatgtggtaaaaagagtcaactctctgcccttgaaattgaaacactttactggagagccactgtggataaacccttctctgttgagtatgccaatgacatgcctggctcggcttttatccctctgagtctggctgctgcgaggaggagagagtctggtggtgaaggaggaacagttggtgagaccgcttggaacatgagggcaatgtctagagccgaaggatcattgcttaagttcatgaaggaagagatccctggagttacatcaccaatggtgtatgttgctatgatgtttagttggtttgcttggcatgtggaggaccatgaccttcatagtctcaattacttgcatatgggtgctggtaagacttggtacggtgtgccaaaggatgctgctctggcttttgaggaggttgttagggttcatggttacggtgaagagctcaatcctcttgtgacattttctactcttggtgagaagacaactgtgatgtctcctgaagtatttgttaaagccggaataccgtgttgcaggttagtgcaaaatcctggagagtttgtcgtcacctttccgggagcttatcattcgggatttagtcatggatttaattttggagaagcatctaacattgccactcccgaatggttgagaatggctaaagatgctgctatccggcgagctgctataaattaccctccaatggtttctcatctccagctactttatgactttgtattggctctaggttctagagtgccaacaagcatcaatcccaaaccacggagttctagattaaaagataaggcaagaagcgaaggagaaagattgaccaaaaagctatttgtgcaaaacattatccacaacaacgaattgctttcttctctcggaaaaggatccccagtggcccttctcccacagagttcctcagatatatcagtttgttctgacctgcgaattggatcccatttgataaccaaccaggaaaacccaatccagttaaagtgtgaggacttaagttctgatagtgttgtggttgatctcagtaacggtttaaaggatacagtttcagtgaaagaaaaatttacatctttatgtgaaaggagcagaaatcacctagcaagcacggagaaggacactcaagaaactctgtctgatgctgaaaggaggaagaatgatgcagctgttgcgctttcggatcaaaggcttttctcttgtgttacatgtggagtcttaagctttgattgtgtagctatcgttcaacctaaagaagcagctgctagatatctcatgtctgcagattgtagcttcttcaatgattggacagctgcttctggatctgcaaatcttggtcaggctgcaagatcacttcatcctcaaagcaaagagaagcatgatgtaaattacttctacaatgttcctgttcaaactatggatcattcagtgaagactggcgatcaaaaaacttcaacaacttccccgacaatagcgcataaagataatgatgttcttgggatgttagcttcagcatatggagactcttctgattccgaggaagaagatcaaaaaggcttagttacccctagttccaaaggggaaacaaaaacgtatgatcaagaaggttcagatggccatgaggaggctagagatggtagaacttctgattttaactgccagagactaaccagcgaacagaatgggttaagcaaaggcggaaaatcatcacttctggaaatagctttaccatttattccaagatctgatgacgattcatgtcggttgcacgtgttttgtcttgagcatgctgcggaagtggaacagcaacttcgtccttttggggggattaacttaatgttactgtgccatccagagtaccccaggatagaggctgaagcaaagatagttgccgaagagctcgtcatcaatcacgaatggaatgatactgaattcaggaatgtgacccgagaggatgaggaaacgattcaggcagcgttggataatgttgaagctaagggtgggaacagtgattggaccgtaaaattgggtgttaacctttcttacagcgctattctcagtcgctctcctctgtacagtaagcagatgccgtataactccatcatatacaaggcgttcggtcgcagctctccagtagcgagctcaccctcgaaacccaaagtctctggtaaaagatcgtccagacagaggaaatatgttgttggaaaatggtgtggtaaggtgcatccctttttgctggagcaggacttagagggggaagaatctgaaagaagttgtcatcttcgagttgctatggatgaggatgccactggaaagagatcgtttcctaataatgtttccagggattcgacaacaatgtttggaagaaagtattgtaggaagagaaagataagagcaaaggcggtgccacgcaagaagcttacttcttttaagagggaagatggagtttctgatgacacatcagaagatcattcttataagcagcaatggagggcttccgggaatgaggaagagtcttattttgagacagggaacacagcttctggtgattcatcaaatcaaatgtctgatccgcacaagggaattatcagacataaaggttataaagaatttgagtcagatgatgaggtttcagaccgttcacttggggaagagtatactgtacgggcatgtgcagcttcagagagctcaatggagaatggctctcagcattcaatgtatgaccatgatgatgatgatgatgatatcgacaggcagcctagggggattccaaggagccaacagacaagagtttttaggaatccagtttcatatgagtcagaagataatggcgtttatcagcaaagcggaagaatatccataagtaataggcaagctaatcgaatggttggtgaatatgattcagcagagaattctttggaggaacgaggcttttgcagtacagggaaaaggcaaaccaggtcaacagccaaacgaatagcaaaaaccaagacagttcagagttcgagagacacaaaaggtcgctttttgcaagaatttgcatctggaaagaagaatgaagaattggattcatacatggagggacctagcacacggcttagggtgagacatcagaagccgtcgagagggtctttagaaacaaaaccaaagaagattggtaagaagagaagtggtaatgcttccttctccagagttgcaactgaaaaagatgtggaggaaaaagaagaagaagaagaagaagaagagaatgaggaagaggaatgtgcagcataccaatgtaacatggagggttgcacgatgagtttcagttcggaaaaacagttgatgttacacaaaagaaacatatgcccaattaaaggctgtggtaaaaacttcttctcacacaagtatttggttcaacaccagcgtgttcactcagacgaccgtcctctgaaatgtccatggaagggatgtaagatgacgttcaagtgggcttggtctagaaccgagcacataagggttcacacaggcgctaggccttatgtttgcgctgaaccggattgtggtcaaacattcaggtttgtctctgacttcagccggcataaaaggaagaccggtcattcggttaagaagaccaacaaaaggtga

SEQ ID NO: 91110 - protein, 1354 aa, Arabidopsis thaliana
  peptide (1)..(1354): Ceres Seq. ID no. 12726469
  misc_feature (233)..(352): Pfam Name: jmjC domain Pfam Description: jmjC domain
  misc_feature (7)..(460): Homolog of NCBI NO: 20804883 NR Description: putative zinc finger protein [Oryza sativa
  misc_feature (616)..(932): Homolog of NCBI NO: 20804883 NR Description: putative zinc finger protein [Oryza sativa
  misc_feature (1095)..(1353): Homolog of NCBI NO: 20804883 NR Description: putative zinc finger protein [Oryza sativa
  misc_feature (510)..(594): Homolog of NCBI NO: 20804883 NR Description: putative zinc finger protein [Oryza sativa
  misc_feature (195)..(437): Homolog of NCBI NO: 15237652 NR Description: zinc finger protein - like; protein id:
  misc_feature (13)..(181): Homolog of NCBI NO: 15237652 NR Description: zinc finger protein - like; protein id:
  misc_feature (1238)..(1348): Homolog of NCBI NO: 15237652 NR Description: zinc finger protein - like; protein id:
  misc_feature (734)..(836): Homolog of NCBI NO: 15237652 NR Description: zinc finger protein - like; protein id:
  misc_feature (118)..(506): Homolog of NCBI NO: 15237976 NR Description: putative protein; protein id: At5g46910.1 thaliana] >gi|9759433|dbj|BAB10230.1|
  misc_feature (3)..(56): Homolog of NCBI NO: 15237976 NR Description: putative protein; protein id: At5g46910.1 thaliana] >gi|9759433|dbj|BAB10230.1|
MAVSEQSQDVFPWLKSLPVAPEFRPTLAEFQDPIAYILKIEEEASRYGICKILPPLPPPSKKTSISNLNRSLAARAAARVRDGGFGACDYDGGPTFATRQQQIGFCPRKQRPVQRPVWQSGEEYSFGEFEFKAKNFEKNYLKKCGKKSQLSALEIETLYWRATVDKPFSVEYANDMPGSAFIPLSLAAARRRESGGEGGTVGETAWNMRAMSRAEGSLLKFMKEEIPGVTSPMVYVAMMFSWFAWHVEDHDLHSLNYLHMGAGKTWYGVPKDAALAFEEVVRVHGYGEELNPLVTFSTLGEKTTVMSPEVFVKAGIPCCRLVQNPGEFVVTFPGAYHSGFSHGFNFGEASNIATPEWLRMAKDAAIRRAAINYPPMVSHLQLLYDFVLALGSRVPTSINPKPRSSRLKDKARSEGERLTKKLFVQNIIHNNELLSSLGKGSPVALLPQSSSDISVCSDLRIGSHLITNQENPIQLKCEDLSSDSVVVDLSNGLKDTVSVKEKFTSLCERSRNHLASTEKDTQETLSDAERRKNDAAVALSDQRLFSCVTCGVLSFDCVAIVQPKEAAARYLMSADCSFFNDWTAASGSANLGQAARSLHPQSKEKHDVNYFYNVPVQTMDHSVKTGDQKTSTTSPTIAHKDNDVLGMLASAYGDSSDSEEEDQKGLVTPSSKGETKTYDQEGSDGHEEARDGRTSDFNCQRLTSEQNGLSKGGKSSLLEIALPFIPRSDDDSCRLHVFCLEHAAEVEQQLRPFGGINLMLLCHPEYPRIEAEAKIVAEELVINHEWNDTEFRNVTREDEETIQAALDNVEAKGGNSDWTVKLGVNLSYSAILSRSPLYSKQMPYNSIIYKAFGRSSPVASSPSKPKVSGKRSSRQRKYVVGKWCGKVHPFLLEQDLEGEESERSCHLRVAMDEDATGKRSFPNNVSRDSTTMFGRKYCRKRKIRAKAVPRKKLTSFKREDGVSDDTSEDHSYKQQWRASGNEEESYFETGNTASGDSSNQMSDPHKGIIRHKGYKEFESDDEVSDRSLGEEYTVRACAASESSMENGSQHSMYDHDDDDDDIDRQPRGIPRSQQTRVFRNPVSYESEDNGVYQQSGRISISNRQANRMVGEYDSAENSLEERGFCSTGKRQTRSTAKRIAKTKTVQSSRDTKGRFLQEFASGKKNEELDSYMEGPSTRLRVRHQKPSRGSLETKPKKIGKKRSGNASFSRVATEKDVEEKEEEEEEEENEEEECAAYQCNMEGCTMSFSSEKQLMLHKRNICPIKGCGKNFFSHKYLVQHQRVHSDDRPLKCPWKGCKMTFKWAWSRTEHIRVHTGARPYVCAEPDCGQTFRFVSDFSRHKRKTGHSVKKTNKR

SEQ ID NO: 91111 - protein, 1179 aa, Arabidopsis thaliana
  peptide (1)..(1179): Ceres Seq. ID no. 12726470
  misc_feature (58)..(177): Pfam Name: jmjC domain Pfam Description: jmjC domain
  misc_feature (1)..(285): Homolog of NCBI NO: 20804883 NR Description: putative zinc finger protein [Oryza sativa
  misc_feature (441)..(757): Homolog of NCBI NO: 20804883 NR Description: putative zinc finger protein [Oryza sativa
  misc_feature (920)..(1178): Homolog of NCBI NO: 20804883 NR Description: putative zinc finger protein [Oryza sativa
  misc_feature (335)..(419): Homolog of NCBI NO: 20804883 NR Description: putative zinc finger protein [Oryza sativa
  misc_feature (20)..(262): Homolog of NCBI NO: 15237652 NR Description: zinc finger protein - like; protein id:
  misc_feature (1063)..(1173): Homolog of NCBI NO: 15237652 NR Description: zinc finger protein - like; protein id:
  misc_feature (559)..(661): Homolog of NCBI NO: 15237652 NR Description: zinc finger protein - like; protein id:
  misc_feature (1)..(331): Homolog of NCBI NO: 15237976 NR Description: putative protein; protein id: At5g46910.1 thaliana] >gi|9759433|dbj|BAB10230.1|
  misc_feature (1)..(285): Homolog of NCBI NO: 37537146 NR Description: putative retinoblastoma binding protein [Oryza
  misc_feature (1)..(189): Homolog of NCBI NO: 15226853 NR Description: unknown protein; protein id: At2g34880.1
MPGSAFIPLSLAAARRRESGGEGGTVGETAWNMRAMSRAEGSLLKFMKEEIPGVTSPMVYVAMMFSWFAWHVEDHDLHSLNYLHMGAGKTWYGVPKDAALAFEEVVRVHGYGEELNPLVTFSTLGEKTTVMSPEVFVKAGIPCCRLVQNPGEFVVTFPGAYHSGFSHGFNFGEASNIATPEWLRMAKDAAIRRAAINYPPMVSHLQLLYDFVLALGSRVPTSINPKPRSSRLKDKARSEGERLTKKLFVQNIIHNNELLSSLGKGSPVALLPQSSSDISVCSDLRIGSHLITNQENPIQLKCEDLSSDSVVVDLSNGLKDTVSVKEKFTSLCERSRNHLASTEKDTQETLSDAERRKNDAAVALSDQRLFSCVTCGVLSFDCVAIVQPKEAAARYLMSADCSFFNDWTAASGSANLGQAARSLHPQSKEKHDVNYFYNVPVQTMDHSVKTGDQKTSTTSPTIAHKDNDVLGMLASAYGDSSDSEEEDQKGLVTPSSKGETKTYDQEGSDGHEEARDGRTSDFNCQRLTSEQNGLSKGGKSSLLEIALPFIPRSDDDSCRLHVFCLEHAAEVEQQLRPFGGINLMLLCHPEYPRIEAEAKIVAEELVINHEWNDTEFRNVTREDEETIQAALDNVEAKGGNSDWTVKLGVNLSYSAILSRSPLYSKQMPYNSIIYKAFGRSSPVASSPSKPKVSGKRSSRQRKYVVGKWCGKVHPFLLEQDLEGEESERSCHLRVAMDEDATGKRSFPNNVSRDSTTMFGRKYCRKRKIRAKAVPRKKLTSFKREDGVSDDTSEDHSYKQQWRASGNEEESYFETGNTASGDSSNQMSDPHKGIIRHKGYKEFESDDEVSDRSLGEEYTVRACAASESSMENGSQHSMYDHDDDDDDIDRQPRGIPRSQQTRVFRNPVSYESEDNGVYQQSGRISISNRQANRMVGEYDSAENSLEERGFCSTGKRQTRSTAKRIAKTKTVQSSRDTKGRFLQEFASGKKNEELDSYMEGPSTRLRVRHQKPSRGSLETKPKKIGKKRSGNASFSRVATEKDVEEKEEEEEEEENEEEECAAYQCNMEGCTMSFSSEKQLMLHKRNICPIKGCGKNFFSHKYLVQHQRVHSDDRPLKCPWKGCKMTFKWAWSRTEHIRVHTGARPYVCAEPDCGQTFRFVSDFSRHKRKTGHSVKKTNKR

SEQ ID NO: 91112 - protein, 1147 aa, Arabidopsis thaliana
  peptide (1)..(1147): Ceres Seq. ID no. 12726471
  misc_feature (26)..(145): Pfam Name: jmjC domain Pfam Description: jmjC domain
  misc_feature (1)..(253): Homolog of NCBI NO: 20804883 NR Description: putative zinc finger protein [Oryza sativa
  misc_feature (409)..(725): Homolog of NCBI NO: 20804883 NR Description: putative zinc finger protein [Oryza sativa
  misc_feature (888)..(1146): Homolog of NCBI NO: 20804883 NR Description: putative zinc finger protein [Oryza sativa
  misc_feature (303)..(387): Homolog of NCBI NO: 20804883 NR Description: putative zinc finger protein [Oryza sativa
  misc_feature (1)..(230): Homolog of NCBI NO: 15237652 NR Description: zinc finger protein - like; protein id:
  misc_feature (1031)..(1141): Homolog of NCBI NO: 15237652 NR Description: zinc finger protein - like; protein id:
  misc_feature (527)..(629): Homolog of NCBI NO: 15237652 NR Description: zinc finger protein - like; protein id:
  misc_feature (1)..(299): Homolog of NCBI NO: 15237976 NR Description: putative protein; protein id: At5g46910.1 thaliana] >gi|9759433|dbj|BAB10230.1|
  misc_feature (1)..(253): Homolog of NCBI NO: 37537146 NR Description: putative retinoblastoma binding protein [Oryza
  misc_feature (1)..(157): Homolog of NCBI NO: 15226853 NR Description: unknown protein; protein id: At2g34880.1
MRAMSRAEGSLLKFMKEEIPGVTSPMVYVAMMFSWFAWHVEDHDLHSLNYLHMGAGKTWYGVPKDAALAFEEVVRVHGYGEELNPLVTFSTLGEKTTVMSPEVFVKAGIPCCRLVQNPGEFVVTFPGAYHSGFSHGFNFGEASNIATPEWLRMAKDAAIRRAAINYPPMVSHLQLLYDFVLALGSRVPTSINPKPRSSRLKDKARSEGERLTKKLFVQNIIHNNELLSSLGKGSPVALLPQSSSDISVCSDLRIGSHLITNQENPIQLKCEDLSSDSVVVDLSNGLKDTVSVKEKFTSLCERSRNHLASTEKDTQETLSDAERRKNDAAVALSDQRLFSCVTCGVLSFDCVAIVQPKEAAARYLMSADCSFFNDWTAASGSANLGQAARSLHPQSKEKHDVNYFYNVPVQTMDHSVKTGDQKTSTTSPTIAHKDNDVLGMLASAYGDSSDSEEEDQKGLVTPSSKGETKTYDQEGSDGHEEARDGRTSDFNCQRLTSEQNGLSKGGKSSLLEIALPFIPRSDDDSCRLHVFCLEHAAEVEQQLRPFGGINLMLLCHPEYPRIEAEAKIVAEELVINHEWNDTEFRNVTREDEETIQAALDNVEAKGGNSDWTVKLGVNLSYSAILSRSPLYSKQMPYNSIIYKAFGRSSPVASSPSKPKVSGKRSSRQRKYVVGKWCGKVHPFLLEQDLEGEESERSCHLRVAMDEDATGKRSFPNNVSRDSTTMFGRKYCRKRKIRAKAVPRKKLTSFKREDGVSDDTSEDHSYKQQWRASGNEEESYFETGNTASGDSSNQMSDPHKGIIRHKGYKEFESDDEVSDRSLGEEYTVRACAASESSMENGSQHSMYDHDDDDDDIDRQPRGIPRSQQTRVFRNPVSYESEDNGVYQQSGRISISNRQANRMVGEYDSAENSLEERGFCSTGKRQTRSTAKRIAKTKTVQSSRDTKGRFLQEFASGKKNEELDSYMEGPSTRLRVRHQKPSRGSLETKPKKIGKKRSGNASFSRVATEKDVEEKEEEEEEEENEEEECAAYQCNMEGCTMSFSSEKQLMLHKRNICPIKGCGKNFFSHKYLVQHQRVHSDDRPLKCPWKGCKMTFKWAWSRTEHIRVHTGARPYVCAEPDCGQTFRFVSDFSRHKRKTGHSVKKTNKR

SEQ ID NO: 91113 - DNA, 1521 bp, Arabidopsis thaliana
  misc_feature (1)..(1521): Ceres Seq. ID no. 12726480
  misc_feature: MA Experiment ID: 20000182 Result: Up-regulated in Transcription
  misc_feature: MA Experiment 20000182 PARAMETER Experiment Name: At_2mM_SA_P Parameter: Age (day) Value: 14
  misc_feature: MA Experiment 20000182 PARAMETER Experiment Name: At_2mM_SA_P Parameter: Organism Value: A. thaliana
  misc_feature: MA Experiment 20000182 PARAMETER Experiment Name: At_2mM_SA_P Parameter: Plant Line Value: WS
  misc_feature: MA Experiment 20000182 PARAMETER Experiment Name: At_2mM_SA_P Parameter: Timepoint (hr) Value: 6
  misc_feature: MA Experiment 20000182 PARAMETER Experiment Name: At_2mM_SA_P Parameter: Tissue Value: Aerial
  misc_feature: MA Experiment 20000182 PARAMETER Experiment Name: At_2mM_SA_P Parameter: Treatment Value: 2mM SA vs. No Treatment
  misc_feature: MA Experiment ID: 20000211 Result: Up-regulated in Transcription
  misc_feature: MA Experiment 20000211 PARAMETER Experiment Name: At_0.001percent_MeJA__P Parameter: Age (day) Value: 14
  misc_feature: MA Experiment 20000211 PARAMETER Experiment Name: At_0.001percent_MeJA__P Parameter: Organism Value: A. thaliana
  misc_feature: MA Experiment 20000211 PARAMETER Experiment Name: At_0.001percent_MeJA__P Parameter: Plant Line Value: WS
  misc_feature: MA Experiment 20000211 PARAMETER Experiment Name: At_0.001percent_MeJA__P Parameter: Timepoint (hr) Value: 1
  misc_feature: MA Experiment 20000211 PARAMETER Experiment Name: At_0.001percent_MeJA__P Parameter: Tissue Value: Aerial
  misc_feature: MA Experiment 20000211 PARAMETER Experiment Name: At_0.001percent_MeJA__P Parameter: Treatment Value: 0.001percent MeJA vs. No Treatment
  misc_feature: MA Experiment ID: 20000234 Result: Down-regulated in Transcription
  misc_feature: MA Experiment 20000234 PARAMETER Experiment Name: At_Siliques_P Parameter: Age (day) Value: 21
  misc_feature: MA Experiment 20000234 PARAMETER Experiment Name: At_Siliques_P Parameter: Organism Value: A. thaliana
  misc_feature: MA Experiment 20000234 PARAMETER Experiment Name: At_Siliques_P Parameter: Plant Line Value: WS
  misc_feature: MA Experiment 20000234 PARAMETER Experiment Name: At_Siliques_P Parameter: Tissue Value: Less Than 5mm Siliques vs. Whole Plant
  misc_feature: MA Experiment ID: 20000235 Result: Down-regulated in Transcription
  misc_feature: MA Experiment 20000235 PARAMETER Experiment Name: At_Siliques_P Parameter: Age (day) Value: 21
  misc_feature: MA Experiment 20000235 PARAMETER Experiment Name: At_Siliques_P Parameter: Organism Value: A. thaliana
  misc_feature: MA Experiment 20000235 PARAMETER Experiment Name: At_Siliques_P Parameter: Plant Line Value: WS
  misc_feature: MA Experiment 20000235 PARAMETER Experiment Name: At_Siliques_P Parameter: Tissue Value: 5-10mm Siliques vs. Whole Plant
  misc_feature: MA Experiment ID: 20000265 Result: Down-regulated in Transcription
  misc_feature: MA Experiment 20000265 PARAMETER Experiment Name: At_Open_Flower_P Parameter: Age (day) Value: 21
  misc_feature: MA Experiment 20000265 PARAMETER Experiment Name: At_Open_Flower_P Parameter: Plant Line Value: WS
  misc_feature: MA Experiment 20000265 PARAMETER Experiment Name: At_Open_Flower_P Parameter: Tissue Value: Closed Flower vs. Whole Plant
  misc_feature: MA Experiment ID: 20000267 Result: Up-regulated in Transcription
  misc_feature: MA Experiment 20000267 PARAMETER Experiment Name: At_Drought_P Parameter: Age (day) Value: 7
  misc_feature: MA Experiment 20000267 PARAMETER Experiment Name: At_Drought_P Parameter: Organism Value: A. thaliana
  misc_feature: MA Experiment 20000267 PARAMETER Experiment Name: At_Drought_P Parameter: Plant Line Value: WS
  misc_feature: MA Experiment 20000267 PARAMETER Experiment Name: At_Drought_P Parameter: Timepoint (hr) Value: 6
  misc_feature: MA Experiment 20000267 PARAMETER Experiment Name: At_Drought_P Parameter: Tissue Value: Whole Plant
  misc_feature: MA Experiment 20000267 PARAMETER Experiment Name: At_Drought_P Parameter: Treatment Value: Drought vs. No Drought
  misc_feature: MA Experiment ID: 20000286 Result: Down-regulated in Transcription
  misc_feature: MA Experiment 20000286 PARAMETER Experiment Name: At_Open_Flower_P Parameter: Age (day) Value: 21
  misc_feature: MA Experiment 20000286 PARAMETER Experiment Name: At_Open_Flower_P Parameter: Plant Line Value: WS
  misc_feature: MA Experiment 20000286 PARAMETER Experiment Name: At_Open_Flower_P Parameter: Tissue Value: Half Open vs. Whole Plant
  misc_feature: MA Experiment ID: 20000436 Result: Up-regulated in Transcription
  misc_feature: MA Experiment 20000436 PARAMETER Experiment Name: At_Drought_P Parameter: Age (day) Value: 7
  misc_feature: MA Experiment 20000436 PARAMETER Experiment Name: At_Drought_P Parameter: Organism Value: A. thaliana
  misc_feature: MA Experiment 20000436 PARAMETER Experiment Name: At_Drought_P Parameter: Plant Line Value: WS
  misc_feature: MA Experiment 20000436 PARAMETER Experiment Name: At_Drought_P Parameter: Timepoint (hr) Value: 12
  misc_feature: MA Experiment 20000436 PARAMETER Experiment Name: At_Drought_P Parameter: Tissue Value: Whole Plant
  misc_feature: MA Experiment 20000436 PARAMETER Experiment Name: At_Drought_P Parameter: Treatment Value: Drought vs. No Drought
  misc_feature: MA Experiment ID: 20000437 Result: Up-regulated in Transcription
  misc_feature: MA Experiment 20000437 PARAMETER Experiment Name: At_Drought_P Parameter: Age (day) Value: 8
  misc_feature: MA Experiment 20000437 PARAMETER Experiment Name: At_Drought_P Parameter: Organism Value: A. thaliana
  misc_feature: MA Experiment 20000437 PARAMETER Experiment Name: At_Drought_P Parameter: Plant Line Value: WS
  misc_feature: MA Experiment 20000437 PARAMETER Experiment Name: At_Drought_P Parameter: Timepoint (hr) Value: 24
  misc_feature: MA Experiment 20000437 PARAMETER Experiment Name: At_Drought_P Parameter: Tissue Value: Whole Plant
  misc_feature: MA Experiment 20000437 PARAMETER Experiment Name: At_Drought_P Parameter: Treatment Value: Drought vs. No Drought
  misc_feature: MA Experiment ID: 20000438 Result: Down-regulated in Transcription
  misc_feature: MA Experiment 20000438 PARAMETER Experiment Name: At_Shoots__P Parameter: Age (day) Value: 14
  misc_feature: MA Experiment 20000438 PARAMETER Experiment Name: At_Shoots__P Parameter: Tissue Value: Shoots vs. Whole Plant
  misc_feature: MA Experiment ID: 20000453 Result: Up-regulated in Transcription
  misc_feature: MA Experiment 20000453 PARAMETER Experiment Name: At_100uM_ABA_P Parameter: Age (day) Value: 15
  misc_feature: MA Experiment 20000453 PARAMETER Experiment Name: At_100uM_ABA_P Parameter: Organism Value: A. thaliana
  misc_feature: MA Experiment 20000453 PARAMETER Experiment Name: At_100uM_ABA_P Parameter: Plant Line Value: WS
  misc_feature: MA Experiment 20000453 PARAMETER Experiment Name: At_100uM_ABA_P Parameter: Timepoint (hr) Value: 24
  misc_feature: MA Experiment 20000453 PARAMETER Experiment Name: At_100uM_ABA_P Parameter: Tissue Value: Aerial
  misc_feature: MA Experiment 20000453 PARAMETER Experiment Name: At_100uM_ABA_P Parameter: Treatment Value: 100uM ABA vs. No Treatment
  misc_feature: MA Experiment ID: 20000495 Result: Down-regulated in Transcription
  misc_feature: MA Experiment 20000495 PARAMETER Experiment Name: At_Guard_Cells_P Parameter: Harvest Date Value: 8/2/2002
  misc_feature: MA Experiment 20000495 PARAMETER Experiment Name: At_Guard_Cells_P Parameter: Organism Value: A. thaliana
  misc_feature: MA Experiment 20000495 PARAMETER Experiment Name: At_Guard_Cells_P Parameter: Tissue Value: Guard Cells vs. Leaves
  misc_feature: MA Experiment ID: 20000496 Result: Down-regulated in Transcription
  misc_feature: MA Experiment 20000496 PARAMETER Experiment Name: At_Guard_Cells_P Parameter: Harvest Date Value: 7/19/2002
  misc_feature: MA Experiment 20000496 PARAMETER Experiment Name: At_Guard_Cells_P Parameter: Organism Value: Canola
  misc_feature: MA Experiment 20000496 PARAMETER Experiment Name: At_Guard_Cells_P Parameter: Tissue Value: Guard Cells vs. Leaves
  misc_feature: MA Experiment ID: 20000506 Result: Up-regulated in Transcription
  misc_feature: MA Experiment 20000506 PARAMETER Experiment Name: At_Wounding_P Parameter: Organism Value: A. thaliana
  misc_feature: MA Experiment 20000506 PARAMETER Experiment Name: At_Wounding_P Parameter: Plant Line Value: WS
  misc_feature: MA Experiment 20000506 PARAMETER Experiment Name: At_Wounding_P Parameter: Timepoint (hr) Value: 6
  misc_feature: MA Experiment 20000506 PARAMETER Experiment Name: At_Wounding_P Parameter: Tissue Value: Aerial
  misc_feature: MA Experiment 20000506 PARAMETER Experiment Name: At_Wounding_P Parameter: Treatment Value: Wounding vs. No Wounding
  misc_feature: MA Experiment ID: 20001759 Result: Down-regulated in Transcription
  misc_feature: MA Experiment 20001759 PARAMETER Experiment Name: At_50mM_NH4NO3_L-to-H_P Parameter: Timepoint (hr) Value: 1
  misc_feature: MA Experiment 20001759 PARAMETER Experiment Name: At_50mM_NH4NO3_L-to-H_P Parameter: Tissue Value: Siliques
  misc_feature: MA Experiment 20001759 PARAMETER Experiment Name: At_50mM_NH4NO3_L-to-H_P Parameter: Treatment Value: 50mM NH4NO3 vs 100mM Mannitol
  misc_feature: MA Experiment ID: 20001761 Result: Down-regulated in Transcription
  misc_feature: MA Experiment 20001761 PARAMETER Experiment Name: At_50mM_NH4NO3_L-to-H_P Parameter: Timepoint (hr) Value: 4
  misc_feature: MA Experiment 20001761 PARAMETER Experiment Name: At_50mM_NH4NO3_L-to-H_P Parameter: Tissue Value: Siliques
  misc_feature: MA Experiment 20001761 PARAMETER Experiment Name: At_50mM_NH4NO3_L-to-H_P Parameter: Treatment Value: 50mM NH4NO3 vs 100mM Mannitol
  misc_feature: MA Experiment ID: 20001905 Result: Up-regulated in Transcription
  misc_feature: MA Experiment 20001905 PARAMETER Experiment Name: At_Drought_Reproduction_P Parameter: Age (day) Value: 40
  misc_feature: MA Experiment 20001905 PARAMETER Experiment Name: At_Drought_Reproduction_P Parameter: Organism Value: A. thaliana
  misc_feature: MA Experiment 20001905 PARAMETER Experiment Name: At_Drought_Reproduction_P Parameter: Plant Line Value: WS
  misc_feature: MA Experiment 20001905 PARAMETER Experiment Name: At_Drought_Reproduction_P Parameter: Timepoint (day) Value: 10
  misc_feature: MA Experiment 20001905 PARAMETER Experiment Name: At_Drought_Reproduction_P Parameter: Tissue Value: Rosettes
  misc_feature: MA Experiment 20001905 PARAMETER Experiment Name: At_Drought_Reproduction_P Parameter: Treatment Value: Drought vs. No Drought
  misc_feature: MA Experiment ID: 20001911 Result: Up-regulated in Transcription
  misc_feature: MA Experiment 20001911 PARAMETER Experiment Name: At_Drought_Reproduction_P Parameter: Age (day) Value: 40
  misc_feature: MA Experiment 20001911 PARAMETER Experiment Name: At_Drought_Reproduction_P Parameter: Organism Value: A. thaliana
  misc_feature: MA Experiment 20001911 PARAMETER Experiment Name: At_Drought_Reproduction_P Parameter: Plant Line Value: WS
  misc_feature: MA Experiment 20001911 PARAMETER Experiment Name: At_Drought_Reproduction_P Parameter: Timepoint (day) Value: 10
  misc_feature: MA Experiment 20001911 PARAMETER Experiment Name: At_Drought_Reproduction_P Parameter: Tissue Value: Flowers
  misc_feature: MA Experiment 20001911 PARAMETER Experiment Name: At_Drought_Reproduction_P Parameter: Treatment Value: Drought vs. No Drought
atggcatttcttctgagttttttgatactagcgtttcttataaccatcatcttctttttatcttcatcttcaactaaaaaagtccaagaaaacaccacatatggaccaccatcgtatccactcattggctccatactctctttcaacaaaaaccgtcatcgtcttcttcaatggtacaccgagcttctccgtctctctccgtctcaaaccatcttagttcctctcctcggcaaccgtcgcaccatcatcacaacaaacccattaaacgtcgagtacattctcaaaacaaacttctttaacttccctaaaggtaaaccttttactgatcttcttggtgatcttctcggtggaggcatattcaatgtcgacggtcactcatggagctcgcagcgcaaactcgctagccacgagttctccactcgctcgcttaggagttttgcttttgaggttcttaaagacgaagtggagaaccgtctagtcccggttttatccacggcggctgatgttggtacgaccgtggatttgcaagatgttttgaaacgttttgcttttgatgttgtttgtaaagtctcgttgggttgggatccggattgtttggatctaacccgacccgttaatccacttgtggaggcttttgacaccgctgctgagattagtgctcgccgtgccacggagcctatttacgctgtttggaaaacgaagcgtgtgttgaacgtgggaagcgagaggaagcttagggaagcgatcaggaccgtgcacgtgttggtctctgagattgtcagagctaagaagaagagtcttgagatcggaaccggagcagaagcaaagcaagatcttttgtcgaggtttctagccgccggccacaacggcgaagcagtgagggacatggttattagttttatcatggcgggaagagatacaacgtcagcagcgatgacgtggctgttttggttgttgactgagaacgatgacgtggagcggaagattttagaagaagtggacccgttggtgagtttagggttagggtttgaggatttgaaagagatggcttacacgaaggcttgtctatgtgaagccatgaggctatatcctccagtttcgtgggactctaaacatgctgcaaacgacgacgttttgcctgatgggacacgtgtcaagagaggagacaaagtgacctatttcccatacggtatggggaggatggagacgctatggggtacggattcagaagagtttaacccgaaccggtggtttgattctgaaccggggagtacacgaccggttttgaaacctattagtccctacaaatttccggtttttcaagccgggccgagggtttgtgtagggaaagagatggcatttatgcagatgaaatacgtcgttggttctgttttgagtcggtttgagattgtgccggttaacaaagaccggccggtttttgttcctcttttaacggctcatatggctggtgggcttaaggtgaagatcaagagaagaagtcacatccttaacaacgtttaa

SEQ ID NO: 91114 - protein, 506 aa, Arabidopsis thaliana
  peptide (1)..(506): Ceres Seq. ID no. 12726481
  misc_feature (35)..(494): Pfam Name: Cytochrome P450 Pfam Description: Cytochrome P450
  misc_feature (1)..(506): Homolog of NCBI NO: 15228396 NR Description: cytochrome p450, putative; protein id: At3g48520.1
  misc_feature (4)..(499): Homolog of NCBI NO: 21536522 NR Description: cytochrome P450-like protein [Arabidopsis
  misc_feature (4)..(499): Homolog of NCBI NO: 15242759 NR Description: cytochrome P450, putative; protein id: supported by cDNA: 101598. [Arabidopsis thaliana]
  misc_feature (4)..(499): Homolog of NCBI NO: 26452145 NR Description: putative cytochrome P450 [Arabidopsis thaliana]
  misc_feature (13)..(504): Homolog of NCBI NO: 18395978 NR Description: cytochrome p450, putative; protein id: [Arabidopsis thaliana] >gi|6091730|gb|AAF03442.1|AC010797_18 cytochrome P450 [Arabidopsis thaliana]
  misc_feature (1)..(499): Homolog of NCBI NO: 17366212 NR Description: Cytochrome P450 94A1 (P450-dependent fatty acid
  misc_feature (4)..(499): Homolog of NCBI NO: 18000072 NR Description: cytochrome P450-dependent fatty acid hydroxylase
  misc_feature (4)..(503): Homolog of NCBI NO: 17366433 NR Description: Cytochrome P450 94A2 (P450-dependent fatty acid
  misc_feature (1)..(501): Homolog of NCBI NO: 18000068 NR Description: cytochrome P450-dependent fatty acid hydroxylase
  misc_feature (4)..(499): Homolog of NCBI NO: 18000066 NR Description: cytochrome P450-dependent fatty acid hydroxylase
MAFLLSFLILAFLITIIFFLSSSSTKKVQENTTYGPPSYPLIGSILSFNKNRHRLLQWYTELLRLSPSQTILVPLLGNRRTIITTNPLNVEYILKTNFFNFPKGKPFTDLLGDLLGGGIFNVDGHSWSSQRKLASHEFSTRSLRSFAFEVLKDEVENRLVPVLSTAADVGTTVDLQDVLKRFAFDVVCKVSLGWDPDCLDLTRPVNPLVEAFDTAAEISARRATEPIYAVWKTKRVLNVGSERKLREAIRTVHVLVSEIVRAKKKSLEIGTGAEAKQDLLSRFLAAGHNGEAVRDMVISFIMAGRDTTSAAMTWLFWLLTENDDVERKILEEVDPLVSLGLGFEDLKEMAYTKACLCEAMRLYPPVSWDSKHAANDDVLPDGTRVKRGDKVTYFPYGMGRMETLWGTDSEEFNPNRWFDSEPGSTRPVLKPISPYKFPVFQAGPRVCVGKEMAFMQMKYVVGSVLSRFEIVPVNKDRPVFVPLLTAHMAGGLKVKIKRRSHILNNV

SEQ ID NO: 91115 - DNA, 2549 bp, Arabidopsis thaliana
  misc_feature (1)..(2549): Ceres Seq. ID no. 12726490
  misc_feature: MA Experiment ID: 20000306 Result: Down-regulated in Transcription
  misc_feature: MA Experiment 20000306 PARAMETER Experiment Name: At_Germinating_Seeds_Sub_P Parameter: Age (hr) Value: 6 vs. 0
  misc_feature: MA Experiment 20000306 PARAMETER Experiment Name: At_Germinating_Seeds_Sub_P Parameter: Organism Value: A. thaliana
  misc_feature: MA Experiment 20000306 PARAMETER Experiment Name: At_Germinating_Seeds_Sub_P Parameter: Plant Line Value: WS
  misc_feature: MA Experiment 20000306 PARAMETER Experiment Name: At_Germinating_Seeds_Sub_P Parameter: Tissue Value: Germinating Seeds
  misc_feature: MA Experiment ID: 20000307 Result: Down-regulated in Transcription
  misc_feature: MA Experiment 20000307 PARAMETER Experiment Name: At_Germinating_Seeds_Sub_P Parameter: Age (hr) Value: 24 vs. 0
  misc_feature: MA Experiment 20000307 PARAMETER Experiment Name: At_Germinating_Seeds_Sub_P Parameter: Organism Value: A. thaliana
  misc_feature: MA Experiment 20000307 PARAMETER Experiment Name: At_Germinating_Seeds_Sub_P Parameter: Plant Line Value: WS
  misc_feature: MA Experiment 20000307 PARAMETER Experiment Name: At_Germinating_Seeds_Sub_P Parameter: Tissue Value: Germinating Seeds
  misc_feature: MA Experiment ID: 20000328 Result: Down-regulated in Transcription
  misc_feature: MA Experiment 20000328 PARAMETER Experiment Name: At_42deg_Heat_Sub_P Parameter: Age (day) Value: 14
  misc_feature: MA Experiment 20000328 PARAMETER Experiment Name: At_42deg_Heat_Sub_P Parameter: Organism Value: A. thaliana
  misc_feature: MA Experiment 20000328 PARAMETER Experiment Name: At_42deg_Heat_Sub_P Parameter: Plant Line Value: WS
  misc_feature: MA Experiment 20000328 PARAMETER Experiment Name: At_42deg_Heat_Sub_P Parameter: Temperature (deg C) Value: 42 vs. 22
  misc_feature: MA Experiment 20000328 PARAMETER Experiment Name: At_42deg_Heat_Sub_P Parameter: Timepoint (hr) Value: 6
  misc_feature: MA Experiment 20000328 PARAMETER Experiment Name: At_42deg_Heat_Sub_P Parameter: Tissue Value: Aerial
agatcataaacagaaaacattaatatgagctctaattgtagttgttctcttttgagtctcttctctctccttctgatcattgatctcaccgttgctagctcttgtcctaagacatgtggaggaatcgacatcccgtacccgtttggaatcggaacgggttgctatctcgagaaatggtacgagattatttgtgtcaacaactctgttccttttctttccatcattaacagggaagttgtgagtatctctttttcggatatgtatcgccggttctttaacgtaggctacgggtcaattcgcataagaaacccaatagcttcaaagggatgctcaagtggcggacaagagtttggatcacttttaaatatgacaggttaccctttttaccttggcgacaacaatatgctcatagcggttggctgcaacaacacggcgtcgttgacaaatgtcgagccaagtattgtgggatgcgagtctacttgcagcacaaatcaagatatacctataaatgattatctcggggtactctactgtaatgctaggtatggcgattccgagtattgtaaaaatatttccattatgaatgatacaagctgcaacggtattggatgctgcaaggcaagtttgcccgctaggtatcaacagattattggtgtggaaatagatgatagtaacacagaatccaagggatgcaaagttgccttcataacagacgaggaatactttttgtcaaatggatctgacccggagaggcttcatgctaatggatatgatacggttgacctaagatggttcatccatacggcgaatcattccttcataggctctctaggatgcaaaagtatagacgagtacacaattctaagaagagacaatcgtgaatacggaataggttgcctttgcgactataactctacaactacaggctatgcaacatgttcatgcgctagtggtttcgaaggcaacccatatattcctggcgaatgcaaagatattaatgaatgcgtaagaggcattgatggaaacccagtctgtacggcaggcaagtgtgtcaatttgctgggcggttatacgtgtgagtacacaaatcatcgaccacttgttatagggcttagcactagtttcagcacattggtattcattggtggaatatactggttatacaaatttattagaagacaaaggaggttaaaccaaaagaagaaattctttaagcgtaatgggggtttattgttgcaacaacaattgactacaactgaaggcaacgtggacagtacaagagtgttcaactcaagagagttggagaaagccaccgaaaactttagcttaaccagaatactaggcgaaggaggtcaaggtacagtgtacaagggaatgcttgtagacggtagaatagtagcagtaaagaagtccaaagtcgtagacgaagacaagctagaagagttcatcaacgaagtcgtcattctctcacaaatcaaccataggaacatcgtaaaactcttggggtgttgcctagagacagatgtccctattctagtctacgaattcattcctaatggtaacctttttgagcatcttcatgatgattccgatgattatacgatgactacttgggaagtgcgtcttcgtattgctgtagatattgcaggagcgctttcatatttgcactcggctgcatcatctccaatctatcacagagacatcaagtctacaaacataatgttagatgagaaacatcgagccaaagtgtccgattttggtacttcaagaacggtgaccgtggatcatacccacctcactacagtagtttcaggcacggtgggatatatggatccagagtatttccagtcgagccaattcacagacaaaagtgatgtttatagctttggagtcgtgctagcggagctaatcactggagaaaaatcagtctcttttctgcgatctcaggaatataggacattggcaacttatttcactcttgcaatgaaagagaacagactctccgacattattgatgctcgaataagagatggttgtaagttgaatcaagtgacagcagccgcaaaaattgcaaggaaatgtttgaatatgaagggaaggaaacgaccaagtatgagacaagtatcgatggaattggagaagattcgttcatattctgaagatatgcagccgtatgagtatgctagcgaaaacgaagaagaaaaaaaagaaacattagtggacgttaacgtagagtcgagaaactacgtgagtgttaccgccgcatcatctcaatacagcattgctacaacatcttcgtcgcggtcagatgttgaaccattgtttcctcggtaatatattaaccatgcatgcaaacaaatttattactacctcatatctttgcatttacgttctgttttggtctttacgtgtgaagttatttctataaatgtcgtcactcgtcaatttgtgttattaaccatacagatctgtttgtaaccactttgtagtttgtactttgtactatacacttcccaatacataagaataatttcatagtttacttcttt

SEQ ID NO: 91116 - protein, 769 aa, Arabidopsis thaliana
  peptide (1)..(769): Ceres Seq. ID no. 12726491
  misc_feature (433)..(700): Pfam Name: Protein kinase domain Pfam Description: Protein kinase domain
  misc_feature (1)..(768): Homolog of NCBI NO: 15222427 NR Description: WAK-like kinase (WLK); protein id: At1g69730.1
  misc_feature (3)..(768): Homolog of NCBI NO: 15223546 NR Description: WAK-like kinase (WLK); protein id: At1g19390.1
  misc_feature (3)..(752): Homolog of NCBI NO: 25287654 NR Description: protein F18O14.11 [imported] - Arabidopsis >gi|8778443|gb|AAF79451.1|AC025808_33 F18O14.11 [Arabidopsis
  misc_feature (4)..(768): Homolog of NCBI NO: 22329045 NR Description: WAK-like kinase (WLK); protein id: At4g31100.1
  misc_feature (188)..(769): Homolog of NCBI NO: 15219445 NR Description: WAK-like kinase (WLK); protein id: At1g79670.1, by cDNA: gi_19310446 [Arabidopsis thaliana]
  misc_feature (24)..(153): Homolog of NCBI NO: 15219445 NR Description: WAK-like kinase (WLK); protein id: At1g79670.1, by cDNA: gi_19310446 [Arabidopsis thaliana]
  misc_feature (178)..(735): Homolog of NCBI NO: 15219132 NR Description: WAK-like kinase (WLK); protein id: At1g16120.1
  misc_feature (24)..(200): Homolog of NCBI NO: 15219132 NR Description: WAK-like kinase (WLK); protein id: At1g16120.1
  misc_feature (62)..(728): Homolog of NCBI NO: 15220882 NR Description: WAK-like kinase (WLK); protein id: At1g17910.1
  misc_feature (197)..(769): Homolog of NCBI NO: 30699443 NR Description: WAK-like kinase (WLK) [Arabidopsis thaliana]
MSSNCSCSLLSLFSLLLIIDLTVASSCPKTCGGIDIPYPFGIGTGCYLEKWYEIICVNNSVPFLSIINREVVSISFSDMYRRFFNVGYGSIRIRNPIASKGCSSGGQEFGSLLNMTGYPFYLGDNNMLIAVGCNNTASLTNVEPSIVGCESTCSTNQDIPINDYLGVLYCNARYGDSEYCKNISIMNDTSCNGIGCCKASLPARYQQIIGVEIDDSNTESKGCKVAFITDEEYFLSNGSDPERLHANGYDTVDLRWFIHTANHSFIGSLGCKSIDEYTILRRDNREYGIGCLCDYNSTTTGYATCSCASGFEGNPYIPGECKDINECVRGIDGNPVCTAGKCVNLLGGYTCEYTNHRPLVIGLSTSFSTLVFIGGIYWLYKFIRRQRRLNQKKKFFKRNGGLLLQQQLTTTEGNVDSTRVFNSRELEKATENFSLTRILGEGGQGTVYKGMLVDGRIVAVKKSKVVDEDKLEEFINEVVILSQINHRNIVKLLGCCLETDVPILVYEFIPNGNLFEHLHDDSDDYTMTTWEVRLRIAVDIAGALSYLHSAASSPIYHRDIKSTNIMLDEKHRAKVSDFGTSRTVTVDHTHLTTVVSGTVGYMDPEYFQSSQFTDKSDVYSFGVVLAELITGEKSVSFLRSQEYRTLATYFTLAMKENRLSDIIDARIRDGCKLNQVTAAAKIARKCLNMKGRKRPSMRQVSMELEKIRSYSEDMQPYEYASENEEEKKETLVDVNVESRNYVSVTAASSQYSIATTSSSRSDVEPLFPR

SEQ ID NO: 91117 - protein, 691 aa, Arabidopsis thaliana
  peptide (1)..(691): Ceres Seq. ID no. 12726492
  misc_feature (355)..(622): Pfam Name: Protein kinase domain Pfam Description: Protein kinase domain
  misc_feature (1)..(690): Homolog of NCBI NO: 15222427 NR Description: WAK-like kinase (WLK); protein id: At1g69730.1
  misc_feature (1)..(690): Homolog of NCBI NO: 15223546 NR Description: WAK-like kinase (WLK); protein id: At1g19390.1
  misc_feature (1)..(674): Homolog of NCBI NO: 25287654 NR Description: protein F18O14.11 [imported] - Arabidopsis >gi|8778443|gb|AAF79451.1|AC025808_33 F18O14.11 [Arabidopsis
  misc_feature (1)..(690): Homolog of NCBI NO: 22329045 NR Description: WAK-like kinase (WLK); protein id: At4g31100.1
  misc_feature (110)..(691): Homolog of NCBI NO: 15219445 NR Description: WAK-like kinase (WLK); protein id: At1g79670.1, by cDNA: gi_19310446 [Arabidopsis thaliana]
  misc_feature (1)..(75): Homolog of NCBI NO: 15219445 NR Description: WAK-like kinase (WLK); protein id: At1g79670.1, by cDNA: gi_19310446 [Arabidopsis thaliana]
  misc_feature (100)..(657): Homolog of NCBI NO: 15219132 NR Description: WAK-like kinase (WLK); protein id: At1g16120.1
  misc_feature (1)..(122): Homolog of NCBI NO: 15219132 NR Description: WAK-like kinase (WLK); protein id: At1g16120.1
  misc_feature (1)..(650): Homolog of NCBI NO: 15220882 NR Description: WAK-like kinase (WLK); protein id: At1g17910.1
  misc_feature (119)..(691): Homolog of NCBI NO: 30699443 NR Description: WAK-like kinase (WLK) [Arabidopsis thaliana]
MYRRFFNVGYGSIRIRNPIASKGCSSGGQEFGSLLNMTGYPFYLGDNNMLIAVGCNNTASLTNVEPSIVGCESTCSTNQDIPINDYLGVLYCNARYGDSEYCKNISIMNDTSCNGIGCCKASLPARYQQIIGVEIDDSNTESKGCKVAFITDEEYFLSNGSDPERLHANGYDTVDLRWFIHTANHSFIGSLGCKSIDEYTILRRDNREYGIGCLCDYNSTTTGYATCSCASGFEGNPYIPGECKDINECVRGIDGNPVCTAGKCVNLLGGYTCEYTNHRPLVIGLSTSFSTLVFIGGIYWLYKFIRRQRRLNQKKKFFKRNGGLLLQQQLTTTEGNVDSTRVFNSRELEKATENFSLTRILGEGGQGTVYKGMLVDGRIVAVKKSKVVDEDKLEEFINEVVILSQINHRNIVKLLGCCLETDVPILVYEFIPNGNLFEHLHDDSDDYTMTTWEVRLRIAVDIAGALSYLHSAASSPIYHRDIKSTNIMLDEKHRAKVSDFGTSRTVTVDHTHLTTVVSGTVGYMDPEYFQSSQFTDKSDVYSFGVVLAELITGEKSVSFLRSQEYRTLATYFTLAMKENRLSDIIDARIRDGCKLNQVTAAAKIARKCLNMKGRKRPSMRQVSMELEKIRSYSEDMQPYEYASENEEEKKETLVDVNVESRNYVSVTAASSQYSIATTSSSRSDVEPLFPR

SEQ ID NO: 91118 - protein, 655 aa, Arabidopsis thaliana
  peptide (1)..(655): Ceres Seq. ID no. 12726493
  misc_feature (319)..(586): Pfam Name: Protein kinase domain Pfam Description: Protein kinase domain
  misc_feature (1)..(654): Homolog of NCBI NO: 15222427 NR Description: WAK-like kinase (WLK); protein id: At1g69730.1
  misc_feature (1)..(654): Homolog of NCBI NO: 15223546 NR Description: WAK-like kinase (WLK); protein id: At1g19390.1
  misc_feature (1)..(638): Homolog of NCBI NO: 25287654 NR Description: protein F18O14.11 [imported] - Arabidopsis >gi|8778443|gb|AAF79451.1|AC025808_33 F18O14.11 [Arabidopsis
  misc_feature (1)..(654): Homolog of NCBI NO: 22329045 NR Description: WAK-like kinase (WLK); protein id: At4g31100.1
  misc_feature (74)..(655): Homolog of NCBI NO: 15219445 NR Description: WAK-like kinase (WLK); protein id: At1g79670.1, by cDNA: gi_19310446 [Arabidopsis thaliana]
  misc_feature (1)..(39): Homolog of NCBI NO: 15219445 NR Description: WAK-like kinase (WLK); protein id: At1g79670.1, by cDNA: gi_19310446 [Arabidopsis thaliana]
  misc_feature (64)..(621): Homolog of NCBI NO: 15219132 NR Description: WAK-like kinase (WLK); protein id: At1g16120.1
  misc_feature (1)..(86): Homolog of NCBI NO: 15219132 NR Description: WAK-like kinase (WLK); protein id: At1g16120.1
  misc_feature (1)..(614): Homolog of NCBI NO: 15220882 NR Description: WAK-like kinase (WLK); protein id: At1g17910.1
  misc_feature (83)..(655): Homolog of NCBI NO: 30699443 NR Description: WAK-like kinase (WLK) [Arabidopsis thaliana]
MTGYPFYLGDNNMLIAVGCNNTASLTNVEPSIVGCESTCSTNQDIPINDYLGVLYCNARYGDSEYCKNISIMNDTSCNGIGCCKASLPARYQQIIGVEIDDSNTESKGCKVAFITDEEYFLSNGSDPERLHANGYDTVDLRWFIHTANHSFIGSLGCKSIDEYTILRRDNREYGIGCLCDYNSTTTGYATCSCASGFEGNPYIPGECKDINECVRGIDGNPVCTAGKCVNLLGGYTCEYTNHRPLVIGLSTSFSTLVFIGGIYWLYKFIRRQRRLNQKKKFFKRNGGLLLQQQLTTTEGNVDSTRVFNSRELEKATENFSLTRILGEGGQGTVYKGMLVDGRIVAVKKSKVVDEDKLEEFINEVVILSQINHRNIVKLLGCCLETDVPILVYEFIPNGNLFEHLHDDSDDYTMTTWEVRLRIAVDIAGALSYLHSAASSPIYHRDIKSTNIMLDEKHRAKVSDFGTSRTVTVDHTHLTTVVSGTVGYMDPEYFQSSQFTDKSDVYSFGVVLAELITGEKSVSFLRSQEYRTLATYFTLAMKENRLSDIIDARIRDGCKLNQVTAAAKIARKCLNMKGRKRPSMRQVSMELEKIRSYSEDMQPYEYASENEEEKKETLVDVNVESRNYVSVTAASSQYSIATTSSSRSDVEPLFPR

SEQ ID NO: 91119 - DNA, 1988 bp, Arabidopsis thaliana
  misc_feature (1)..(1988): Ceres Seq. ID no. 12726505
  misc_feature: MA Experiment ID: 20000171 Result: Up-regulated in Transcription
  misc_feature: MA Experiment 20000171 PARAMETER Experiment Name: At_42deg_Heat_P Parameter: Age (day) Value: 14
  misc_feature: MA Experiment 20000171 PARAMETER Experiment Name: At_42deg_Heat_P Parameter: Organism Value: A. thaliana
  misc_feature: MA Experiment 20000171 PARAMETER Experiment Name: At_42deg_Heat_P Parameter: Plant Line Value: WS
  misc_feature: MA Experiment 20000171 PARAMETER Experiment Name: At_42deg_Heat_P Parameter: Temperature (deg C) Value: 42 vs. 22
  misc_feature: MA Experiment 20000171 PARAMETER Experiment Name: At_42deg_Heat_P Parameter: Timepoint (hr) Value: 1
  misc_feature: MA Experiment 20000171 PARAMETER Experiment Name: At_42deg_Heat_P Parameter: Tissue Value: Aerial
  misc_feature: MA Experiment ID: 20000234 Result: Up-regulated in Transcription
  misc_feature: MA Experiment 20000234 PARAMETER Experiment Name: At_Siliques_P Parameter: Age (day) Value: 21
  misc_feature: MA Experiment 20000234 PARAMETER Experiment Name: At_Siliques_P Parameter: Organism Value: A. thaliana
  misc_feature: MA Experiment 20000234 PARAMETER Experiment Name: At_Siliques_P Parameter: Plant Line Value: WS
  misc_feature: MA Experiment 20000234 PARAMETER Experiment Name: At_Siliques_P Parameter: Tissue Value: Less Than 5mm Siliques vs. Whole Plant
  misc_feature: MA Experiment ID: 20000235 Result: Up-regulated in Transcription
  misc_feature: MA Experiment 20000235 PARAMETER Experiment Name: At_Siliques_P Parameter: Age (day) Value: 21
  misc_feature: MA Experiment 20000235 PARAMETER Experiment Name: At_Siliques_P Parameter: Organism Value: A. thaliana
  misc_feature: MA Experiment 20000235 PARAMETER Experiment Name: At_Siliques_P Parameter: Plant Line Value: WS
  misc_feature: MA Experiment 20000235 PARAMETER Experiment Name: At_Siliques_P Parameter: Tissue Value: 5-10mm Siliques vs. Whole Plant
  misc_feature: MA Experiment ID: 20000264 Result: Up-regulated in Transcription
  misc_feature: MA Experiment 20000264 PARAMETER Experiment Name: At_Open_Flower_P Parameter: Age (day) Value: 21
  misc_feature: MA Experiment 20000264 PARAMETER Experiment Name: At_Open_Flower_P Parameter: Plant Line Value: WS
  misc_feature: MA Experiment 20000264 PARAMETER Experiment Name: At_Open_Flower_P Parameter: Tissue Value: Open Flower vs. Whole Plant
  misc_feature: MA Experiment ID: 20000265 Result: Up-regulated in Transcription
  misc_feature: MA Experiment 20000265 PARAMETER Experiment Name: At_Open_Flower_P Parameter: Age (day) Value: 21
  misc_feature: MA Experiment 20000265 PARAMETER Experiment Name: At_Open_Flower_P Parameter: Plant Line Value: WS
  misc_feature: MA Experiment 20000265 PARAMETER Experiment Name: At_Open_Flower_P Parameter: Tissue Value: Closed Flower vs. Whole Plant
  misc_feature: MA Experiment ID: 20000286 Result: Up-regulated in Transcription
  misc_feature: MA Experiment 20000286 PARAMETER Experiment Name: At_Open_Flower_P Parameter: Age (day) Value: 21
  misc_feature: MA Experiment 20000286 PARAMETER Experiment Name: At_Open_Flower_P Parameter: Plant Line Value: WS
  misc_feature: MA Experiment 20000286 PARAMETER Experiment Name: At_Open_Flower_P Parameter: Tissue Value: Half Open vs. Whole Plant
  misc_feature: MA Experiment ID: 20000495 Result: Up-regulated in Transcription
  misc_feature: MA Experiment 20000495 PARAMETER Experiment Name: At_Guard_Cells_P Parameter: Harvest Date Value: 8/2/2002
  misc_feature: MA Experiment 20000495 PARAMETER Experiment Name: At_Guard_Cells_P Parameter: Organism Value: A. thaliana
  misc_feature: MA Experiment 20000495 PARAMETER Experiment Name: At_Guard_Cells_P Parameter: Tissue Value: Guard Cells vs. Leaves
  misc_feature: MA Experiment ID: 20001560 Result: Up-regulated in Transcription
  misc_feature: MA Experiment 20001560 PARAMETER Experiment Name: At_Drought_Soil_Dry_P Parameter: Age (day) Value: 28
  misc_feature: MA Experiment 20001560 PARAMETER Experiment Name: At_Drought_Soil_Dry_P Parameter: Organism Value: A. thaliana
  misc_feature: MA Experiment 20001560 PARAMETER Experiment Name: At_Drought_Soil_Dry_P Parameter: Plant Line Value: WS
  misc_feature: MA Experiment 20001560 PARAMETER Experiment Name: At_Drought_Soil_Dry_P Parameter: Post Timepoint (hr) Value: None
  misc_feature: MA Experiment 20001560 PARAMETER Experiment Name: At_Drought_Soil_Dry_P Parameter: Post-Treatment Value: None
  misc_feature: MA Experiment 20001560 PARAMETER Experiment Name: At_Drought_Soil_Dry_P Parameter: Timepoint (day) Value: 14
  misc_feature: MA Experiment 20001560 PARAMETER Experiment Name: At_Drought_Soil_Dry_P Parameter: Treatment Value: Drought vs. No Drought
gtcgtcgctcctctgtaaaagtttcttctattcgacgattcctctcgacgttatcatatttcctctccaggagcgtgtttccagaggggatggattctgttcgacgcacttacaccattatgcgaggtcgtcacatagacaagcgtgttccttctaaagagtttctctctgctttggataaagctgaaactgcaggttttttgtacccaccctcataatagtcatgattttactctattgcctactttttggtgcacacggacagtgttatatattttaaagaccacttctgatctttttattgtatttgctcatcaactctatattgcttgtttgtgttttagacatagcattgtacctagatataccacttttttcttgttgcctcaatatcttgaaacttcttctgcatagactgactcttgacttttctcaactccagtacgtcttcctactgggacgggaaaagactgcgggaatccttcctggaagcgatctctgcctcacgtgctcgttgcttctctgacttcgcttttattcggctatcatctcggggttgttaatgaaactctcgaaagcatatcaattgaccttggctttagtgggaacaccatagctgaaggtcttgtggttagcacctgcttaggcggcgcctttattgggtctctgttcagtgggttggtagctgatggtgttgggcgccgtagagctttccagttgagcgctttaccaatgattgttggagcttctgtgagtgcatcaactgagagtcttatgggcatgctcctgggaaggtttttggtcggaattgggatgggcataggtccttctgttacagctctctatgtcactgaggtgtcacctgcttatgtgagaggtacatatgggagttctacccaaatcgcaacatgtattggactcttaggttcgctgtttgctggaatcccggcaaaagataacttgggctggtggcgcatatgtttttggatatccacagtcccagctgcaatgcttgctgtcttcatggaactctgcgtggaaagtcctcagtggctttttaagaggggaagggcagctgaagctgaagctgtgtttgagaagctattgggagggtcgtacgtcaaagctgctatggcagagttagtgaagtcggataggggagatgacgccgattcagccaaattgtcggagttgctttttggacgcagttttagagtggttttcattggatctaccctttttgctttacaacagttgtctgggataaatgctgtgttctatttctcatcaactgtcttcaagaaagctggtgtaccttcagcctctgcaaacatatgtgtaggagtttgcaacctcttaggatcaactgttgctgtggttttgatggataagctggggagaaaagtgttgcttattgggagttttgcgggcatggcagtatcgctgggtctccaagcaatagcatatacttcgcttccttcgccctttggaaccttgtttctctcggttggaggaatgctgctgtttgtgttgtcgtttgcaactggagcgggtcctgttccaagtcttctcctgtctgagatatgccctggtcgacttcgagcaactgcgttggctgtttgtcttgccgttcactgggttataaacttctttgtcgggctgctgtttctgagaatgctggagcaactaggttcggtgcttctaaatgcaatatttgggttcttctgtgtggtggcagtcatctttgtgcagaagaacgtggttgagactaaaggaaagagcctacaagagatagaaatcagtctgctctcttccacccagtgattgatctctttattctgagaattcgtattattcttctggctctctttttttccttggagagacacaagtaacgtgtacctaatatggaagtaggagtgagtagtaagtaggtaaacaacatgtaaggaaatggatattattcattcgagtatagccaacgtttc

SEQ ID NO: 91120 - protein, 363 aa, Arabidopsis thaliana; identical to SEQ ID NO: 88973
  peptide (1)..(363): Ceres Seq. ID no. 12726506
  misc_feature (1)..(358): Pfam Name: Sugar (and other) transporter Pfam Description: Sugar (and other) transporter
  misc_feature (1)..(363): Homolog of NCBI NO: 30699453 NR Description: hexose transporter, putative [Arabidopsis >gi|30699455|ref|NP_178100.3| hexose transporter, putative
  misc_feature (1)..(363): Homolog of NCBI NO: 25308946 NR Description: probable sugar transporter, 77409-81599 - Arabidopsis thaliana >gi|12324590|gb|AAG52251.1|AC011717_19
  misc_feature (1)..(363): Homolog of NCBI NO: 7715596 NR Description: F20B17.24 [Arabidopsis thaliana]
  misc_feature (1)..(363): Homolog of NCBI NO: 19347894 NR Description: putative hexose transporter protein [Arabidopsis
  misc_feature (1)..(164): Homolog of NCBI NO: 30793849 NR Description: putative hexose transporter protein [Arabidopsis >gi|30794114|gb|AAP40499.1| putative hexose transporter protein
  misc_feature (1)..(359): Homolog of NCBI NO: 27261731 NR Description: sugar transporter [Citrus unshiu]
  misc_feature (1)..(360): Homolog of NCBI NO: 15220399 NR Description: integral membrane protein, putative; protein id:
  misc_feature (1)..(358): Homolog of NCBI NO: 8347246 NR Description: hexose transporter [Solanum tuberosum]
  misc_feature (1)..(358): Homolog of NCBI NO: 9858106 NR Description: putative glucose translocator [Mesembryanthemum
  misc_feature (1)..(360): Homolog of NCBI NO: 18417892 NR Description: sugar transporter-like protein; protein id: supported by cDNA: gi_16648752, supported by cDNA: gi_20259505 thaliana] >gi|16648753|gb|AAL25568.1| AT5g16150/T21H19_70

SEQ ID NO: 91121 - protein, 349 aa, Arabidopsis thaliana; identical to SEQ ID NO: 88974
  peptide (1)..(349): Ceres Seq. ID no. 12726507
  misc_feature (1)..(344): Pfam Name: Sugar (and other) transporter Pfam Description: Sugar (and other) transporter
  misc_feature (1)..(349): Homolog of NCBI NO: 30699453 NR Description: hexose transporter, putative [Arabidopsis >gi|30699455|ref|NP_178100.3| hexose transporter, putative
  misc_feature (1)..(349): Homolog of NCBI NO: 25308946 NR Description: probable sugar transporter, 77409-81599 - Arabidopsis thaliana >gi|12324590|gb|AAG52251.1|AC011717_19
  misc_feature (1)..(349): Homolog of NCBI NO: 7715596 NR Description: F20B17.24 [Arabidopsis thaliana]
  misc_feature (1)..(349): Homolog of NCBI NO: 19347894 NR Description: putative hexose transporter protein [Arabidopsis
  misc_feature (1)..(150): Homolog of NCBI NO: 30793849 NR Description: putative hexose transporter protein [Arabidopsis >gi|30794114|gb|AAP40499.1| putative hexose transporter protein
  misc_feature (1)..(345): Homolog of NCBI NO: 27261731 NR Description: sugar transporter [Citrus unshiu]
  misc_feature (1)..(346): Homolog of NCBI NO: 15220399 NR Description: integral membrane protein, putative; protein id:
  misc_feature (1)..(344): Homolog of NCBI NO: 8347246 NR Description: hexose transporter [Solanum tuberosum]
  misc_feature (1)..(344): Homolog of NCBI NO: 9858106 NR Description: putative glucose translocator [Mesembryanthemum
  misc_feature (1)..(346): Homolog of NCBI NO: 18417892 NR Description: sugar transporter-like protein; protein id: supported by cDNA: gi_16648752, supported by cDNA: gi_20259505 thaliana] >gi|16648753|gb|AAL25568.1| AT5g16150/T21H19_70

SEQ ID NO: 91122 - protein, 347 aa, Arabidopsis thaliana
  peptide (1)..(347): Ceres Seq. ID no. 12726508
  misc_feature (1)..(342): Pfam Name: Sugar (and other) transporter Pfam Description: Sugar (and other) transporter
  misc_feature (1)..(347): Homolog of NCBI NO: 30699453 NR Description: hexose transporter, putative [Arabidopsis >gi|30699455|ref|NP_178100.3| hexose transporter, putative
  misc_feature (1)..(347): Homolog of NCBI NO: 25308946 NR Description: probable sugar transporter, 77409-81599 - Arabidopsis thaliana >gi|12324590|gb|AAG52251.1|AC011717_19
  misc_feature (1)..(347): Homolog of NCBI NO: 7715596 NR Description: F20B17.24 [Arabidopsis thaliana]
  misc_feature (1)..(347): Homolog of NCBI NO: 19347894 NR Description: putative hexose transporter protein [Arabidopsis
  misc_feature (1)..(148): Homolog of NCBI NO: 30793849 NR Description: putative hexose transporter protein [Arabidopsis >gi|30794114|gb|AAP40499.1| putative hexose transporter protein
  misc_feature (1)..(343): Homolog of NCBI NO: 27261731 NR Description: sugar transporter [Citrus unshiu]
  misc_feature (1)..(344): Homolog of NCBI NO: 15220399 NR Description: integral membrane protein, putative; protein id:
  misc_feature (1)..(342): Homolog of NCBI NO: 8347246 NR Description: hexose transporter [Solanum tuberosum]
  misc_feature (1)..(342): Homolog of NCBI NO: 9858106 NR Description: putative glucose translocator [Mesembryanthemum
  misc_feature (1)..(344): Homolog of NCBI NO: 18417892 NR Description: sugar transporter-like protein; protein id: supported by cDNA: gi_16648752, supported by cDNA: gi_20259505 thaliana] >gi|16648753|gb|AAL25568.1| AT5g16150/T21H19_70
MLLGRFLVGIGMGIGPSVTALYVTEVSPAYVRGTYGSSTQIATCIGLLGSLFAGIPAKDNLGWWRICFWISTVPAAMLAVFMELCVESPQWLFKRGRAAEAEAVFEKLLGGSYVKAAMAELVKSDRGDDADSAKLSELLFGRSFRVVFIGSTLFALQQLSGINAVFYFSSTVFKKAGVPSASANICVGVCNLLGSTVAVVLMDKLGRKVLLIGSFAGMAVSLGLQAIAYTSLPSPFGTLFLSVGGMLLFVLSFATGAGPVPSLLLSEICPGRLRATALAVCLAVHWVINFFVGLLFLRMLEQLGSVLLNAIFGFFCVVAVIFVQKNVVETKGKSLQEIEISLLSSTQ

SEQ ID NO: 91123 - DNA, 1920 bp, Arabidopsis thaliana
  misc_feature (1)..(1920): Ceres Seq. ID no. 12726542
  misc_feature: MA Experiment ID: 20000438 Result: Up-regulated in Transcription
  misc_feature: MA Experiment 20000438 PARAMETER Experiment Name: At_Shoots__P Parameter: Age (day) Value: 14
  misc_feature: MA Experiment 20000438 PARAMETER Experiment Name: At_Shoots__P Parameter: Tissue Value: Shoots vs. Whole Plant
  misc_feature: MA Experiment ID: 20000527 Result: Up-regulated in Transcription
  misc_feature: MA Experiment 20000527 PARAMETER Experiment Name: At_10percent_PEG_P Parameter: Age (day) Value: 20
  misc_feature: MA Experiment 20000527 PARAMETER Experiment Name: At_10percent_PEG_P Parameter: Organism Value: A. thaliana
  misc_feature: MA Experiment 20000527 PARAMETER Experiment Name: At_10percent_PEG_P Parameter: Plant Line Value: WS
  misc_feature: MA Experiment 20000527 PARAMETER Experiment Name: At_10percent_PEG_P Parameter: Timepoint (day) Value: 20
  misc_feature: MA Experiment 20000527 PARAMETER Experiment Name: At_10percent_PEG_P Parameter: Tissue Value: Whole Plant
  misc_feature: MA Experiment 20000527 PARAMETER Experiment Name: At_10percent_PEG_P Parameter: Treatment Value: 10percent PEG vs. No Treatment
  misc_feature: MA Experiment ID: 20001248 Result: Down-regulated in Transcription
  misc_feature: MA Experiment 20001248 PARAMETER Experiment Name: At_Far-red-induction_P Parameter: Age (day) Value: 7
  misc_feature: MA Experiment 20001248 PARAMETER Experiment Name: At_Far-red-induction_P Parameter: Light Value: Far-red vs. White
  misc_feature: MA Experiment 20001248 PARAMETER Experiment Name: At_Far-red-induction_P Parameter: Organism Value: A. thaliana
  misc_feature: MA Experiment 20001248 PARAMETER Experiment Name: At_Far-red-induction_P Parameter: Plant Line Value: Columbia
  misc_feature: MA Experiment 20001248 PARAMETER Experiment Name: At_Far-red-induction_P Parameter: Timepoint (hr) Value: 4
  misc_feature: MA Experiment 20001248 PARAMETER Experiment Name: At_Far-red-induction_P Parameter: Tissue Value: Whole Plant
aacaatgcccgttgccaagcttctccgcgtcctcttggtagcttgagaagctcgtttgattccattttgtctctaatggctgccctcgcttctccctccctcatcccctcttctctctgcttcgctgccgccgccgatggtccccgttccctctcttctaatttctctgccttttccgacggcggttccaatttcaggtatcacaagagcttcttgtcgctttcatcttcgtcttcttcgtctacgccttatcgaaatcgacggggccgttccctcgtcgtatttgctacttccggagactactacgccactctcggtgtctctaaatctgccaataacaaggagattaaagctgcttatcgacggctcgctcgtcagtatcatcccgatgtgaacaaggaacccggagcaactgaaaaattcaaggaaatcagtgctgcctatgaggtgctatcagacgagcaaaagagagcattatatgatcaatatggtgaagccggtgtcaagagtacagtaggaggagcttctggtccttacacgtcaaatccctttgaccttttcgagacattctttggtgcaagtatgggtggatttcccgggatggaccaagctgattttgggagaacccgccgcagtagggttaccaaaggtgaagatttacggtatgacatcaccttagaactttcggaggctatttttggatctgagaaagaatttgatcttacgcatctggagacatgtgaagcttgtgctggcaccggggcaaaagcaggatccaagatgagaatatgctccacttgtggtgggcggggtcaagttatgagaactgagcaaacaccatttggcatgttttcacaggtttctatatgtccaaactgtggtggagatggtgaggtgatttctgaaaattgccggaaatgttctggagaagggcgtgtgcgtataaaaaaaagcatcaaagtcaaaattcccccgggagttagtgcaggtagcatccttagagtcgccggagaaggtgattctggtcccagaggtggccctccaggagatttgtatgtatatcttgatgttgaagatgtccggggaattgaaagagatggcataaacctattatctaccctttcgatcagttaccttgatgctatactgggtgctgttgttaaggtgaaaacagttgaaggagacactgaactgcagatacctccaggtacacaacctggtgatgtgctagtcctggcaaagaaaggagtaccgaaactgaatagaccgtctatccgcggtgaccacttgtttacagtcaaagtttctgtaccaaatcaaataagtgctggagaacgggagttgctggaggaacttgcatctctgaaggacacgtccagcaaccgctcacgaactcgtgctaagcctcagcaacccagtactctgagcactgcacccagtggctcagaaaacaagaaagatgaagttaaggaggaaaatgaagaaccggagcaagaaaactacttgtggaataacatcaaagaatttgcagggtctgtcgcaaatggagctctaaaatggctgagagataacctctagagatccatcttcaactaacaggtcttgcattaaagctttttatccgcagaattcatgtttcaatttgatgcacagattgtgagaagagggcggttctcctctacctgcccctagttctaaaaatagtagtagagagatacaaccggtttatcgagttggttttggtaaaaaaagaagtgagagaattgaagggtttcttactaaaccgctccatttaatttggttggtcattggtgtttgatggagtcgtcttgaggaaatggttgcatgtgttgatggaacatgttacgtggatgataaaaaaagaaaagtatccaagagaaggcttatttttttgtgtac

SEQ ID NO: 91124 - protein, 525 aa, Arabidopsis thaliana
  peptide (1)..(525): Ceres Seq. ID no. 12726543
  misc_feature (331)..(453): Pfam Name: DnaJ C terminal region Pfam Description: DnaJ C terminal region
  misc_feature (26)..(525): Homolog of NCBI NO: 18412605 NR Description: DnaJ protein, putative; protein id: At1g80030.1,
  misc_feature (26)..(525): Homolog of NCBI NO: 14326568 NR Description: At1g80030/F18B13_37 [Arabidopsis thaliana]
  misc_feature (26)..(511): Homolog of NCBI NO: 25296044 NR Description: hypothetical protein F18B13.12 [imported] - thaliana >gi|5902381|gb|AAD55483.1|AC009322_23 Similar to DNAJ
  misc_feature (52)..(525): Homolog of NCBI NO: 7441921 NR Description: heat shock protein dnaJ - garden pea
  misc_feature (32)..(454): Homolog of NCBI NO: 16326131 NR Description: DNAJ homologue [Oryza sativa]
  misc_feature (90)..(465): Homolog of NCBI NO: 9294487 NR Description: DnaJ homolog [Arabidopsis thaliana]
  misc_feature (90)..(496): Homolog of NCBI NO: 15229531 NR Description: DnaJ, putative; protein id: At3g17830.1
  misc_feature (99)..(462): Homolog of NCBI NO: 16332061 NR Description: DnaJ protein [Synechocystis sp. PCC 6803]
  misc_feature (96)..(456): Homolog of NCBI NO: 22298332 NR Description: heat shock protein [Thermosynechococcus elongatus >gi|22294511|dbj|BAC08341.1| heat shock protein
  misc_feature (52)..(466): Homolog of NCBI NO: 18399949 NR Description: putative DnaJ protein; protein id: At2g22360.1, by cDNA: 10312. [Arabidopsis thaliana]
NNARCQASPRPLGSLRSSFDSILSLMAALASPSLIPSSLCFAAAADGPRSLSSNFSAFSDGGSNFRYHKSFLSLSSSSSSSTPYRNRRGRSLVVFATSGDYYATLGVSKSANNKEIKAAYRRLARQYHPDVNKEPGATEKFKEISAAYEVLSDEQKRALYDQYGEAGVKSTVGGASGPYTSNPFDLFETFFGASMGGFPGMDQADFGRTRRSRVTKGEDLRYDITLELSEAIFGSEKEFDLTHLETCEACAGTGAKAGSKMRICSTCGGRGQVMRTEQTPFGMFSQVSICPNCGGDGEVISENCRKCSGEGRVRIKKSIKVKIPPGVSAGSILRVAGEGDSGPRGGPPGDLYVYLDVEDVRGIERDGINLLSTLSISYLDAILGAVVKVKTVEGDTELQIPPGTQPGDVLVLAKKGVPKLNRPSIRGDHLFTVKVSVPNQISAGERELLEELASLKDTSSNRSRTRAKPQQPSTLSTAPSGSENKKDEVKEENEEPEQENYLWNNIKEFAGSVANGALKWLRDNL

SEQ ID NO: 91125 - protein, 500 aa, Arabidopsis thaliana
  peptide (1)..(500): Ceres Seq. ID no. 12726544
  misc_feature (306)..(428): Pfam Name: DnaJ C terminal region Pfam Description: DnaJ C terminal region
  misc_feature (1)..(500): Homolog of NCBI NO: 18412605 NR Description: DnaJ protein, putative; protein id: At1g80030.1,
  misc_feature (1)..(500): Homolog of NCBI NO: 14326568 NR Description: At1g80030/F18B13_37 [Arabidopsis thaliana]
  misc_feature (1)..(486): Homolog of NCBI NO: 25296044 NR Description: hypothetical protein F18B13.12 [imported] - thaliana >gi|5902381|gb|AAD55483.1|AC009322_23 Similar to DNAJ
  misc_feature (27)..(500): Homolog of NCBI NO: 7441921 NR Description: heat shock protein dnaJ - garden pea
  misc_feature (7)..(429): Homolog of NCBI NO: 16326131 NR Description: DNAJ homologue [Oryza sativa]
  misc_feature (65)..(440): Homolog of NCBI NO: 9294487 NR Description: DnaJ homolog [Arabidopsis thaliana]
  misc_feature (65)..(471): Homolog of NCBI NO: 15229531 NR Description: DnaJ, putative; protein id: At3g17830.1
  misc_feature (74)..(437): Homolog of NCBI NO: 16332061 NR Description: DnaJ protein [Synechocystis sp. PCC 6803]
  misc_feature (71)..(431): Homolog of NCBI NO: 22298332 NR Description: heat shock protein [Thermosynechococcus elongatus >gi|22294511|dbj|BAC08341.1| heat shock protein
  misc_feature (27)..(441): Homolog of NCBI NO: 18399949 NR Description: putative DnaJ protein; protein id: At2g22360.1, by cDNA: 10312. [Arabidopsis thaliana]
MAALASPSLIPSSLCFAAAADGPRSLSSNFSAFSDGGSNFRYHKSFLSLSSSSSSSTPYRNRRGRSLVVFATSGDYYATLGVSKSANNKEIKAAYRRLARQYHPDVNKEPGATEKFKEISAAYEVLSDEQKRALYDQYGEAGVKSTVGGASGPYTSNPFDLFETFFGASMGGFPGMDQADFGRTRRSRVTKGEDLRYDITLELSEAIFGSEKEFDLTHLETCEACAGTGAKAGSKMRICSTCGGRGQVMRTEQTPFGMFSQVSICPNCGGDGEVISENCRKCSGEGRVRIKKSIKVKIPPGVSAGSILRVAGEGDSGPRGGPPGDLYVYLDVEDVRGIERDGINLLSTLSISYLDAILGAVVKVKTVEGDTELQIPPGTQPGDVLVLAKKGVPKLNRPSIRGDHLFTVKVSVPNQISAGERELLEELASLKDTSSNRSRTRAKPQQPSTLSTAPSGSENKKDEVKEENEEPEQENYLWNNIKEFAGSVANGALKWLRDNL

SEQ ID NO: 91126 - protein, 331 aa, Arabidopsis thaliana
  peptide (1)..(331): Ceres Seq. ID no. 12726545
  misc_feature (137)..(259): Pfam Name: DnaJ C terminal region Pfam Description: DnaJ C terminal region
  misc_feature (1)..(331): Homolog of NCBI NO: 18412605 NR Description: DnaJ protein, putative; protein id: At1g80030.1,
  misc_feature (1)..(331): Homolog of NCBI NO: 14326568 NR Description: At1g80030/F18B13_37 [Arabidopsis thaliana]
  misc_feature (1)..(317): Homolog of NCBI NO: 25296044 NR Description: hypothetical protein F18B13.12 [imported] - thaliana >gi|5902381|gb|AAD55483.1|AC009322_23 Similar to DNAJ
  misc_feature (1)..(331): Homolog of NCBI NO: 7441921 NR Description: heat shock protein dnaJ - garden pea
  misc_feature (1)..(260): Homolog of NCBI NO: 16326131 NR Description: DNAJ homologue [Oryza sativa]
  misc_feature (1)..(271): Homolog of NCBI NO: 9294487 NR Description: DnaJ homolog [Arabidopsis thaliana]
  misc_feature (1)..(302): Homolog of NCBI NO: 15229531 NR Description: DnaJ, putative; protein id: At3g17830.1
  misc_feature (1)..(268): Homolog of NCBI NO: 16332061 NR Description: DnaJ protein [Synechocystis sp. PCC 6803]
  misc_feature (1)..(262): Homolog of NCBI NO: 22298332 NR Description: heat shock protein [Thermosynechococcus elongatus >gi|22294511|dbj|BAC08341.1| heat shock protein
  misc_feature (1)..(272): Homolog of NCBI NO: 18399949 NR Description: putative DnaJ protein; protein id: At2g22360.1, by cDNA: 10312. [Arabidopsis thaliana]
MGGFPGMDQADFGRTRRSRVTKGEDLRYDITLELSEAIFGSEKEFDLTHLETCEACAGTGAKAGSKMRICSTCGGRGQVMRTEQTPFGMFSQVSICPNCGGDGEVISENCRKCSGEGRVRIKKSIKVKIPPGVSAGSILRVAGEGDSGPRGGPPGDLYVYLDVEDVRGIERDGINLLSTLSISYLDAILGAVVKVKTVEGDTELQIPPGTQPGDVLVLAKKGVPKLNRPSIRGDHLFTVKVSVPNQISAGERELLEELASLKDTSSNRSRTRAKPQQPSTLSTAPSGSENKKDEVKEENEEPEQENYLWNNIKEFAGSVANGALKWLRDNL

SEQ ID NO: 91127 - DNA, 1113 bp, Arabidopsis thaliana
  misc_feature (1)..(1113): Ceres Seq. ID no. 12726564
  misc_feature: MA Experiment ID: 20000314 Result: Up-regulated in Transcription
  misc_feature: MA Experiment 20000314 PARAMETER Experiment Name: At_14day_Shoots-Roots_Sub_P Parameter: Age (day) Value: 14
  misc_feature: MA Experiment 20000314 PARAMETER Experiment Name: At_14day_Shoots-Roots_Sub_P Parameter: Organism Value: A. thaliana
  misc_feature: MA Experiment 20000314 PARAMETER Experiment Name: At_14day_Shoots-Roots_Sub_P Parameter: Plant Line Value: WS
  misc_feature: MA Experiment 20000314 PARAMETER Experiment Name: At_14day_Shoots-Roots_Sub_P Parameter: Tissue Value: Roots vs. Whole Plant
  misc_feature: MA Experiment ID: 20000315 Result: Up-regulated in Transcription
  misc_feature: MA Experiment 20000315 PARAMETER Experiment Name: At_14day_Shoots-Roots_Sub_P Parameter: Age (day) Value: 14
  misc_feature: MA Experiment 20000315 PARAMETER Experiment Name: At_14day_Shoots-Roots_Sub_P Parameter: Organism Value: A. thaliana
  misc_feature: MA Experiment 20000315 PARAMETER Experiment Name: At_14day_Shoots-Roots_Sub_P Parameter: Plant Line Value: WS
  misc_feature: MA Experiment 20000315 PARAMETER Experiment Name: At_14day_Shoots-Roots_Sub_P Parameter: Tissue Value: Shoots vs. Whole Plant
atgatgtaccaagaagcagcactcctcttagctctcctcttcatctcttcgaatgtcgtcttatcggccccagtccgcgatggtttattaccaaacggcaacttcgagttgggtcctaaaccctcccaaatgaaaggatccgtggttaaggaacgaaccgccgtaccaaactggaacataatcggctttgtggagttcattaaatccggtcagaaacaagatgacatggtcttggtcgtaccgcagggttcctccgccgttagactaggcaacgaagcctcaatctcccagaaaatatccgtcctacctggccgtctgtactcaataacgttcagcgccgctcgaacctgcgctcaagacgagaggctcaatatatccgtgacgcatgagtcaggtgtgatccctatccagacgatgtacggcagcgatggttgggactcatactcatgggcttttaaagctggtggtcccgaaatcgagatccggttccataaccctggtgttgaagagcacccggcttgcggacctttgatcgacgccgtggctatcaaggctttgttccctcccagattctctggatataatctgataaagaatgggaatttcgaagaaggaccttacgtgtttcccacggcaaaatggggagtactgatcccaccgttcatcgaggacgataacagcccattgcccggttggatgatcgagtctctcaaagccgttaagtacgtagacaaagcacacttcgctgtccccgaaggacaccgagccatcgagcttgttggaggcaaagagagcgccatttctcagatagtgaggacgtcactgaacaaattctacgccctcacgttcaacgtgggagacgccagagacggttgtgagggaccaatgattgtggaagcgttcgctggacagggcaaggtcatggtggactacgcttctaaaggaaaaggcgggtttagacgtgggaggcttgtgttcaaggcagtgtcggccaggacacgtgtcactttcttgagcacgttttaccacatgaaaagcgatcactctggctcgctatgtggtccggtgatcgatgatgttaggctggtagcggttgggaaactccgaggatga

SEQ ID NO: 91128 - protein, 370 aa, Arabidopsis thaliana
  peptide (1)..(370): Ceres Seq. ID no. 12726565
  misc_feature (44)..(366): Pfam Name: Protein of unknown function, DUF642 Pfam Description: Protein of unknown function, DUF642
  misc_feature (1)..(370): Homolog of NCBI NO: 15220093 NR Description: hypothetical protein; protein id: At1g80240.1
  misc_feature (8)..(367): Homolog of NCBI NO: 7488898 NR Description: hypothetical protein - castor bean
  misc_feature (12)..(367): Homolog of NCBI NO: 15239438 NR Description: putative protein; protein id: At5g25460.1, by cDNA: 1351., supported by cDNA: gi_14423449, supported by gi_15809821 [Arabidopsis thaliana]
  misc_feature (12)..(367): Homolog of NCBI NO: 21537379 NR Description: unknown [Arabidopsis thaliana]
  misc_feature (12)..(367): Homolog of NCBI NO: 15809822 NR Description: AT5g25460/F18G18_200 [Arabidopsis thaliana]
  misc_feature (10)..(367): Homolog of NCBI NO: 15239049 NR Description: putative protein; protein id: At5g11420.1, by cDNA: 25522., supported by cDNA: gi_15028264, supported by
  misc_feature (10)..(367): Homolog of NCBI NO: 21554402 NR Description: unknown [Arabidopsis thaliana]
  misc_feature (10)..(367): Homolog of NCBI NO: 23397043 NR Description: unknown protein [Arabidopsis thaliana]
  misc_feature (8)..(367): Homolog of NCBI NO: 7488741 NR Description: hypothetical protein precursor - alfalfa
  misc_feature (9)..(364): Homolog of NCBI NO: 18418018 NR Description: putative protein; protein id: At4g32460.1, by cDNA: 37529. [Arabidopsis thaliana]
MMYQEAALLLALLFISSNVVLSAPVRDGLLPNGNFELGPKPSQMKGSVVKERTAVPNWNIIGFVEFIKSGQKQDDMVLVVPQGSSAVRLGNEASISQKISVLPGRLYSITFSAARTCAQDERLNISVTHESGVIPIQTMYGSDGWDSYSWAFKAGGPEIEIRFHNPGVEEHPACGPLIDAVAIKALFPPRFSGYNLIKNGNFEEGPYVFPTAKWGVLIPPFIEDDNSPLPGWMIESLKAVKYVDKAHFAVPEGHRAIELVGGKESAISQIVRTSLNKFYALTFNVGDARDGCEGPMIVEAFAGQGKVMVDYASKGKGGFRRGRLVFKAVSARTRVTFLSTFYHMKSDHSGSLCGPVIDDVRLVAVGKLRG

SEQ ID NO: 91129 - protein, 369 aa, Arabidopsis thaliana
  peptide (1)..(369): Ceres Seq. ID no. 12726566
  misc_feature (43)..(365): Pfam Name: Protein of unknown function, DUF642 Pfam Description: Protein of unknown function, DUF642
  misc_feature (1)..(369): Homolog of NCBI NO: 15220093 NR Description: hypothetical protein; protein id: At1g80240.1
  misc_feature (7)..(366): Homolog of NCBI NO: 7488898 NR Description: hypothetical protein - castor bean
  misc_feature (11)..(366): Homolog of NCBI NO: 15239438 NR Description: putative protein; protein id: At5g25460.1, by cDNA: 1351., supported by cDNA: gi_14423449, supported by gi_15809821 [Arabidopsis thaliana]
  misc_feature (11)..(366): Homolog of NCBI NO: 21537379 NR Description: unknown [Arabidopsis thaliana]
  misc_feature (11)..(366): Homolog of NCBI NO: 15809822 NR Description: AT5g25460/F18G18_200 [Arabidopsis thaliana]
  misc_feature (9)..(366): Homolog of NCBI NO: 15239049 NR Description: putative protein; protein id: At5g11420.1, by cDNA: 25522., supported by cDNA: gi_15028264, supported by
  misc_feature (9)..(366): Homolog of NCBI NO: 21554402 NR Description: unknown [Arabidopsis thaliana]
  misc_feature (9)..(366): Homolog of NCBI NO: 23397043 NR Description: unknown protein [Arabidopsis thaliana]
  misc_feature (7)..(366): Homolog of NCBI NO: 7488741 NR Description: hypothetical protein precursor - alfalfa
  misc_feature (8)..(363): Homolog of NCBI NO: 18418018 NR Description: putative protein; protein id: At4g32460.1, by cDNA: 37529. [Arabidopsis thaliana]
MYQEAALLLALLFISSNVVLSAPVRDGLLPNGNFELGPKPSQMKGSVVKERTAVPNWNIIGFVEFIKSGQKQDDMVLVVPQGSSAVRLGNEASISQKISVLPGRLYSITFSAARTCAQDERLNISVTHESGVIPIQTMYGSDGWDSYSWAFKAGGPEIEIRFHNPGVEEHPACGPLIDAVAIKALFPPRFSGYNLIKNGNFEEGPYVFPTAKWGVLIPPFIEDDNSPLPGWMIESLKAVKYVDKAHFAVPEGHRAIELVGGKESAISQIVRTSLNKFYALTFNVGDARDGCEGPMIVEAFAGQGKVMVDYASKGKGGFRRGRLVFKAVSARTRVTFLSTFYHMKSDHSGSLCGPVIDDVRLVAVGKLRG

SEQ ID NO: 91130 - protein, 327 aa, Arabidopsis thaliana
  peptide (1)..(327): Ceres Seq. ID no. 12726567
  misc_feature (1)..(323): Pfam Name: Protein of unknown function, DUF642 Pfam Description: Protein of unknown function, DUF642
  misc_feature (1)..(327): Homolog of NCBI NO: 15220093 NR Description: hypothetical protein; protein id: At1g80240.1
  misc_feature (1)..(324): Homolog of NCBI NO: 7488898 NR Description: hypothetical protein - castor bean
  misc_feature (1)..(324): Homolog of NCBI NO: 15239438 NR Description: putative protein; protein id: At5g25460.1, by cDNA: 1351., supported by cDNA: gi_14423449, supported by gi_15809821 [Arabidopsis thaliana]
  misc_feature (1)..(324): Homolog of NCBI NO: 21537379 NR Description: unknown [Arabidopsis thaliana]
  misc_feature (1)..(324): Homolog of NCBI NO: 15809822 NR Description: AT5g25460/F18G18_200 [Arabidopsis thaliana]
  misc_feature (1)..(324): Homolog of NCBI NO: 15239049 NR Description: putative protein; protein id: At5g11420.1, by cDNA: 25522., supported by cDNA: gi_15028264, supported by
  misc_feature (1)..(324): Homolog of NCBI NO: 21554402 NR Description: unknown [Arabidopsis thaliana]
  misc_feature (1)..(324): Homolog of NCBI NO: 23397043 NR Description: unknown protein [Arabidopsis thaliana]
  misc_feature (1)..(324): Homolog of NCBI NO: 7488741 NR Description: hypothetical protein precursor - alfalfa
  misc_feature (1)..(321): Homolog of NCBI NO: 18418018 NR Description: putative protein; protein id: At4g32460.1, by cDNA: 37529. [Arabidopsis thaliana]
MKGSVVKERTAVPNWNIIGFVEFIKSGQKQDDMVLVVPQGSSAVRLGNEASISQKISVLPGRLYSITFSAARTCAQDERLNISVTHESGVIPIQTMYGSDGWDSYSWAFKAGGPEIEIRFHNPGVEEHPACGPLIDAVAIKALFPPRFSGYNLIKNGNFEEGPYVFPTAKWGVLIPPFIEDDNSPLPGWMIESLKAVKYVDKAHFAVPEGHRAIELVGGKESAISQIVRTSLNKFYALTFNVGDARDGCEGPMIVEAFAGQGKVMVDYASKGKGGFRRGRLVFKAVSARTRVTFLSTFYHMKSDHSGSLCGPVIDDVRLVAVGKLRG

SEQ ID NO: 91131 - DNA, 1068 bp, Arabidopsis thaliana
  misc_feature (1)..(1068): Ceres Seq. ID no. 12726580
  misc_feature: MA Experiment ID: 20000235 Result: Up-regulated in Transcription
  misc_feature: MA Experiment 20000235 PARAMETER Experiment Name: At_Siliques_P Parameter: Age (day) Value: 21
  misc_feature: MA Experiment 20000235 PARAMETER Experiment Name: At_Siliques_P Parameter: Organism Value: A. thaliana
  misc_feature: MA Experiment 20000235 PARAMETER Experiment Name: At_Siliques_P Parameter: Plant Line Value: WS
  misc_feature: MA Experiment 20000235 PARAMETER Experiment Name: At_Siliques_P Parameter: Tissue Value: 5-10mm Siliques vs. Whole Plant
atgccttcactagcagaagagatatgtattggtaacttaggcagtctccaaacactccccgagtcgttcacctggaaactcacagccgccgactcccttctgcgtccctcctccgccgtctcattcgacgcagtggaagagtccattcctgtgatcgacctctctaatcctgacgttaccaccctcattggagatgcctccaaaacatggggagcgtttcagatagccaaccacgggatttctcagaagcttctcgatgatatcgagtctctgtccaaaaccctattcgacatgccgtcagagaggaagcttgaagcggcttcctccgataaaggagttagtggctacggagaacctcgaatctccccctttttcgagaagaaaatgtggtctgaagggtttactattgccgatgactcctaccgcaaccatttcaatactctttggcctcatgatcacaccaagtactgcggtataatccaagaatacgtggacgaaatggaaaaattagcaagcagacttctgtattgcatattaggctcacttggtgtcaccgtggaagacattgaatgggctcacaagctagagaaatctggatcaaaagtgggcagaggcgccatacgactaaaccactacccggtttgtcctgaaccagaacgagccatgggtctagccgctcatacagactccactatcctaaccattctgcaccagagcaacacgggagggctacaagtgttcagggaagagtccggttgggtcacggttgagccggctcctggtgtcctcgtggtcaacattggtgatctctttcacatcttatcgaacgggaaaatcccaagcgtggttcatcgagccaaagttaaccatactcggtcaagaatttcgattgcgtacttatggggtggtccagctggtgatgtgcaaatcgcacctatctctaagttaaccggtccggctgaaccgtctctttaccggtcaattacatggaaagagtatctccaaataaagtatgaggttttcgacaaggccatggacgcaattagggtcgttaatcccaccaattaa

SEQ ID NO: 91132 - protein, 355 aa, Arabidopsis thaliana
  peptide (1)..(355): Ceres Seq. ID no. 12726581
  misc_feature (203)..(303): Pfam Name: 2OG-Fe(II) oxygenase superfamily Pfam Description: 2OG-Fe(II) oxygenase superfamily
  misc_feature (1)..(355): Homolog of NCBI NO: 15220116 NR Description: putative gibberellin 3 beta-hydroxylase; protein At1g80330.1 [Arabidopsis thaliana] >gi|25285691|pir||H96834
  misc_feature (10)..(349): Homolog of NCBI NO: 15218223 NR Description: gibberellin 3 beta-hydroxylase, putative; protein
  misc_feature (8)..(349): Homolog of NCBI NO: 11255836 NR Description: gibberellin 3 beta-hydroxylase [imported] -
  misc_feature (12)..(355): Homolog of NCBI NO: 3834350 NR Description: 3b-hydroxylase [Lycopersicon esculentum]
  misc_feature (8)..(349): Homolog of NCBI NO: 15220117 NR Description: gibberellin 3 beta-hydroxylase; protein id: supported by cDNA: gi_3982752 [Arabidopsis thaliana]
  misc_feature (12)..(353): Homolog of NCBI NO: 6691485 NR Description: gibberellin 3beta-hydroxylase [Nicotiana tabacum]
  misc_feature (12)..(353): Homolog of NCBI NO: 20149245 NR Description: gibberellin 3-oxidase 2 [Nicotiana sylvestris]
  misc_feature (12)..(355): Homolog of NCBI NO: 15418964 NR Description: gibberellin 3-beta-hydroxylase 1 [Solanum
  misc_feature (12)..(353): Homolog of NCBI NO: 20149243 NR Description: gibberellin 3-oxidase 1 [Nicotiana sylvestris]
  misc_feature (1)..(353): Homolog of NCBI NO: 15418962 NR Description: gibberellin 3-beta-hydroxylase 2 [Solanum
MPSLAEEICIGNLGSLQTLPESFTWKLTAADSLLRPSSAVSFDAVEESIPVIDLSNPDVTTLIGDASKTWGAFQIANHGISQKLLDDIESLSKTLFDMPSERKLEAASSDKGVSGYGEPRISPFFEKKMWSEGFTIADDSYRNHFNTLWPHDHTKYCGIIQEYVDEMEKLASRLLYCILGSLGVTVEDIEWAHKLEKSGSKVGRGAIRLNHYPVCPEPERAMGLAAHTDSTILTILHQSNTGGLQVFREESGWVTVEPAPGVLVVNIGDLFHILSNGKIPSVVHRAKVNHTRSRISIAYLWGGPAGDVQIAPISKLTGPAEPSLYRSITWKEYLQIKYEVFDKAMDAIRVVNPTN

SEQ ID NO: 91133 - protein, 258 aa, Arabidopsis thaliana
  peptide (1)..(258): Ceres Seq. ID no. 12726582
  misc_feature (106)..(206): Pfam Name: 2OG-Fe(II) oxygenase superfamily Pfam Description: 2OG-Fe(II) oxygenase superfamily
  misc_feature (1)..(258): Homolog of NCBI NO: 15220116 NR Description: putative gibberellin 3 beta-hydroxylase; protein At1g80330.1 [Arabidopsis thaliana] >gi|25285691|pir||H96834
  misc_feature (1)..(252): Homolog of NCBI NO: 15218223 NR Description: gibberellin 3 beta-hydroxylase, putative; protein
  misc_feature (1)..(252): Homolog of NCBI NO: 11255836 NR Description: gibberellin 3 beta-hydroxylase [imported] -
  misc_feature (1)..(258): Homolog of NCBI NO: 3834350 NR Description: 3b-hydroxylase [Lycopersicon esculentum]
  misc_feature (1)..(252): Homolog of NCBI NO: 15220117 NR Description: gibberellin 3 beta-hydroxylase; protein id: supported by cDNA: gi_3982752 [Arabidopsis thaliana]
  misc_feature (1)..(256): Homolog of NCBI NO: 6691485 NR Description: gibberellin 3beta-hydroxylase [Nicotiana tabacum]
  misc_feature (1)..(256): Homolog of NCBI NO: 20149245 NR Description: gibberellin 3-oxidase 2 [Nicotiana sylvestris]
  misc_feature (1)..(258): Homolog of NCBI NO: 15418964 NR Description: gibberellin 3-beta-hydroxylase 1 [Solanum
  misc_feature (1)..(256): Homolog of NCBI NO: 20149243 NR Description: gibberellin 3-oxidase 1 [Nicotiana sylvestris]
  misc_feature (1)..(256): Homolog of NCBI NO: 15418962 NR Description: gibberellin 3-beta-hydroxylase 2 [Solanum
MPSERKLEAASSDKGVSGYGEPRISPFFEKKMWSEGFTIADDSYRNHFNTLWPHDHTKYCGIIQEYVDEMEKLASRLLYCILGSLGVTVEDIEWAHKLEKSGSKVGRGAIRLNHYPVCPEPERAMGLAAHTDSTILTILHQSNTGGLQVFREESGWVTVEPAPGVLVVNIGDLFHILSNGKIPSVVHRAKVNHTRSRISIAYLWGGPAGDVQIAPISKLTGPAEPSLYRSITWKEYLQIKYEVFDKAMDAIRVVNPTN

SEQ ID NO: 91134 - protein, 227 aa, Arabidopsis thaliana
  peptide (1)..(227): Ceres Seq. ID no. 12726583
  misc_feature (75)..(175): Pfam Name: 2OG-Fe(II) oxygenase superfamily Pfam Description: 2OG-Fe(II) oxygenase superfamily
  misc_feature (1)..(227): Homolog of NCBI NO: 15220116 NR Description: putative gibberellin 3 beta-hydroxylase; protein At1g80330.1 [Arabidopsis thaliana] >gi|25285691|pir||H96834
  misc_feature (1)..(221): Homolog of NCBI NO: 15218223 NR Description: gibberellin 3 beta-hydroxylase, putative; protein
  misc_feature (1)..(221): Homolog of NCBI NO: 11255836 NR Description: gibberellin 3 beta-hydroxylase [imported] -
  misc_feature (1)..(227): Homolog of NCBI NO: 3834350 NR Description: 3b-hydroxylase [Lycopersicon esculentum]
  misc_feature (1)..(221): Homolog of NCBI NO: 15220117 NR Description: gibberellin 3 beta-hydroxylase; protein id: supported by cDNA: gi_3982752 [Arabidopsis thaliana]
  misc_feature (1)..(225): Homolog of NCBI NO: 6691485 NR Description: gibberellin 3beta-hydroxylase [Nicotiana tabacum]
  misc_feature (1)..(225): Homolog of NCBI NO: 20149245 NR Description: gibberellin 3-oxidase 2 [Nicotiana sylvestris]
  misc_feature (1)..(227): Homolog of NCBI NO: 15418964 NR Description: gibberellin 3-beta-hydroxylase 1 [Solanum
  misc_feature (1)..(225): Homolog of NCBI NO: 20149243 NR Description: gibberellin 3-oxidase 1 [Nicotiana sylvestris]
  misc_feature (1)..(225): Homolog of NCBI NO: 15418962 NR Description: gibberellin 3-beta-hydroxylase 2 [Solanum
MWSEGFTIADDSYRNHFNTLWPHDHTKYCGIIQEYVDEMEKLASRLLYCILGSLGVTVEDIEWAHKLEKSGSKVGRGAIRLNHYPVCPEPERAMGLAAHTDSTILTILHQSNTGGLQVFREESGWVTVEPAPGVLVVNIGDLFHILSNGKIPSVVHRAKVNHTRSRISIAYLWGGPAGDVQIAPISKLTGPAEPSLYRSITWKEYLQIKYEVFDKAMDAIRVVNPTN

SEQ ID NO: 91135 - DNA, 1083 bp, Arabidopsis thaliana
  misc_feature (1)..(1083): Ceres Seq. ID no. 12726584
  misc_feature: MA Experiment ID: 20000439 Result: Up-regulated in Transcription
  misc_feature: MA Experiment 20000439 PARAMETER Experiment Name: At_Roots__P Parameter: Age (day) Value: 14 vs. 21
  misc_feature: MA Experiment 20000439 PARAMETER Experiment Name: At_Roots__P Parameter: Organism Value: A. thaliana
  misc_feature: MA Experiment 20000439 PARAMETER Experiment Name: At_Roots__P Parameter: Tissue Value: Roots vs. Whole Plant
acataaagccaaaatataaacacataagccttttagcatgagttcaacgttgagcgatgtgtttagatcgcatcccattcacatcccactctcaaacccacctgacttcaaatctctcccggattcttacacgtggactcctaaagatgatctcctcttctccgcctccgcctccgacgaaaccctgccgctcatcgacctctccgatatccacgtggccactcttgtgggccatgcttgtaccacgtggggagcgttccagatcaccaaccacggcgtcccctcgcgacttctcgacgacattgagttcctcaccggaagtcttttccggcttcccgtacagcggaagctcaaggcggctcggtcagagaatggcgtctccggctacggcgtagctcgtattgcttcgttctttaataagaagatgtggtccgaaggtttcaccgttattggctctcccctccacgatttccgtaaactctggcccagccaccacctcaaatactgtgaaattattgaagagtatgaagaacatatgcaaaagttggcagccaagttgatgtggttcgcattaggttcactgggagttgaagaaaaggacatacaatgggccgggcctaattcagactttcaaggaacccaagcagttatccaactaaaccattatccaaaatgtccagaaccagacagagccatgggcctcgcagcccatacagactcgaccctcatgacaattctgtaccagaacaacaccgccggtctccaagttttccgggatgacgtgggctgggttaccgcgccacctgtccctggctcgctggtggtcaacgtcggtgacttgctccacattttaaccaacggaatcttcccgagcgtgcttcaccgagccagggttaaccacgtccgatctcggttctcaatggcttacctgtggggtccaccatccgatataatgatctctccacttcccaaactggttgatcctctccaatctcctctctacccatctctcacttggaaacaataccttgctaccaaagctactcattttaatcaatctctttccattattagaaattaact

SEQ ID NO: 91136 - protein, 347 aa, Arabidopsis thaliana
  peptide (1)..(347): Ceres Seq. ID no. 12726585
  misc_feature (201)..(301): Pfam Name: 2OG-Fe(II) oxygenase superfamily Pfam Description: 2OG-Fe(II) oxygenase superfamily
  misc_feature (1)..(347): Homolog of NCBI NO: 15220117 NR Description: gibberellin 3 beta-hydroxylase; protein id: supported by cDNA: gi_3982752 [Arabidopsis thaliana]
  misc_feature (1)..(347): Homolog of NCBI NO: 11255836 NR Description: gibberellin 3 beta-hydroxylase [imported] -
  misc_feature (1)..(347): Homolog of NCBI NO: 15218223 NR Description: gibberellin 3 beta-hydroxylase, putative; protein
  misc_feature (1)..(346): Homolog of NCBI NO: 4164145 NR Description: gibberelin 3beta-hydroxylase [Lactuca sativa]
  misc_feature (1)..(346): Homolog of NCBI NO: 6691485 NR Description: gibberellin 3beta-hydroxylase [Nicotiana tabacum]
  misc_feature (1)..(346): Homolog of NCBI NO: 20149245 NR Description: gibberellin 3-oxidase 2 [Nicotiana sylvestris]
  misc_feature (4)..(346): Homolog of NCBI NO: 2314805 NR Description: 2-oxoglutarate-dependent dioxygenase [Pisum
  misc_feature (4)..(346): Homolog of NCBI NO: 7433212 NR Description: gibberellin 3 beta-hydroxylase (EC 1.4.99.-)
  misc_feature (4)..(346): Homolog of NCBI NO: 2291080 NR Description: defective gibberellin 3B-hydroxylase [Pisum
  misc_feature (4)..(346): Homolog of NCBI NO: 7433213 NR Description: gibberellin 3 beta-hydroxylase (EC 1.4.99.-)
MSSTLSDVFRSHPIHIPLSNPPDFKSLPDSYTWTPKDDLLFSASASDETLPLIDLSDIHVATLVGHACTTWGAFQITNHGVPSRLLDDIEFLTGSLFRLPVQRKLKAARSENGVSGYGVARIASFFNKKMWSEGFTVIGSPLHDFRKLWPSHHLKYCEIIEEYEEHMQKLAAKLMWFALGSLGVEEKDIQWAGPNSDFQGTQAVIQLNHYPKCPEPDRAMGLAAHTDSTLMTILYQNNTAGLQVFRDDVGWVTAPPVPGSLVVNVGDLLHILTNGIFPSVLHRARVNHVRSRFSMAYLWGPPSDIMISPLPKLVDPLQSPLYPSLTWKQYLATKATHFNQSLSIIRN

SEQ ID NO: 91137 - protein, 218 aa, Arabidopsis thaliana
  peptide (1)..(218): Ceres Seq. ID no. 12726586
  misc_feature (72)..(172): Pfam Name: 2OG-Fe(II) oxygenase superfamily Pfam Description: 2OG-Fe(II) oxygenase superfamily
  misc_feature (1)..(218): Homolog of NCBI NO: 15220117 NR Description: gibberellin 3 beta-hydroxylase; protein id: supported by cDNA: gi_3982752 [Arabidopsis thaliana]
  misc_feature (1)..(218): Homolog of NCBI NO: 11255836 NR Description: gibberellin 3 beta-hydroxylase [imported] -
  misc_feature (1)..(218): Homolog of NCBI NO: 15218223 NR Description: gibberellin 3 beta-hydroxylase, putative; protein
  misc_feature (1)..(217): Homolog of NCBI NO: 4164145 NR Description: gibberelin 3beta-hydroxylase [Lactuca sativa]
  misc_feature (1)..(217): Homolog of NCBI NO: 6691485 NR Description: gibberellin 3beta-hydroxylase [Nicotiana tabacum]
  misc_feature (1)..(217): Homolog of NCBI NO: 20149245 NR Description: gibberellin 3-oxidase 2 [Nicotiana sylvestris]
  misc_feature (1)..(217): Homolog of NCBI NO: 2314805 NR Description: 2-oxoglutarate-dependent dioxygenase [Pisum
  misc_feature (1)..(217): Homolog of NCBI NO: 7433212 NR Description: gibberellin 3 beta-hydroxylase (EC 1.4.99.-)
  misc_feature (1)..(217): Homolog of NCBI NO: 2291080 NR Description: defective gibberellin 3B-hydroxylase [Pisum
  misc_feature (1)..(217): Homolog of NCBI NO: 7433213 NR Description: gibberellin 3 beta-hydroxylase (EC 1.4.99.-)
MWSEGFTVIGSPLHDFRKLWPSHHLKYCEIIEEYEEHMQKLAAKLMWFALGSLGVEEKDIQWAGPNSDFQGTQAVIQLNHYPKCPEPDRAMGLAAHTDSTLMTILYQNNTAGLQVFRDDVGWVTAPPVPGSLVVNVGDLLHILTNGIFPSVLHRARVNHVRSRFSMAYLWGPPSDIMISPLPKLVDPLQSPLYPSLTWKQYLATKATHFNQSLSIIRN

SEQ ID NO: 91138 - protein, 181 aa, Arabidopsis thaliana
  peptide (1)..(181): Ceres Seq. ID no. 12726587
  misc_feature (35)..(135): Pfam Name: 2OG-Fe(II) oxygenase superfamily Pfam Description: 2OG-Fe(II) oxygenase superfamily
  misc_feature (1)..(181): Homolog of NCBI NO: 15220117 NR Description: gibberellin 3 beta-hydroxylase; protein id: supported by cDNA: gi_3982752 [Arabidopsis thaliana]
  misc_feature (1)..(181): Homolog of NCBI NO: 11255836 NR Description: gibberellin 3 beta-hydroxylase [imported] -
  misc_feature (1)..(181): Homolog of NCBI NO: 15218223 NR Description: gibberellin 3 beta-hydroxylase, putative; protein
  misc_feature (1)..(180): Homolog of NCBI NO: 4164145 NR Description: gibberelin 3beta-hydroxylase [Lactuca sativa]
  misc_feature (1)..(180): Homolog of NCBI NO: 6691485 NR Description: gibberellin 3beta-hydroxylase [Nicotiana tabacum]
  misc_feature (1)..(180): Homolog of NCBI NO: 20149245 NR Description: gibberellin 3-oxidase 2 [Nicotiana sylvestris]
  misc_feature (1)..(180): Homolog of NCBI NO: 2314805 NR Description: 2-oxoglutarate-dependent dioxygenase [Pisum
  misc_feature (1)..(180): Homolog of NCBI NO: 7433212 NR Description: gibberellin 3 beta-hydroxylase (EC 1.4.99.-)
  misc_feature (1)..(180): Homolog of NCBI NO: 2291080 NR Description: defective gibberellin 3B-hydroxylase [Pisum
  misc_feature (1)..(180): Homolog of NCBI NO: 7433213 NR Description: gibberellin 3 beta-hydroxylase (EC 1.4.99.-)
MQKLAAKLMWFALGSLGVEEKDIQWAGPNSDFQGTQAVIQLNHYPKCPEPDRAMGLAAHTDSTLMTILYQNNTAGLQVFRDDVGWVTAPPVPGSLVVNVGDLLHILTNGIFPSVLHRARVNHVRSRFSMAYLWGPPSDIMISPLPKLVDPLQSPLYPSLTWKQYLATKATHFNQSLSIIRN

SEQ ID NO: 91139 - DNA, 1885 bp, Arabidopsis thaliana
  misc_feature (1)..(1885): Ceres Seq. ID no. 12726588
  misc_feature: MA Experiment ID: 20000286 Result: Up-regulated in Transcription
  misc_feature: MA Experiment 20000286 PARAMETER Experiment Name: At_Open_Flower_P Parameter: Age (day) Value: 21
  misc_feature: MA Experiment 20000286 PARAMETER Experiment Name: At_Open_Flower_P Parameter: Plant Line Value: WS
  misc_feature: MA Experiment 20000286 PARAMETER Experiment Name: At_Open_Flower_P Parameter: Tissue Value: Half Open vs. Whole Plant
actttgtcttccatcttcgccgacgagtcacatctccgaaatccggagccggagagggagaaagaaggagaatttgggttctccgagatcgaagctcttgcctcggaacccttgattttgttttggaataggctatttttttagtaaaagaggaaatggtgggaagtagtaattcgttagcgggtctacaagaccacttgaaattagcgagagaatatgcactagaaggatcctatgacacatctgtcatcttcttcgatggcgccattgctcagatcaacaagcatttaaacacccttgacgatcctttggcccggaccaaatggatgaacgttaaaaaggccataatggaagagacggaagttgtgaagcaattggatgcagagaggagagcatttaaagaagctcccactgggcgtcgcgctgcttctccacctatcaataccaaatcatcctttgtttttcagcccttggatgagtatccaacttcatccggtggtggtcctatggatgatcctgatgtgtggaggcctcctacccgtgatgttactagtcgaagacccgccagggctggtcaaactggtactagaaaatcacctcaagatggggcttgggctcgtggccctactacacggaccggtccagcttcccgtggtggcagaggtggggctactagtaagtcaactgcaggtgcccgctcttccactgccggaaagaagggagctgcctcaaaatctaacaaggctgagtctatgaatggtgatgctgaagatgggaagtcaaaaaggggattgtatgagggacctgatgaggacctggctgctatgcttgaaagggatgtgttggactcaactcctggtgtccgttgggatgatgttgcaggtttgtctgaagccaaaaggctgcttgaggaggcagttgtccttcctttatggatgcccgaatactttcagggtattcgaagaccatggaaaggagttctcatgtttggtcctcctgggacaggtaaaaccctgttggcaaaagctgttgcaactgagtgtggtaccaccttcttcaatgtatcttctgctacattagcttcaaaatggcgtggagagagtgagcgcatggtcagatgcctgtttgatctggctagggcatatgctccaagcacaatttttattgatgagatcgactctctctgcaattctcgggggggttctggagagcatgaatcatcaagaagggtgaaatcggaactcctagttcaagtagatggagtgagcaatacagcgacaaatgaagatggtagtcgcaaaatagtaatggtattggcagctaccaacttcccgtgggacatagatgaagctctcaggaggaggttggaaaaacgtatatatatcccacttccagattttgaaagtcgtaaggctcttatcaatatcaatctgagaacagttgaggtggcgagtgatgttaacattgaagatgtggcccggagaacggaagggtacagtggagacgatctgactaacgtgtgcagggacgcatcaatgaacgggatgcggcgtaagatagcggggaaaacgagagatgagataaagaacatgtcgaaagacgatatatcaaatgatccagtggcaatgtgtgatttcgaagaggccattaggaaagtgcaaccgagtgtgtcttcctctgatatcgagaaacacgagaagtggctctctgagtttggatctgcttaattaaacccactttttttaatttagtgtcaaaagatgtgtgccttttcttgtgtgttgttgtttattgtatcattattattatttgccagtcatttaacatattcttatgtttctatattccaaacttgtaaacctctacgaaaaaagaaaaggattat

SEQ ID NO: 91140 - protein, 523 aa, Arabidopsis thaliana
  peptide (1)..(523): Ceres Seq. ID no. 12726589
  misc_feature (274)..(465): Pfam Name: ATPase family associated with various cellular Pfam Description: ATPase family associated with various cellular
  misc_feature (1)..(523): Homolog of NCBI NO: 15220118 NR Description: CAD ATPase (AAA1); protein id: At1g80350.1, by cDNA: gi_13958984, supported by cDNA: gi_16649098, supported cDNA: gi_19909895, supported by cDNA: gi_6648605 [Arabidopsis
  misc_feature (1)..(523): Homolog of NCBI NO: 19909896 NR Description: katanin [Arabidopsis thaliana]
  misc_feature (1)..(523): Homolog of NCBI NO: 32478841 NR Description: katanin [Gossypium hirsutum]
  misc_feature (1)..(523): Homolog of NCBI NO: 34421682 NR Description: katanin-like protein [Gossypium hirsutum]
  misc_feature (1)..(523): Homolog of NCBI NO: 32478843 NR Description: katanin [Gossypium barbadense]
  misc_feature (6)..(523): Homolog of NCBI NO: 34911210 NR Description: putative CAD ATPase [Oryza sativa (japonica >gi|19386661|dbj|BAB86043.1| putative CAD ATPase [Oryza sativa
  misc_feature (13)..(522): Homolog of NCBI NO: 3098603 NR Description: katanin p60 subunit [Strongylocentrotus
  misc_feature (106)..(521): Homolog of NCBI NO: 5825592 NR Description: katanin p60 [Xenopus laevis]
  misc_feature (7)..(82): Homolog of NCBI NO: 5825592 NR Description: katanin p60 [Xenopus laevis]
  misc_feature (136)..(522): Homolog of NCBI NO: 5901990 NR Description: katanin p60 subunit A 1 [Homo sapiens]
MVGSSNSLAGLQDHLKLAREYALEGSYDTSVIFFDGAIAQINKHLNTLDDPLARTKWMNVKKAIMEETEVVKQLDAERRAFKEAPTGRRAASPPINTKSSFVFQPLDEYPTSSGGGPMDDPDVWRPPTRDVTSRRPARAGQTGTRKSPQDGAWARGPTTRTGPASRGGRGGATSKSTAGARSSTAGKKGAASKSNKAESMNGDAEDGKSKRGLYEGPDEDLAAMLERDVLDSTPGVRWDDVAGLSEAKRLLEEAVVLPLWMPEYFQGIRRPWKGVLMFGPPGTGKTLLAKAVATECGTTFFNVSSATLASKWRGESERMVRCLFDLARAYAPSTIFIDEIDSLCNSRGGSGEHESSRRVKSELLVQVDGVSNTATNEDGSRKIVMVLAATNFPWDIDEALRRRLEKRIYIPLPDFESRKALININLRTVEVASDVNIEDVARRTEGYSGDDLTNVCRDASMNGMRRKIAGKTRDEIKNMSKDDISNDPVAMCDFEEAIRKVQPSVSSSDIEKHEKWLSEFGSA

SEQ ID NO: 91141 - protein, 466 aa, Arabidopsis thaliana
  peptide (1)..(466): Ceres Seq. ID no. 12726590
  misc_feature (217)..(408): Pfam Name: ATPase family associated with various cellular Pfam Description: ATPase family associated with various cellular
  misc_feature (1)..(466): Homolog of NCBI NO: 15220118 NR Description: CAD ATPase (AAA1); protein id: At1g80350.1, by cDNA: gi_13958984, supported by cDNA: gi_16649098, supported cDNA: gi_19909895, supported by cDNA: gi_6648605 [Arabidopsis
  misc_feature (1)..(466): Homolog of NCBI NO: 19909896 NR Description: katanin [Arabidopsis thaliana]
  misc_feature (1)..(466): Homolog of NCBI NO: 32478841 NR Description: katanin [Gossypium hirsutum]
  misc_feature (1)..(466): Homolog of NCBI NO: 34421682 NR Description: katanin-like protein [Gossypium hirsutum]
  misc_feature (1)..(466): Homolog of NCBI NO: 32478843 NR Description: katanin [Gossypium barbadense]
  misc_feature (1)..(466): Homolog of NCBI NO: 34911210 NR Description: putative CAD ATPase [Oryza sativa (japonica >gi|19386661|dbj|BAB86043.1| putative CAD ATPase [Oryza sativa
  misc_feature (1)..(465): Homolog of NCBI NO: 3098603 NR Description: katanin p60 subunit [Strongylocentrotus
  misc_feature (49)..(464): Homolog of NCBI NO: 5825592 NR Description: katanin p60 [Xenopus laevis]
  misc_feature (1)..(25): Homolog of NCBI NO: 5825592 NR Description: katanin p60 [Xenopus laevis]
  misc_feature (79)..(465): Homolog of NCBI NO: 5901990 NR Description: katanin p60 subunit A 1 [Homo sapiens]
MNVKKAIMEETEVVKQLDAERRAFKEAPTGRRAASPPINTKSSFVFQPLDEYPTSSGGGPMDDPDVWRPPTRDVTSRRPARAGQTGTRKSPQDGAWARGPTTRTGPASRGGRGGATSKSTAGARSSTAGKKGAASKSNKAESMNGDAEDGKSKRGLYEGPDEDLAAMLERDVLDSTPGVRWDDVAGLSEAKRLLEEAVVLPLWMPEYFQGIRRPWKGVLMFGPPGTGKTLLAKAVATECGTTFFNVSSATLASKWRGESERMVRCLFDLARAYAPSTIFIDEIDSLCNSRGGSGEHESSRRVKSELLVQVDGVSNTATNEDGSRKIVMVLAATNFPWDIDEALRRRLEKRIYIPLPDFESRKALININLRTVEVASDVNIEDVARRTEGYSGDDLTNVCRDASMNGMRRKIAGKTRDEIKNMSKDDISNDPVAMCDFEEAIRKVQPSVSSSDIEKHEKWLSEFGSA

SEQ ID NO: 91142 - protein, 459 aa, Arabidopsis thaliana
  peptide (1)..(459): Ceres Seq. ID no. 12726591
  misc_feature (210)..(401): Pfam Name: ATPase family associated with various cellular Pfam Description: ATPase family associated with various cellular
  misc_feature (1)..(459): Homolog of NCBI NO: 15220118 NR Description: CAD ATPase (AAA1); protein id: At1g80350.1, by cDNA: gi_13958984, supported by cDNA: gi_16649098, supported cDNA: gi_19909895, supported by cDNA: gi_6648605 [Arabidopsis
  misc_feature (1)..(459): Homolog of NCBI NO: 19909896 NR Description: katanin [Arabidopsis thaliana]
  misc_feature (1)..(459): Homolog of NCBI NO: 32478841 NR Description: katanin [Gossypium hirsutum]
  misc_feature (1)..(459): Homolog of NCBI NO: 34421682 NR Description: katanin-like protein [Gossypium hirsutum]
  misc_feature (1)..(459): Homolog of NCBI NO: 32478843 NR Description: katanin [Gossypium barbadense]
  misc_feature (1)..(459): Homolog of NCBI NO: 34911210 NR Description: putative CAD ATPase [Oryza sativa (japonica >gi|19386661|dbj|BAB86043.1| putative CAD ATPase [Oryza sativa
  misc_feature (1)..(458): Homolog of NCBI NO: 3098603 NR Description: katanin p60 subunit [Strongylocentrotus
  misc_feature (42)..(457): Homolog of NCBI NO: 5825592 NR Description: katanin p60 [Xenopus laevis]
  misc_feature (1)..(18): Homolog of NCBI NO: 5825592 NR Description: katanin p60 [Xenopus laevis]
  misc_feature (72)..(458): Homolog of NCBI NO: 5901990 NR Description: katanin p60 subunit A 1 [Homo sapiens]
MEETEVVKQLDAERRAFKEAPTGRRAASPPINTKSSFVFQPLDEYPTSSGGGPMDDPDVWRPPTRDVTSRRPARAGQTGTRKSPQDGAWARGPTTRTGPASRGGRGGATSKSTAGARSSTAGKKGAASKSNKAESMNGDAEDGKSKRGLYEGPDEDLAAMLERDVLDSTPGVRWDDVAGLSEAKRLLEEAVVLPLWMPEYFQGIRRPWKGVLMFGPPGTGKTLLAKAVATECGTTFFNVSSATLASKWRGESERMVRCLFDLARAYAPSTIFIDEIDSLCNSRGGSGEHESSRRVKSELLVQVDGVSNTATNEDGSRKIVMVLAATNFPWDIDEALRRRLEKRIYIPLPDFESRKALININLRTVEVASDVNIEDVARRTEGYSGDDLTNVCRDASMNGMRRKIAGKTRDEIKNMSKDDISNDPVAMCDFEEAIRKVQPSVSSSDIEKHEKWLSEFGSA

SEQ ID NO: 91143 - DNA, 1386 bp, Arabidopsis thaliana
  misc_feature (1)..(1386): Ceres Seq. ID no. 12726592
  misc_feature: MA Experiment ID: 20000307 Result: Up-regulated in Transcription
  misc_feature: MA Experiment 20000307 PARAMETER Experiment Name: At_Germinating_Seeds_Sub_P Parameter: Age (hr) Value: 24 vs. 0
  misc_feature: MA Experiment 20000307 PARAMETER Experiment Name: At_Germinating_Seeds_Sub_P Parameter: Organism Value: A. thaliana
  misc_feature: MA Experiment 20000307 PARAMETER Experiment Name: At_Germinating_Seeds_Sub_P Parameter: Plant Line Value: WS
  misc_feature: MA Experiment 20000307 PARAMETER Experiment Name: At_Germinating_Seeds_Sub_P Parameter: Tissue Value: Germinating Seeds
atggggaaggagaatgctgtttctggaaactctataccaatccatggtcgccctgtaactcgtgctcttgcctctgctctgcgtgcttcttctaagctgataacatcttctgaagtggctgctacaacacagaaccagggacgggttcttagagcaaagagtaaaagaacagccttggatgagaagaaagccaatgcacctaagaagcgagctgttcttaaggatatcactaatgttacctgcgagaattcttacacaagttgcttcagtgttgcggtggagaatatcaagcagataaagaagggacgacagagttcttcttcttccaaggtggcatcttcttcggctacttcacaagttacagatgcaaaggtagaagttgtgtcaaattcagcaggagcaagcttgtctgtttttacagatacaagcttaggcacaaacgaaacatcctatagcattatcgcaaagccaagctccagatcgcctccaagaccctttgggacagttgagagaagttgtggtggagcaagtagcccgaaattcgttgacattgattcagatgacaaagatcctctactctgtagcctttatgcacctgacatctactacaacctgcgtgttgctgagcttaaacgaagaccatttcctgattttatggagaaaacacaaagagatgtgactgagacaatgcggggaattcttgttgattggcttgtagaggtctcagaggaatacacacttgtacctgacactctttacctcacagtgtatctcatagactggtttctccatggaaactatgtggaaagacagagacttcaattgcttggcatcacttgtatgctcattgcttcgaagtatgaggaaatccatgcgccacgcattgaggagttctgcttcatcacggataacacttatacaagagatcaggtcctggaaatggagagccaagtactcaagcattttagctttcaaatttacacccccacttcaaaaacattcctcaggagatttcttcgagcagctcaagtttctttcccgaatcaaagtctggaaatggagtttctggcgaattacctaacggaattgacgttaatggactaccctttcttgaagttccttccttcgatcatcgctgcttcggctgtttttcttgccaagtggacattaaaccaatcaagccacccttggaatccaactcttgagcattacacaacgtacaaagcctccgatctcaaagcatctgtccacgccttgcaagatttacagcttaacaccaaaggatgttccttaaactctatacgcatgaagtatagacaggacaagttcaaatccgtggcggtattcagttctggagagctaccggacaagctattcatctcctaa

SEQ ID NO: 91144 - protein, 461 aa, Arabidopsis thaliana
  peptide (1)..(461): Ceres Seq. ID no. 12726593
  misc_feature (200)..(327): Pfam Name: Cyclin, N-terminal domain Pfam Description: Cyclin, N-terminal domain
  misc_feature (1)..(461): Homolog of NCBI NO: 15220120 NR Description: Cyclin A2;4; protein id: At1g80370.1 [Arabidopsis
  misc_feature (1)..(459): Homolog of NCBI NO: 15218225 NR Description: Cyclin A2;3; protein id: At1g15570.1, supported cDNA: gi_18175784, supported by cDNA: gi_20465756 [Arabidopsis >gi|18175785|gb|AAL59927.1| putative cyclin [Arabidopsis
  misc_feature (1)..(442): Homolog of NCBI NO: 25294181 NR Description: probable cyclin [imported] - Arabidopsis thaliana
  misc_feature (28)..(459): Homolog of NCBI NO: 1076444 NR Description: mitosis-specific cyclin CYC1 - rape
  misc_feature (175)..(459): Homolog of NCBI NO: 5420276 NR Description: cyclin A2 [Lycopersicon esculentum]
  misc_feature (19)..(131): Homolog of NCBI NO: 5420276 NR Description: cyclin A2 [Lycopersicon esculentum]
MGKENAVSGNSIPIHGRPVTRALASALRASSKLITSSEVAATTQNQGRVLRAKSKRTALDEKKANAPKKRAVLKDITNVTCENSYTSCFSVAVENIKQIKKGRQSSSSSKVASSSATSQVTDAKVEVVSNSAGASLSVFTDTSLGTNETSYSIIAKPSSRSPPRPFGTVERSCGGASSPKFVDIDSDDKDPLLCSLYAPDIYYNLRVAELKRRPFPDFMEKTQRDVTETMRGILVDWLVEVSEEYTLVPDTLYLTVYLIDWFLHGNYVERQRLQLLGITCMLIASKYEEIHAPRIEEFCFITDNTYTRDQVLEMESQVLKHFSFQIYTPTSKTFLRRFLRAAQVSFPNQSLEMEFLANYLTELTLMDYPFLKFLPSIIAASAVFLAKWTLNQSSHPWNPTLEHYTTYKASDLKASVHALQDLQLNTKGCSLNSIRMKYRQDKFKSVAVFSSGELPDKLFIS

SEQ ID NO: 91145 - protein, 243 aa, Arabidopsis thaliana
  peptide (1)..(243): Ceres Seq. ID no. 12726594
  misc_feature (1)..(109): Pfam Name: Cyclin, N-terminal domain Pfam Description: Cyclin, N-terminal domain
  misc_feature (1)..(243): Homolog of NCBI NO: 15220120 NR Description: Cyclin A2;4; protein id: At1g80370.1 [Arabidopsis
  misc_feature (1)..(241): Homolog of NCBI NO: 15218225 NR Description: Cyclin A2;3; protein id: At1g15570.1, supported cDNA: gi_18175784, supported by cDNA: gi_20465756 [Arabidopsis >gi|18175785|gb|AAL59927.1| putative cyclin [Arabidopsis
  misc_feature (1)..(224): Homolog of NCBI NO: 25294181 NR Description: probable cyclin [imported] - Arabidopsis thaliana
  misc_feature (1)..(241): Homolog of NCBI NO: 1076444 NR Description: mitosis-specific cyclin CYC1 - rape
  misc_feature (1)..(241): Homolog of NCBI NO: 5420276 NR Description: cyclin A2 [Lycopersicon esculentum]
MEKTQRDVTETMRGILVDWLVEVSEEYTLVPDTLYLTVYLIDWFLHGNYVERQRLQLLGITCMLIASKYEEIHAPRIEEFCFITDNTYTRDQVLEMESQVLKHFSFQIYTPTSKTFLRRFLRAAQVSFPNQSLEMEFLANYLTELTLMDYPFLKFLPSIIAASAVFLAKWTLNQSSHPWNPTLEHYTTYKASDLKASVHALQDLQLNTKGCSLNSIRMKYRQDKFKSVAVFSSGELPDKLFIS

SEQ ID NO: 91146 - protein, 232 aa, Arabidopsis thaliana
  peptide (1)..(232): Ceres Seq. ID no. 12726595
  misc_feature (1)..(98): Pfam Name: Cyclin, N-terminal domain Pfam Description: Cyclin, N-terminal domain
  misc_feature (1)..(232): Homolog of NCBI NO: 15220120 NR Description: Cyclin A2;4; protein id: At1g80370.1 [Arabidopsis
  misc_feature (1)..(230): Homolog of NCBI NO: 15218225 NR Description: Cyclin A2;3; protein id: At1g15570.1, supported cDNA: gi_18175784, supported by cDNA: gi_20465756 [Arabidopsis >gi|18175785|gb|AAL59927.1| putative cyclin [Arabidopsis
  misc_feature (1)..(213): Homolog of NCBI NO: 25294181 NR Description: probable cyclin [imported] - Arabidopsis thaliana
  misc_feature (1)..(230): Homolog of NCBI NO: 1076444 NR Description: mitosis-specific cyclin CYC1 - rape
  misc_feature (1)..(230): Homolog of NCBI NO: 5420276 NR Description: cyclin A2 [Lycopersicon esculentum]
MRGILVDWLVEVSEEYTLVPDTLYLTVYLIDWFLHGNYVERQRLQLLGITCMLIASKYEEIHAPRIEEFCFITDNTYTRDQVLEMESQVLKHFSFQIYTPTSKTFLRRFLRAAQVSFPNQSLEMEFLANYLTELTLMDYPFLKFLPSIIAASAVFLAKWTLNQSSHPWNPTLEHYTTYKASDLKASVHALQDLQLNTKGCSLNSIRMKYRQDKFKSVAVFSSGELPDKLFIS

SEQ ID NO: 91147 - DNA, 1945 bp, Arabidopsis thaliana
  misc_feature (1)..(1945): Ceres Seq. ID no. 12726607
  misc_feature: MA Experiment ID: 20000171 Result: Down-regulated in Transcription
  misc_feature: MA Experiment 20000171 PARAMETER Experiment Name: At_42deg_Heat_P Parameter: Age (day) Value: 14
  misc_feature: MA Experiment 20000171 PARAMETER Experiment Name: At_42deg_Heat_P Parameter: Organism Value: A. thaliana
  misc_feature: MA Experiment 20000171 PARAMETER Experiment Name: At_42deg_Heat_P Parameter: Plant Line Value: WS
  misc_feature: MA Experiment 20000171 PARAMETER Experiment Name: At_42deg_Heat_P Parameter: Temperature (deg C) Value: 42 vs. 22
  misc_feature: MA Experiment 20000171 PARAMETER Experiment Name: At_42deg_Heat_P Parameter: Timepoint (hr) Value: 1
  misc_feature: MA Experiment 20000171 PARAMETER Experiment Name: At_42deg_Heat_P Parameter: Tissue Value: Aerial
  misc_feature: MA Experiment ID: 20000184 Result: Up-regulated in Transcription
  misc_feature: MA Experiment 20000184 PARAMETER Experiment Name: At_Shoots__P Parameter: Age (day) Value: 7
  misc_feature: MA Experiment 20000184 PARAMETER Experiment Name: At_Shoots__P Parameter: Tissue Value: Shoots vs. Whole Plant
  misc_feature: MA Experiment ID: 20000794 Result: Down-regulated in Transcription
  misc_feature: MA Experiment 20000794 PARAMETER Experiment Name: At_Petals_P Parameter: Age (day) Value: 23-25 days
  misc_feature: MA Experiment 20000794 PARAMETER Experiment Name: At_Petals_P Parameter: Plant Line Value: WS
  misc_feature: MA Experiment 20000794 PARAMETER Experiment Name: At_Petals_P Parameter: Tissue Value: Petals vs. Whole plant
caatcggaagatagaagtttcccaaaacttatcaaatctctgtgtatcgctcgccgacgaggcaggaaggacgaccaattgagacgttgacccttaatccgatttgaacaatctctctctctctctctctctctctctcttggtcgagattcataaaagtctcttctttcgtcttcttcgatctcggataatcacaaagtttatcttcttctttcttttttaaaaataaaatcagagagcagatcttgcgaatggatagcagttactctgtcatttccaaaacttcttacgttgagttacagaaaccgacggttaatgggaaacccagaaacaagttgcttccttctgatgaagaaagcttcgtcaatgattttgacgatgcccgtaatggtgttgggggtgaagatgctgatgatctcgatttcgatgtcgctgattacccactcgttcatggcaaatcatccaatcaaggatctgggatttacggtgctgttttcaatctcaccacttctattatcggcgccgggatcatggcattgcccgccaccatgaaagttctcggcttggttctagggtttgttttgattatcctcatggctcttttgtctgagattagtgttgagcttctggttagattttctgttctttacaagtccaaatcctacggcgaggttgttcaattcgctttggggaaaaccgctagggttttgtctgagatttgtatcattgtcaacaatggtggcgttctcgttgtttacttgattattatgggcgatgttatgtctggttctctccatcacattggggttttggatcaatggttagggaatgggttctgggatcaccgtaaagtgttgattttgattgttatggtcatcttcttggctcctctctgtgctttgaacaagattgattccttgagcgttacatcagctgcttctgttgctcttgctgttgtctttgtggttgtctgttttgttgtcgccaccatcaagcttatcgaaggaactatcgaccctccaaggttgtctcctgactttggttccaaacaagcaattttggaccttcttgtggtcattccgattatgtcaaacgcatacgtttgtcacttcaatgttcagccgatatacaacgagcttgaaggtcgatcacctcataagatgaaccgagttgggagaatcacaacagccatttgtgttgttgtctacgcttcaactgctgtatcgggttatctcctcttcggcaaggacaccgaatcagatatcttgaccaactttgatcaagatctcggtatccggttcagctctgcggtgaattacattgtcagaatcggctacattcttcatctagttctcgtcttccctgtgatccatttctccttgagagaaaccgtcaataccttactgtttgaaggctcgcctcctctatccgaaagcaaaaagagatctttgggactcactgtggtcttgctggctcttatttacattggctcaacgatgataccaaacatatggactgctttcaaattcacaggcgcaacatcagctgtttcacttggttttacattccctgctctgatcgcattgcggttagggaaacagagcaattcgttaagcttcgtggaaagatcagtgtcatggctgatgctaatcttggccgtagtggttagcattgttggaaccattggcaacatttacagcctcgagagcaaatcagattgatacttatagcagttttccaggatcttgtagatttatatagtcagagattctcagtccaataccgaaccggaaatcttcagcgactgctacatgcacctttaggatgtcgatcaatggcgtttgttcaggctaagcctaaagatttccggtttgtgaattatatgtatacagacacctgattcttatgattttattatatatacgcattttttttctgtttttct

SEQ ID NO: 91148 - protein, 489 aa, Arabidopsis thaliana
  peptide (1)..(489): Ceres Seq. ID no. 12726608
  misc_feature (1)..(489): Homolog of NCBI NO: 18412864 NR Description: expressed protein; protein id: At1g80510.1, by cDNA: gi_16226718 [Arabidopsis thaliana]
  misc_feature (1)..(359): Homolog of NCBI NO: 24461850 NR Description: CTV.3 [Poncirus trifoliata]
  misc_feature (380)..(489): Homolog of NCBI NO: 24461850 NR Description: CTV.3 [Poncirus trifoliata]
  misc_feature (64)..(484): Homolog of NCBI NO: 34898706 NR Description: hypothetical protein [Oryza sativa (japonica group)] >gi|11862972|dbj|BAB19353.1| hypothetical protein [Oryza
  misc_feature (51)..(487): Homolog of NCBI NO: 9758059 NR Description: amino acid transporter-like protein [Arabidopsis
  misc_feature (51)..(487): Homolog of NCBI NO: 15241555 NR Description: transporter -like protein; protein id:
  misc_feature (74)..(488): Homolog of NCBI NO: 18406463 NR Description: expressed protein; protein id: At3g30390.1, by cDNA: gi_15529154, supported by cDNA: gi_16226266 [Arabidopsis >gi|9294342|dbj|BAB02239.1|
  misc_feature (70)..(484): Homolog of NCBI NO: 15228851 NR Description: putative protein; protein id: At3g56200.1, by cDNA: gi_20453044 [Arabidopsis thaliana]
  misc_feature (75)..(446): Homolog of NCBI NO: 34907894 NR Description: P0439E11.11 [Oryza sativa (japonica
  misc_feature (70)..(489): Homolog of NCBI NO: 30688270 NR Description: amino acid transporter family [Arabidopsis
MDSSYSVISKTSYVELQKPTVNGKPRNKLLPSDEESFVNDFDDARNGVGGEDADDLDFDVADYPLVHGKSSNQGSGIYGAVFNLTTSIIGAGIMALPATMKVLGLVLGFVLIILMALLSEISVELLVRFSVLYKSKSYGEVVQFALGKTARVLSEICIIVNNGGVLVVYLIIMGDVMSGSLHHIGVLDQWLGNGFWDHRKVLILIVMVIFLAPLCALNKIDSLSVTSAASVALAVVFVVVCFVVATIKLIEGTIDPPRLSPDFGSKQAILDLLVVIPIMSNAYVCHFNVQPIYNELEGRSPHKMNRVGRITTAICVVVYASTAVSGYLLFGKDTESDILTNFDQDLGIRFSSAVNYIVRIGYILHLVLVFPVIHFSLRETVNTLLFEGSPPLSESKKRSLGLTVVLLALIYIGSTMIPNIWTAFKFTGATSAVSLGFTFPALIALRLGKQSNSLSFVERSVSWLMLILAVVVSIVGTIGNIYSLESKSD

SEQ ID NO: 91149 - protein, 396 aa, Arabidopsis thaliana
  peptide (1)..(396): Ceres Seq. ID no. 12726609
  misc_feature (1)..(396): Homolog of NCBI NO: 18412864 NR Description: expressed protein; protein id: At1g80510.1, by cDNA: gi_16226718 [Arabidopsis thaliana]
  misc_feature (1)..(266): Homolog of NCBI NO: 24461850 NR Description: CTV.3 [Poncirus trifoliata]
  misc_feature (287)..(396): Homolog of NCBI NO: 24461850 NR Description: CTV.3 [Poncirus trifoliata]
  misc_feature (1)..(391): Homolog of NCBI NO: 34898706 NR Description: hypothetical protein [Oryza sativa (japonica group)] >gi|11862972|dbj|BAB19353.1| hypothetical protein [Oryza
  misc_feature (1)..(394): Homolog of NCBI NO: 9758059 NR Description: amino acid transporter-like protein [Arabidopsis
  misc_feature (1)..(394): Homolog of NCBI NO: 15241555 NR Description: transporter -like protein; protein id:
  misc_feature (1)..(395): Homolog of NCBI NO: 18406463 NR Description: expressed protein; protein id: At3g30390.1, by cDNA: gi_15529154, supported by cDNA: gi_16226266 [Arabidopsis >gi|9294342|dbj|BAB02239.1|
  misc_feature (1)..(391): Homolog of NCBI NO: 15228851 NR Description: putative protein; protein id: At3g56200.1, by cDNA: gi_20453044 [Arabidopsis thaliana]
  misc_feature (1)..(353): Homolog of NCBI NO: 34907894 NR Description: P0439E11.11 [Oryza sativa (japonica
  misc_feature (1)..(396): Homolog of NCBI NO: 30688270 NR Description: amino acid transporter family [Arabidopsis
MALPATMKVLGLVLGFVLIILMALLSEISVELLVRFSVLYKSKSYGEVVQFALGKTARVLSEICIIVNNGGVLVVYLIIMGDVMSGSLHHIGVLDQWLGNGFWDHRKVLILIVMVIFLAPLCALNKIDSLSVTSAASVALAVVFVVVCFVVATIKLIEGTIDPPRLSPDFGSKQAILDLLVVIPIMSNAYVCHFNVQPIYNELEGRSPHKMNRVGRITTAICVVVYASTAVSGYLLFGKDTESDILTNFDQDLGIRFSSAVNYIVRIGYILHLVLVFPVIHFSLRETVNTLLFEGSPPLSESKKRSLGLTVVLLALIYIGSTMIPNIWTAFKFTGATSAVSLGFTFPALIALRLGKQSNSLSFVERSVSWLMLILAVVVSIVGTIGNIYSLESKSD

SEQ ID NO: 91150 - protein, 390 aa, Arabidopsis thaliana
  peptide (1)..(390): Ceres Seq. ID no. 12726610
  misc_feature (1)..(390): Homolog of NCBI NO: 18412864 NR Description: expressed protein; protein id: At1g80510.1, by cDNA: gi_16226718 [Arabidopsis thaliana]
  misc_feature (1)..(260): Homolog of NCBI NO: 24461850 NR Description: CTV.3 [Poncirus trifoliata]
  misc_feature (281)..(390): Homolog of NCBI NO: 24461850 NR Description: CTV.3 [Poncirus trifoliata]
  misc_feature (1)..(385): Homolog of NCBI NO: 34898706 NR Description: hypothetical protein [Oryza sativa (japonica group)] >gi|11862972|dbj|BAB19353.1| hypothetical protein [Oryza
  misc_feature (1)..(388): Homolog of NCBI NO: 9758059 NR Description: amino acid transporter-like protein [Arabidopsis
  misc_feature (1)..(388): Homolog of NCBI NO: 15241555 NR Description: transporter -like protein; protein id:
  misc_feature (1)..(389): Homolog of NCBI NO: 18406463 NR Description: expressed protein; protein id: At3g30390.1, by cDNA: gi_15529154, supported by cDNA: gi_16226266 [Arabidopsis >gi|9294342|dbj|BAB02239.1|
  misc_feature (1)..(385): Homolog of NCBI NO: 15228851 NR Description: putative protein; protein id: At3g56200.1, by cDNA: gi_20453044 [Arabidopsis thaliana]
  misc_feature (1)..(347): Homolog of NCBI NO: 34907894 NR Description: P0439E11.11 [Oryza sativa (japonica
  misc_feature (1)..(390): Homolog of NCBI NO: 30688270 NR Description: amino acid transporter family [Arabidopsis
MKVLGLVLGFVLIILMALLSEISVELLVRFSVLYKSKSYGEVVQFALGKTARVLSEICIIVNNGGVLVVYLIIMGDVMSGSLHHIGVLDQWLGNGFWDHRKVLILIVMVIFLAPLCALNKIDSLSVTSAASVALAVVFVVVCFVVATIKLIEGTIDPPRLSPDFGSKQAILDLLVVIPIMSNAYVCHFNVQPIYNELEGRSPHKMNRVGRITTAICVVVYASTAVSGYLLFGKDTESDILTNFDQDLGIRFSSAVNYIVRIGYILHLVLVFPVIHFSLRETVNTLLFEGSPPLSESKKRSLGLTVVLLALIYIGSTMIPNIWTAFKFTGATSAVSLGFTFPALIALRLGKQSNSLSFVERSVSWLMLILAVVVSIVGTIGNIYSLESKSD

SEQ ID NO: 91151 - DNA, 2007 bp, Arabidopsis thaliana
  misc_feature (1)..(2007): Ceres Seq. ID no. 12726614
  misc_feature: MA Experiment ID: 20000184 Result: Up-regulated in Transcription
  misc_feature: MA Experiment 20000184 PARAMETER Experiment Name: At_Shoots__P Parameter: Age (day) Value: 7
  misc_feature: MA Experiment 20000184 PARAMETER Experiment Name: At_Shoots__P Parameter: Tissue Value: Shoots vs. Whole Plant
  misc_feature: MA Experiment ID: 20000227 Result: Down-regulated in Transcription
  misc_feature: MA Experiment 20000227 PARAMETER Experiment Name: At_Root-Tips-vs-Tops_P Parameter: Tissue Value: Root Tips vs. Root Tops
  misc_feature: MA Experiment ID: 20001451 Result: Down-regulated in Transcription
  misc_feature: MA Experiment 20001451 PARAMETER Experiment Name: At_Far-red-induction_P Parameter: Age (day) Value: 7
  misc_feature: MA Experiment 20001451 PARAMETER Experiment Name: At_Far-red-induction_P Parameter: Light Value: Far-red vs. White
  misc_feature: MA Experiment 20001451 PARAMETER Experiment Name: At_Far-red-induction_P Parameter: Organism Value: A. thaliana
  misc_feature: MA Experiment 20001451 PARAMETER Experiment Name: At_Far-red-induction_P Parameter: Plant Line Value: Columbia
  misc_feature: MA Experiment 20001451 PARAMETER Experiment Name: At_Far-red-induction_P Parameter: Timepoint (hr) Value: 24
  misc_feature: MA Experiment 20001451 PARAMETER Experiment Name: At_Far-red-induction_P Parameter: Tissue Value: Whole Plant
  misc_feature: MA Experiment ID: 20001557 Result: Up-regulated in Transcription
  misc_feature: MA Experiment 20001557 PARAMETER Experiment Name: At_Drought_Soil_Dry_P Parameter: Age (day) Value: 27
  misc_feature: MA Experiment 20001557 PARAMETER Experiment Name: At_Drought_Soil_Dry_P Parameter: Organism Value: A. thaliana
  misc_feature: MA Experiment 20001557 PARAMETER Experiment Name: At_Drought_Soil_Dry_P Parameter: Plant Line Value: WS
  misc_feature: MA Experiment 20001557 PARAMETER Experiment Name: At_Drought_Soil_Dry_P Parameter: Post Timepoint (hr) Value: 3
  misc_feature: MA Experiment 20001557 PARAMETER Experiment Name: At_Drought_Soil_Dry_P Parameter: Post-Treatment Value: Re-Water vs. No Drought
  misc_feature: MA Experiment 20001557 PARAMETER Experiment Name: At_Drought_Soil_Dry_P Parameter: Timepoint (day) Value: 13
  misc_feature: MA Experiment 20001557 PARAMETER Experiment Name: At_Drought_Soil_Dry_P Parameter: Treatment Value: Drought vs. No Drought
gagtgagtctgattcatctcctctgtttaagcaaagcacttttctaaaatcccacaggagaagagagatcggaagagatgacgaagctggcggaaaaatcgggaagcagaccaccgtgggtgggattagcggcagccgcatgggttcaggtctcggcgggaagtggttcgacgttcccgctttactcctccgctctcaaatcggttttgggttttagccagcagcaggtcacgatccttggcgttgcttgtgatttgggtgaaaacatgggtcttcttcctggatacgccagtaacaagcttcctccatggtcgatgcttctcatcggagcttcctcttgtttcctcggcttcggcgttctttggctctccgtcagccaaatcgttcttggcttgcctttttggctgctttttgtagctctagctttagctaccaatagcaactcgtggttcggtacagcatctcttgtcaccaatatgaggaattttcctatgagccgaggccctgtggctggacttctcaaaggttatattgggatcagtggtgcagcattcactgtcttgttcagcatggtgcttcaccattcagctatggatctgcttctgtttcttacggttggtattccggttatatgcttaactgtgatgtatttcatccgcccctgtattccggctactggtgaagacccttctgagcccatgtatttcgcttttctgcttgtcactagtatactgtttgctgcttatcttgttgtgacgactgttttgagtgaggtgtttatactgcccagcatactcaaatatgttcttgtggctatcatggtgttacttttgttgtcgcctcttgcggttcccatcaagatgacacttttccgttcaaatgccaagagctctccactggggtcttcagacaatctagccaaagaggaaggtactcatgaagaaccgttgctgacaccttctacctcagcttcaaaccttgggcctatctttgagggagatgatgagtcggatatggaaatacttcttgctgaagcagaaggtgccgtgaagaagaagagaaaacccaggagaggtgaggatttcaagtttggccaagtttttgtcaaggcagatttctggctcctttggtttgtctacttcctcggcatgggttcaggtgttacagtctcgaacaacttggcacagatcggatttgcttttggtattaaggacacaacaatactcctgtgtcttttcagtttcttcaacttcataggccgtcttgcttcaggtgccatttctgagcactttgtgaggtcaagaacgcttccaagaacactatggatgggagccgcgcagctagttatggtgttcacattcctcctcttcgccatggctatcgaccacaccatttacgttgcgactgctctaatcggaatatgcatggggtttcagttcttatctatcgcaaccatctccgagctatttggtcttagacattttggaatcaacttcaacttcatactgctgggaaacccgcttggtgccaccattttctcggccattctcgcaggatacatctatgacaaggaggctgataagcaagggaagatgacctgcattggtccagattgcttccgagtaacattcttggttctagccggtgtttgtgggcttggaaccctgctgagcattattttgacagtgagaattcgcccggtttatcaagctctatatgcgtctggctcattccggttgcagccgcaatcaacgggtcattgatatatccagagagcgagaggctgtttagatgaaagaatatatataatataactacactcatagatgctatctacttttcattattattataggctcctactgtatcgtggggcatttttgtttgggtgtattctaagatttgtaactcttgtgttattccgctgtaaccggccaaaaaccggttggaagaacctatatgtatcggcttcttgatgaggttgtaaggttgttgtttgatagttgt

SEQ ID NO: 91152 - protein, 561 aa, Arabidopsis thaliana
  peptide (1)..(561): Ceres Seq. ID no. 12726615
  misc_feature (320)..(503): Pfam Name: Sugar (and other) transporter Pfam Description: Sugar (and other) transporter
  misc_feature (1)..(561): Homolog of NCBI NO: 15220164 NR Description: nodulin-like protein; protein id: At1g80530.1, by cDNA: gi_14334879, supported by cDNA: gi_15810606 [Arabidopsis
  misc_feature (1)..(559): Homolog of NCBI NO: 24461856 NR Description: nodulin-like protein [Poncirus trifoliata]
  misc_feature (4)..(561): Homolog of NCBI NO: 24413989 NR Description: nodulin-like protein [Oryza sativa (japonica
  misc_feature (7)..(558): Homolog of NCBI NO: 38345150 NR Description: OSJNBa0014K14.4 [Oryza sativa (japonica
  misc_feature (7)..(561): Homolog of NCBI NO: 37572921 NR Description: nodulin-like protein [Oryza sativa (japonica
  misc_feature (2)..(549): Homolog of NCBI NO: 15236224 NR Description: putative protein; protein id: At4g34950.1
  misc_feature (14)..(284): Homolog of NCBI NO: 18423161 NR Description: nodulin-like protein; protein id: At5g50520.1,
  misc_feature (309)..(547): Homolog of NCBI NO: 18423161 NR Description: nodulin-like protein; protein id: At5g50520.1,
  misc_feature (14)..(512): Homolog of NCBI NO: 15241312 NR Description: nodulin-like protein; protein id: At5g14120.1
  misc_feature (11)..(258): Homolog of NCBI NO: 29824365 NR Description: unknown protein [Arabidopsis thaliana]
MTKLAEKSGSRPPWVGLAAAAWVQVSAGSGSTFPLYSSALKSVLGFSQQQVTILGVACDLGENMGLLPGYASNKLPPWSMLLIGASSCFLGFGVLWLSVSQIVLGLPFWLLFVALALATNSNSWFGTASLVTNMRNFPMSRGPVAGLLKGYIGISGAAFTVLFSMVLHHSAMDLLLFLTVGIPVICLTVMYFIRPCIPATGEDPSEPMYFAFLLVTSILFAAYLVVTTVLSEVFILPSILKYVLVAIMVLLLLSPLAVPIKMTLFRSNAKSSPLGSSDNLAKEEGTHEEPLLTPSTSASNLGPIFEGDDESDMEILLAEAEGAVKKKRKPRRGEDFKFGQVFVKADFWLLWFVYFLGMGSGVTVSNNLAQIGFAFGIKDTTILLCLFSFFNFIGRLASGAISEHFVRSRTLPRTLWMGAAQLVMVFTFLLFAMAIDHTIYVATALIGICMGFQFLSIATISELFGLRHFGINFNFILLGNPLGATIFSAILAGYIYDKEADKQGKMTCIGPDCFRVTFLVLAGVCGLGTLLSIILTVRIRPVYQALYASGSFRLQPQSTGH

SEQ ID NO: 91153 - protein, 498 aa, Arabidopsis thaliana
  peptide (1)..(498): Ceres Seq. ID no. 12726616
  misc_feature (257)..(440): Pfam Name: Sugar (and other) transporter Pfam Description: Sugar (and other) transporter
  misc_feature (1)..(498): Homolog of NCBI NO: 15220164 NR Description: nodulin-like protein; protein id: At1g80530.1, by cDNA: gi_14334879, supported by cDNA: gi_15810606 [Arabidopsis
  misc_feature (1)..(496): Homolog of NCBI NO: 24461856 NR Description: nodulin-like protein [Poncirus trifoliata]
  misc_feature (1)..(498): Homolog of NCBI NO: 24413989 NR Description: nodulin-like protein [Oryza sativa (japonica
  misc_feature (1)..(495): Homolog of NCBI NO: 38345150 NR Description: OSJNBa0014K14.4 [Oryza sativa (japonica
  misc_feature (1)..(498): Homolog of NCBI NO: 37572921 NR Description: nodulin-like protein [Oryza sativa (japonica
  misc_feature (1)..(486): Homolog of NCBI NO: 15236224 NR Description: putative protein; protein id: At4g34950.1
  misc_feature (1)..(221): Homolog of NCBI NO: 18423161 NR Description: nodulin-like protein; protein id: At5g50520.1,
  misc_feature (246)..(484): Homolog of NCBI NO: 18423161 NR Description: nodulin-like protein; protein id: At5g50520.1,
  misc_feature (1)..(449): Homolog of NCBI NO: 15241312 NR Description: nodulin-like protein; protein id: At5g14120.1
  misc_feature (1)..(195): Homolog of NCBI NO: 29824365 NR Description: unknown protein [Arabidopsis thaliana]
MGLLPGYASNKLPPWSMLLIGASSCFLGFGVLWLSVSQIVLGLPFWLLFVALALATNSNSWFGTASLVTNMRNFPMSRGPVAGLLKGYIGISGAAFTVLFSMVLHHSAMDLLLFLTVGIPVICLTVMYFIRPCIPATGEDPSEPMYFAFLLVTSILFAAYLVVTTVLSEVFILPSILKYVLVAIMVLLLLSPLAVPIKMTLFRSNAKSSPLGSSDNLAKEEGTHEEPLLTPSTSASNLGPIFEGDDESDMEILLAEAEGAVKKKRKPRRGEDFKFGQVFVKADFWLLWFVYFLGMGSGVTVSNNLAQIGFAFGIKDTTILLCLFSFFNFIGRLASGAISEHFVRSRTLPRTLWMGAAQLVMVFTFLLFAMAIDHTIYVATALIGICMGFQFLSIATISELFGLRHFGINFNFILLGNPLGATIFSAILAGYIYDKEADKQGKMTCIGPDCFRVTFLVLAGVCGLGTLLSIILTVRIRPVYQALYASGSFRLQPQSTGH

SEQ ID NO: 91154 - protein, 482 aa, Arabidopsis thaliana
  peptide (1)..(482): Ceres Seq. ID no. 12726617
  misc_feature (241)..(424): Pfam Name: Sugar (and other) transporter Pfam Description: Sugar (and other) transporter
  misc_feature (1)..(482): Homolog of NCBI NO: 15220164 NR Description: nodulin-like protein; protein id: At1g80530.1, by cDNA: gi_14334879, supported by cDNA: gi_15810606 [Arabidopsis
  misc_feature (1)..(480): Homolog of NCBI NO: 24461856 NR Description: nodulin-like protein [Poncirus trifoliata]
  misc_feature (1)..(482): Homolog of NCBI NO: 24413989 NR Description: nodulin-like protein [Oryza sativa (japonica
  misc_feature (1)..(479): Homolog of NCBI NO: 38345150 NR Description: OSJNBa0014K14.4 [Oryza sativa (japonica
  misc_feature (1)..(482): Homolog of NCBI NO: 37572921 NR Description: nodulin-like protein [Oryza sativa (japonica
  misc_feature (1)..(470): Homolog of NCBI NO: 15236224 NR Description: putative protein; protein id: At4g34950.1
  misc_feature (1)..(205): Homolog of NCBI NO: 18423161 NR Description: nodulin-like protein; protein id: At5g50520.1,
  misc_feature (230)..(468): Homolog of NCBI NO: 18423161 NR Description: nodulin-like protein; protein id: At5g50520.1,
  misc_feature (1)..(433): Homolog of NCBI NO: 15241312 NR Description: nodulin-like protein; protein id: At5g14120.1
  misc_feature (1)..(179): Homolog of NCBI NO: 29824365 NR Description: unknown protein [Arabidopsis thaliana]
MLLIGASSCFLGFGVLWLSVSQIVLGLPFWLLFVALALATNSNSWFGTASLVTNMRNFPMSRGPVAGLLKGYIGISGAAFTVLFSMVLHHSAMDLLLFLTVGIPVICLTVMYFIRPCIPATGEDPSEPMYFAFLLVTSILFAAYLVVTTVLSEVFILPSILKYVLVAIMVLLLLSPLAVPIKMTLFRSNAKSSPLGSSDNLAKEEGTHEEPLLTPSTSASNLGPIFEGDDESDMEILLAEAEGAVKKKRKPRRGEDFKFGQVFVKADFWLLWFVYFLGMGSGVTVSNNLAQIGFAFGIKDTTILLCLFSFFNFIGRLASGAISEHFVRSRTLPRTLWMGAAQLVMVFTFLLFAMAIDHTIYVATALIGICMGFQFLSIATISELFGLRHFGINFNFILLGNPLGATIFSAILAGYIYDKEADKQGKMTCIGPDCFRVTFLVLAGVCGLGTLLSIILTVRIRPVYQALYASGSFRLQPQSTGH

SEQ ID NO: 91155 - DNA, 1233 bp, Arabidopsis thaliana
  misc_feature (1)..(1233): Ceres Seq. ID no. 12726693
  misc_feature: MA Experiment ID: 20001904 Result: Up-regulated in Transcription
  misc_feature: MA Experiment 20001904 PARAMETER Experiment Name: At_Drought_Reproduction_P Parameter: Age (day) Value: 37
  misc_feature: MA Experiment 20001904 PARAMETER Experiment Name: At_Drought_Reproduction_P Parameter: Organism Value: A. thaliana
  misc_feature: MA Experiment 20001904 PARAMETER Experiment Name: At_Drought_Reproduction_P Parameter: Plant Line Value: WS
  misc_feature: MA Experiment 20001904 PARAMETER Experiment Name: At_Drought_Reproduction_P Parameter: Timepoint (day) Value: 7
  misc_feature: MA Experiment 20001904 PARAMETER Experiment Name: At_Drought_Reproduction_P Parameter: Tissue Value: Rosettes
  misc_feature: MA Experiment 20001904 PARAMETER Experiment Name: At_Drought_Reproduction_P Parameter: Treatment Value: Drought vs. No Drought
  misc_feature: MA Experiment ID: 20001906 Result: Up-regulated in Transcription
  misc_feature: MA Experiment 20001906 PARAMETER Experiment Name: At_Drought_Reproduction_P Parameter: Age (day) Value: 35
  misc_feature: MA Experiment 20001906 PARAMETER Experiment Name: At_Drought_Reproduction_P Parameter: Organism Value: A. thaliana
  misc_feature: MA Experiment 20001906 PARAMETER Experiment Name: At_Drought_Reproduction_P Parameter: Plant Line Value: WS
  misc_feature: MA Experiment 20001906 PARAMETER Experiment Name: At_Drought_Reproduction_P Parameter: Timepoint (day) Value: 5
  misc_feature: MA Experiment 20001906 PARAMETER Experiment Name: At_Drought_Reproduction_P Parameter: Tissue Value: Siliques
  misc_feature: MA Experiment 20001906 PARAMETER Experiment Name: At_Drought_Reproduction_P Parameter: Treatment Value: Drought vs. No Drought
atggcgaagaaagctgtgttgattggaatcaattaccctggaaccaaggcggagctacggggatgcgtcaacgatgtccggagagtgcacaaatctctcgtggatcggtttggattctccgagagaaacatcactgagctgattgatactgacgagtcttccaccaaacctacagggaagaatattcgaagggcattgttgaatctagttgaatccgctaaaccgggtgatgttcttgtcgtccattacagtggacacgggacgaggttgccggcggagactggagaagacgatgatactggttatgatgagtgtattgttccttgtgatatgaatcttatcaccgatgatgagtttagagatcttgtggagaaagtaccaaaggaagcacacattacaatcatctcagactcttgtcacagtggtggtctcatcgatgaagctaaagagcagatcggagagagcacgaagaagaagccaaagaaagaatctggaggctcttcaggacttggaatcaaaggctttgtgcgtgaagctgtggaagaagcactggaatctaaagggatcgccattcctcaccacaaagatgagaaagacgaaaacaagactaaagagcttaaactagaagatggggcaaaagtccatgtcgtgaacaaatctctgcctctacaaactctaatcgatatcctcaagcaaaatacaggtaacaatgatatcgaagttgggaaaatcagaccaacccttttcaatgtgtttggagaagatgcatccccaaaggttaagaagttcatgaaagtgattctaacaaagctgcaagaaggtaaaactgaaggtgggatattgggaatgattgggaaactagctcaagagtttcttaagcataaactaaacgatgacgaagagtatgtgaaacccgcgatgaagacacatgttgggaacaagcaagaggtctatgcaggcgcgagcaatggttctcttgcggataacggtattttgattagtggttgccaaacagatcaaacttctgcagacgcgagtcctcaaggtcatcctgaaatggcttatggagcattcaccaatgctgtgcagatcatacttgaggagacaaagggtatgattacatacaaagaacttgttttgaaggcaaggaagcttcttaagaaacaaggcttttctcaacgaccaggactatattgcagtgatagttttgtgaatgctccgtttatttgttaa

SEQ ID NO: 91156 - protein, 410 aa, Arabidopsis thaliana
  peptide (1)..(410): Ceres Seq. ID no. 12726694
  misc_feature (3)..(410): Pfam Name: Caspase domain Pfam Description: Caspase domain
  misc_feature (1)..(410): Homolog of NCBI NO: 15219342 NR Description: hypothetical protein common family; protein id:
  misc_feature (1)..(410): Homolog of NCBI NO: 15219345 NR Description: hypothetical protein common family; protein id: supported by cDNA: gi_19347868 [Arabidopsis thaliana]
  misc_feature (1)..(410): Homolog of NCBI NO: 33304380 NR Description: metacaspase 7 [Arabidopsis thaliana]
  misc_feature (1)..(410): Homolog of NCBI NO: 4235430 NR Description: latex-abundant protein [Hevea brasiliensis]
  misc_feature (8)..(410): Homolog of NCBI NO: 23343885 NR Description: metacaspase 1 [Lycopersicon esculentum]
  misc_feature (180)..(410): Homolog of NCBI NO: 15219340 NR Description: hypothetical protein common family; protein id:
  misc_feature (1)..(181): Homolog of NCBI NO: 15219340 NR Description: hypothetical protein common family; protein id:
  misc_feature (1)..(410): Homolog of NCBI NO: 40644374 NR Description: metacaspase type II [Picea abies]
  misc_feature (1)..(410): Homolog of NCBI NO: 32482818 NR Description: metacaspase 4 [Arabidopsis thaliana]
  misc_feature (1)..(410): Homolog of NCBI NO: 37788557 NR Description: metacaspase 7 [Arabidopsis thaliana]
MAKKAVLIGINYPGTKAELRGCVNDVRRVHKSLVDRFGFSERNITELIDTDESSTKPTGKNIRRALLNLVESAKPGDVLVVHYSGHGTRLPAETGEDDDTGYDECIVPCDMNLITDDEFRDLVEKVPKEAHITIISDSCHSGGLIDEAKEQIGESTKKKPKKESGGSSGLGIKGFVREAVEEALESKGIAIPHHKDEKDENKTKELKLEDGAKVHVVNKSLPLQTLIDILKQNTGNNDIEVGKIRPTLFNVFGEDASPKVKKFMKVILTKLQEGKTEGGILGMIGKLAQEFLKHKLNDDEEYVKPAMKTHVGNKQEVYAGASNGSLADNGILISGCQTDQTSADASPQGHPEMAYGAFTNAVQIILEETKGMITYKELVLKARKLLKKQGFSQRPGLYCSDSFVNAPFIC

SEQ ID NO: 91157 - protein, 300 aa, Arabidopsis thaliana
  peptide (1)..(300): Ceres Seq. ID no. 12726695
  misc_feature (1)..(300): Pfam Name: Caspase domain Pfam Description: Caspase domain
  misc_feature (1)..(300): Homolog of NCBI NO: 15219342 NR Description: hypothetical protein common family; protein id:
  misc_feature (1)..(300): Homolog of NCBI NO: 15219345 NR Description: hypothetical protein common family; protein id: supported by cDNA: gi_19347868 [Arabidopsis thaliana]
  misc_feature (1)..(300): Homolog of NCBI NO: 33304380 NR Description: metacaspase 7 [Arabidopsis thaliana]
  misc_feature (1)..(300): Homolog of NCBI NO: 4235430 NR Description: latex-abundant protein [Hevea brasiliensis]
  misc_feature (1)..(300): Homolog of NCBI NO: 23343885 NR Description: metacaspase 1 [Lycopersicon esculentum]
  misc_feature (70)..(300): Homolog of NCBI NO: 15219340 NR Description: hypothetical protein common family; protein id:
  misc_feature (1)..(71): Homolog of NCBI NO: 15219340 NR Description: hypothetical protein common family; protein id:
  misc_feature (1)..(300): Homolog of NCBI NO: 40644374 NR Description: metacaspase type II [Picea abies]
  misc_feature (1)..(300): Homolog of NCBI NO: 32482818 NR Description: metacaspase 4 [Arabidopsis thaliana]
  misc_feature (1)..(300): Homolog of NCBI NO: 37788557 NR Description: metacaspase 7 [Arabidopsis thaliana]
MNLITDDEFRDLVEKVPKEAHITIISDSCHSGGLIDEAKEQIGESTKKKPKKESGGSSGLGIKGFVREAVEEALESKGIAIPHHKDEKDENKTKELKLEDGAKVHVVNKSLPLQTLIDILKQNTGNNDIEVGKIRPTLFNVFGEDASPKVKKFMKVILTKLQEGKTEGGILGMIGKLAQEFLKHKLNDDEEYVKPAMKTHVGNKQEVYAGASNGSLADNGILISGCQTDQTSADASPQGHPEMAYGAFTNAVQIILEETKGMITYKELVLKARKLLKKQGFSQRPGLYCSDSFVNAPFIC

SEQ ID NO: 91158 - DNA, 1641 bp, Arabidopsis thaliana
  misc_feature (1)..(1641): Ceres Seq. ID no. 12726700
  misc_feature: MA Experiment ID: 20001451 Result: Up-regulated in Transcription
  misc_feature: MA Experiment 20001451 PARAMETER Experiment Name: At_Far-red-induction_P Parameter: Age (day) Value: 7
  misc_feature: MA Experiment 20001451 PARAMETER Experiment Name: At_Far-red-induction_P Parameter: Light Value: Far-red vs. White
  misc_feature: MA Experiment 20001451 PARAMETER Experiment Name: At_Far-red-induction_P Parameter: Organism Value: A. thaliana
  misc_feature: MA Experiment 20001451 PARAMETER Experiment Name: At_Far-red-induction_P Parameter: Plant Line Value: Columbia
  misc_feature: MA Experiment 20001451 PARAMETER Experiment Name: At_Far-red-induction_P Parameter: Timepoint (hr) Value: 24
  misc_feature: MA Experiment 20001451 PARAMETER Experiment Name: At_Far-red-induction_P Parameter: Tissue Value: Whole Plant
atggattattatctgaataatgttatcttctcagttgttgtcacattttcgatcactctgaatattgtgtttctcataaaaagcgttgtcgcccgttttcttggtcgtcgtaagaaactgcctccatgcccacggggatttccgatcattgggaacttagtaggaatgctcaagaaccgaccaacctctaaatggatagttcgtgtaatgaacgatatgaagacggatatagcttgcttccggtttggtcgtgtccacgtcattgtcataacgtccgatgtgattgcccgagaagtcgttcgagagaaagacgcagtttttgcggacaggccagattcttactctgccgagtacattagtggcgggtacaatggggtagtgttcgacgagtatggagagagacaaatgaagatgaagaaagtgatgtcgtcggagttaatgtctacaaaggctttaaacttgttactcaaagttagaaacttagaatccgacaacctcctcgcgtatgttcataacctatacaacaaagatgagtccaagacaaaacacggcgccgtagtgaacgtgagagatattgtgtgcactcacacacacaatgtgaagatgagactcttgtttggtcggagacatttcaaggagacgacgatggacgggagtctcggacttatggagaaagaacattttgacgcaattttcgcggctcttgattgtttctttagcttttacgtagccgattactaccctttcttaagaggatggaacctccagggagaggaggctgagttaagagaagccgttgatgtgattgctaggtacaataagatgattatcgatgagaagatagagttgtggagggggcagaataaagactacaatcgtgcggagacgaagaatgatgttcctatgatcaaggattggctcgacattctcttcactcttaaagatgagaatgggaagccgttgcttaccccgcaagaaatcacacatctctctgtggatcttgatgtagtagggattgataatgcagtgaatgtaatagagtggacacttgcggaaatgttgaaccagagagagattctagaaaaagcggtggaagagatcgatatggttgtcggaaaagaaagacttgttcaagaatccgacgtaccaaatctaaactacgtcaaagcttgttgcagagagaccctgagacttcaccctaccaatcctttccttgtccctcacatggcacgtcatgacacaactctcgctggctatttcatcccaaaaggcagtcatattctagtgagtcgtccgggtgttggtcgaaaccctaagacatgggatgagccactcatctacaggcctgagcgccatataaccggcaacgaagtggtgttgactgaaccagacttacgacttgtttcatttggaactggtagacgcggctgcgttggagctaagcttggaacgtccatgattgttacgttgttgggtaggcttctccaagggttcgactggaccattcctcctggtacgacggacagagtcgagctagtcgagtcaaaagaaaatctgttcatggctaatcctttgatggcttgtgtgaagcccagattagatccaaacatgtacccgaaactctggaccggtccagcttga

SEQ ID NO: 91159 - protein, 546 aa, Arabidopsis thaliana
  peptide (1)..(546): Ceres Seq. ID no. 12726701
  misc_feature (1)..(546): Homolog of NCBI NO: 22330739 NR Description: cytochrome p450 family; protein id: At1g79370.1
  misc_feature (1)..(424): Homolog of NCBI NO: 7484901 NR Description: cytochrome P450tyr homolog YUP8H12R.1 - thaliana >gi|3152575|gb|AAC17056.1| Similar to cytochrome P450tyr from Sorghum bicolor. Gene is cut off at exon 3. [Arabidopsis
  misc_feature (13)..(541): Homolog of NCBI NO: 30696238 NR Description: cytochrome P450 family [Arabidopsis thaliana]
  misc_feature (10)..(540): Homolog of NCBI NO: 25518479 NR Description: hypothetical protein F3O9.21 - Arabidopsis >gi|4966362|gb|AAD34693.1|AC006341_21 Similar to gb|AF069494 P450 from Sinapis alba and is a member of the PF|00067 Cytochrome
  misc_feature (10)..(540): Homolog of NCBI NO: 30684842 NR Description: cytochrome P450, putative [Arabidopsis thaliana] putative cytochrome P450 protein [Arabidopsis thaliana]
  misc_feature (7)..(540): Homolog of NCBI NO: 10946208 NR Description: cytochrome P450 CYP79F2 [Arabidopsis thaliana]
  misc_feature (7)..(540): Homolog of NCBI NO: 30684835 NR Description: cytochrome P450 family [Arabidopsis thaliana]
  misc_feature (40)..(541): Homolog of NCBI NO: 5915822 NR Description: CYTOCHROME P450 79A1 (CYTOCHROME P450TYR)
  misc_feature (7)..(540): Homolog of NCBI NO: 25518051 NR Description: F3O9.20 protein - Arabidopsis thaliana Similar to gb|AF069494 cytochrome P450 from Sinapis alba and is a
  misc_feature (35)..(538): Homolog of NCBI NO: 34896662 NR Description: putative cytochrome p450tyr [Oryza sativa]
MDYYLNNVIFSVVVTFSITLNIVFLIKSVVARFLGRRKKLPPCPRGFPIIGNLVGMLKNRPTSKWIVRVMNDMKTDIACFRFGRVHVIVITSDVIAREVVREKDAVFADRPDSYSAEYISGGYNGVVFDEYGERQMKMKKVMSSELMSTKALNLLLKVRNLESDNLLAYVHNLYNKDESKTKHGAVVNVRDIVCTHTHNVKMRLLFGRRHFKETTMDGSLGLMEKEHFDAIFAALDCFFSFYVADYYPFLRGWNLQGEEAELREAVDVIARYNKMIIDEKIELWRGQNKDYNRAETKNDVPMIKDWLDILFTLKDENGKPLLTPQEITHLSVDLDVVGIDNAVNVIEWTLAEMLNQREILEKAVEEIDMVVGKERLVQESDVPNLNYVKACCRETLRLHPTNPFLVPHMARHDTTLAGYFIPKGSHILVSRPGVGRNPKTWDEPLIYRPERHITGNEVVLTEPDLRLVSFGTGRRGCVGAKLGTSMIVTLLGRLLQGFDWTIPPGTTDRVELVESKENLFMANPLMACVKPRLDPNMYPKLWTGPA

SEQ ID NO: 91160 - protein, 491 aa, Arabidopsis thaliana
  peptide (1)..(491): Ceres Seq. ID no. 12726702
  misc_feature (1)..(491): Homolog of NCBI NO: 22330739 NR Description: cytochrome p450 family; protein id: At1g79370.1
  misc_feature (1)..(369): Homolog of NCBI NO: 7484901 NR Description: cytochrome P450tyr homolog YUP8H12R.1 - thaliana >gi|3152575|gb|AAC17056.1| Similar to cytochrome P450tyr from Sorghum bicolor. Gene is cut off at exon 3. [Arabidopsis
  misc_feature (1)..(486): Homolog of NCBI NO: 30696238 NR Description: cytochrome P450 family [Arabidopsis thaliana]
  misc_feature (1)..(485): Homolog of NCBI NO: 25518479 NR Description: hypothetical protein F3O9.21 - Arabidopsis >gi|4966362|gb|AAD34693.1|AC006341_21 Similar to gb|AF069494 P450 from Sinapis alba and is a member of the PF|00067 Cytochrome
  misc_feature (1)..(485): Homolog of NCBI NO: 30684842 NR Description: cytochrome P450, putative [Arabidopsis thaliana] putative cytochrome P450 protein [Arabidopsis thaliana]
  misc_feature (1)..(485): Homolog of NCBI NO: 10946208 NR Description: cytochrome P450 CYP79F2 [Arabidopsis thaliana]
  misc_feature (1)..(485): Homolog of NCBI NO: 30684835 NR Description: cytochrome P450 family [Arabidopsis thaliana]
  misc_feature (1)..(486): Homolog of NCBI NO: 5915822 NR Description: CYTOCHROME P450 79A1 (CYTOCHROME P450TYR)
  misc_feature (1)..(485): Homolog of NCBI NO: 25518051 NR Description: F3O9.20 protein - Arabidopsis thaliana Similar to gb|AF069494 cytochrome P450 from Sinapis alba and is a
  misc_feature (1)..(483): Homolog of NCBI NO: 34896662 NR Description: putative cytochrome p450tyr [Oryza sativa]
MLKNRPTSKWIVRVMNDMKTDIACFRFGRVHVIVITSDVIAREVVREKDAVFADRPDSYSAEYISGGYNGVVFDEYGERQMKMKKVMSSELMSTKALNLLLKVRNLESDNLLAYVHNLYNKDESKTKHGAVVNVRDIVCTHTHNVKMRLLFGRRHFKETTMDGSLGLMEKEHFDAIFAALDCFFSFYVADYYPFLRGWNLQGEEAELREAVDVIARYNKMIIDEKIELWRGQNKDYNRAETKNDVPMIKDWLDILFTLKDENGKPLLTPQEITHLSVDLDVVGIDNAVNVIEWTLAEMLNQREILEKAVEEIDMVVGKERLVQESDVPNLNYVKACCRETLRLHPTNPFLVPHMARHDTTLAGYFIPKGSHILVSRPGVGRNPKTWDEPLIYRPERHITGNEVVLTEPDLRLVSFGTGRRGCVGAKLGTSMIVTLLGRLLQGFDWTIPPGTTDRVELVESKENLFMANPLMACVKPRLDPNMYPKLWTGPA

SEQ ID NO: 91161 - protein, 477 aa, Arabidopsis thaliana
  peptide (1)..(477): Ceres Seq. ID no. 12726703
  misc_feature (1)..(477): Homolog of NCBI NO: 22330739 NR Description: cytochrome p450 family; protein id: At1g79370.1
  misc_feature (1)..(355): Homolog of NCBI NO: 7484901 NR Description: cytochrome P450tyr homolog YUP8H12R.1 - thaliana >gi|3152575|gb|AAC17056.1| Similar to cytochrome P450tyr from Sorghum bicolor. Gene is cut off at exon 3. [Arabidopsis
  misc_feature (1)..(472): Homolog of NCBI NO: 30696238 NR Description: cytochrome P450 family [Arabidopsis thaliana]
  misc_feature (1)..(471): Homolog of NCBI NO: 25518479 NR Description: hypothetical protein F3O9.21 - Arabidopsis >gi|4966362|gb|AAD34693.1|AC006341_21 Similar to gb|AF069494 P450 from Sinapis alba and is a member of the PF|00067 Cytochrome
  misc_feature (1)..(471): Homolog of NCBI NO: 30684842 NR Description: cytochrome P450, putative [Arabidopsis thaliana] putative cytochrome P450 protein [Arabidopsis thaliana]
  misc_feature (1)..(471): Homolog of NCBI NO: 10946208 NR Description: cytochrome P450 CYP79F2 [Arabidopsis thaliana]
  misc_feature (1)..(471): Homolog of NCBI NO: 30684835 NR Description: cytochrome P450 family [Arabidopsis thaliana]
  misc_feature (1)..(472): Homolog of NCBI NO: 5915822 NR Description: CYTOCHROME P450 79A1 (CYTOCHROME P450TYR)
  misc_feature (1)..(471): Homolog of NCBI NO: 25518051 NR Description: F3O9.20 protein - Arabidopsis thaliana Similar to gb|AF069494 cytochrome P450 from Sinapis alba and is a
  misc_feature (1)..(469): Homolog of NCBI NO: 34896662 NR Description: putative cytochrome p450tyr [Oryza sativa]
MNDMKTDIACFRFGRVHVIVITSDVIAREVVREKDAVFADRPDSYSAEYISGGYNGVVFDEYGERQMKMKKVMSSELMSTKALNLLLKVRNLESDNLLAYVHNLYNKDESKTKHGAVVNVRDIVCTHTHNVKMRLLFGRRHFKETTMDGSLGLMEKEHFDAIFAALDCFFSFYVADYYPFLRGWNLQGEEAELREAVDVIARYNKMIIDEKIELWRGQNKDYNRAETKNDVPMIKDWLDILFTLKDENGKPLLTPQEITHLSVDLDVVGIDNAVNVIEWTLAEMLNQREILEKAVEEIDMVVGKERLVQESDVPNLNYVKACCRETLRLHPTNPFLVPHMARHDTTLAGYFIPKGSHILVSRPGVGRNPKTWDEPLIYRPERHITGNEVVLTEPDLRLVSFGTGRRGCVGAKLGTSMIVTLLGRLLQGFDWTIPPGTTDRVELVESKENLFMANPLMACVKPRLDPNMYPKLWTGPA

SEQ ID NO: 91162 - DNA, 3747 bp, Arabidopsis thaliana
  misc_feature (1)..(3747): Ceres Seq. ID no. 12726712
  misc_feature: MA Experiment ID: 20000314 Result: Up-regulated in Transcription
  misc_feature: MA Experiment 20000314 PARAMETER Experiment Name: At_14day_Shoots-Roots_Sub_P Parameter: Age (day) Value: 14
  misc_feature: MA Experiment 20000314 PARAMETER Experiment Name: At_14day_Shoots-Roots_Sub_P Parameter: Organism Value: A. thaliana
  misc_feature: MA Experiment 20000314 PARAMETER Experiment Name: At_14day_Shoots-Roots_Sub_P Parameter: Plant Line Value: WS
  misc_feature: MA Experiment 20000314 PARAMETER Experiment Name: At_14day_Shoots-Roots_Sub_P Parameter: Tissue Value: Roots vs. Whole Plant
  misc_feature: MA Experiment ID: 20000315 Result: Down-regulated in Transcription
  misc_feature: MA Experiment 20000315 PARAMETER Experiment Name: At_14day_Shoots-Roots_Sub_P Parameter: Age (day) Value: 14
  misc_feature: MA Experiment 20000315 PARAMETER Experiment Name: At_14day_Shoots-Roots_Sub_P Parameter: Organism Value: A. thaliana
  misc_feature: MA Experiment 20000315 PARAMETER Experiment Name: At_14day_Shoots-Roots_Sub_P Parameter: Plant Line Value: WS
  misc_feature: MA Experiment 20000315 PARAMETER Experiment Name: At_14day_Shoots-Roots_Sub_P Parameter: Tissue Value: Shoots vs. Whole Plant
  misc_feature: MA Experiment ID: 20000327 Result: Down-regulated in Transcription
  misc_feature: MA Experiment 20000327 PARAMETER Experiment Name: At_42deg_Heat_Sub_P Parameter: Age (day) Value: 14
  misc_feature: MA Experiment 20000327 PARAMETER Experiment Name: At_42deg_Heat_Sub_P Parameter: Organism Value: A. thaliana
  misc_feature: MA Experiment 20000327 PARAMETER Experiment Name: At_42deg_Heat_Sub_P Parameter: Plant Line Value: WS
  misc_feature: MA Experiment 20000327 PARAMETER Experiment Name: At_42deg_Heat_Sub_P Parameter: Temperature (deg C) Value: 42 vs. 22
  misc_feature: MA Experiment 20000327 PARAMETER Experiment Name: At_42deg_Heat_Sub_P Parameter: Timepoint (hr) Value: 1
  misc_feature: MA Experiment 20000327 PARAMETER Experiment Name: At_42deg_Heat_Sub_P Parameter: Tissue Value: Aerial
  misc_feature: MA Experiment ID: 20000328 Result: Down-regulated in Transcription
  misc_feature: MA Experiment 20000328 PARAMETER Experiment Name: At_42deg_Heat_Sub_P Parameter: Age (day) Value: 14
  misc_feature: MA Experiment 20000328 PARAMETER Experiment Name: At_42deg_Heat_Sub_P Parameter: Organism Value: A. thaliana
  misc_feature: MA Experiment 20000328 PARAMETER Experiment Name: At_42deg_Heat_Sub_P Parameter: Plant Line Value: WS
  misc_feature: MA Experiment 20000328 PARAMETER Experiment Name: At_42deg_Heat_Sub_P Parameter: Temperature (deg C) Value: 42 vs. 22
  misc_feature: MA Experiment 20000328 PARAMETER Experiment Name: At_42deg_Heat_Sub_P Parameter: Timepoint (hr) Value: 6
  misc_feature: MA Experiment 20000328 PARAMETER Experiment Name: At_42deg_Heat_Sub_P Parameter: Tissue Value: Aerial
atggataaagctagacatcaacagctttttcagcattccatggaacctggttatagaaacgagactgttcctcaaccatttatgcctgatcaaacagggagcgcgagtgctaatatgcgacctcccaattctaatggttcagatgttaaggcggtgcataacttctccatacaaacaggtgaggaattctctcttgagtttatgcgtgatcgggtgattcctcagaggtcttccaatcccaatggagctggcgacatgaactataacactggttatatggagcttcgaggcttgatagggataagtcacacaggatctgagtgtgcttcagatgtctcaaggttcagcactgtggaaaatggcaccagtgatattgagaggactaactcttcgcttcacgagtttggaaataaactaaatcatgtccagtcagcaccacaagctttactaagtaaagatagcagtgtaggaaatttacatggatacaagaacacgtcttcttcagcctcaggtagtgtaacagcaaaggtgaagatcctttgcagtttcggtgggaaaatacttccacgtccaggtgattcaaagcttcgatacgttggaggtgaaacacacattatatccataagaaaggatatatcttggcaggagcttaggcaaaaaatccttgaaatctattaccaaacacgtgttgtaaagtatcagcttcctggtgaagatcttgacgcgttggtgtctgtatcatctgaagaagatctccagaatatgctggaagaatataatgagatggaaaaccgtgggggatctcagaagcttaggatgtttcttttctccatcagtgatatggatgatgctcttctgggggttaacaaaaatgacggcgactctgagtttcaatatgttgtagctgtaaatggcatggacattggatcaggaaagaactcgacccttcttgggcttgacagctcttcagcaaacaacttagctgagcttgatgtgcggaacactgaggggatcaataccattgctggagatgttgttggagtcggcgcatcacagttaatggtgaatggtttccaacaaacgtctgctcaacagtctgagtctattccaccaagctcatcgcttcattattctcaatctattccactgaatgctgcatatcagttgcagcaatctgttccgccaagctctgctcttcattatccccagtccattaccccaggttcctctcttcagtatccccaatctattacgccaggctcctcttatcagtatccacaatccatcatacctggttctgccagctcctatggaatatacccacaatattatgggcatgtggttcaacatggagaaagagaacggtttcctctctatcctgatcacagttctaactactccgctatcggggaaactaccagttccataccgatccaagggcatgtcagtcagcaaggtggctgggctgaagggtatccgtaccctggcagcacacccaaaagcacacaagcgctagcagaggagcaaaaagtatcatctgatatgaaaattcgtgaggaagttgagcctgaaaaccgtaaaactccggggaatgatcaccagaatcctccccaaatagatgatgttgaggtgaggaatcacaatcaggtccgggagatggcagttgcaacaactccacctagccaggatgcacatttactaccccctagtagagatccacggcagaacactactgcaaaacctgctacctaccgtgatgctgttattactgggcaggttcctctatctggtattgaagatcagctttcaacttcaagcagtacctatgcccctgttcatagcgactctgagtcaaatttaattgatcttaactacccggagcctgagcagtcttcccaaagggtatattgctcagagagaatacctcgtgaacagctagaattgctaaatcgtttgtcgaagtccgataactcattaagctctcagttcgtaacgtctgagtcaccagcaaacactgcacagcaagattcaggaaaagaagcggttggaaagtcacatgacgaattcaagactgttaatgatgatgccaatcaccatacgcacaaagatgtggaaacaatctttgaaaaagtaggagtatcagatgaaactttggaatccgagcccctgcacaagattgtaaatcctgacgatgcaaacaagaacagagtagtcaatggggcagatactgaaattggtgtttccaacttgagccatgtaaacgcagccatgagtcatgttattcctgaagagcaagcttcgctgcagggagatattcttattgatatcaatgaccggtttcctcgtgacttcctctctgaaatattctcacaggcaatctcagaggatacatccactgtccgtccatatcctcacgatggagctgctgttagcatgaatgtgcaaaatcacgatcgtaaaaactggtcatattttcagcagctggctgaagatcagtttatccaaagagatgttgtacttgaccaagctgattctcgcattccatctgaccgtaaagatggtggagagagctccagattgccttatgtctcgccattgagtagagatggtatttcaacaaaccttgctaatcctcagttgactttaggtcaagattatgggggtaatttttctgaaaaggatgggggtggcactggcagcattccccctgctctagagaatgaacagatgaaggtcactgagagtgaggaatttggtgccatggtggagaatcttaggacgccggattctgaaccaaaggatgaaaagacagaaacaaggcatgctgcgcttcctccacttggctcagagtttgactacagtggcttgcagatcattaagaatgaagatcttgaggagttgagggagcttggttctggtacttttggaacggtgtatcatgggaagtggagaggatcagatgtcgctatcaagaggataaagaagagttgctttgctgggcggtcatcagagcaagagagattgactggtgaattttggggggaagctgaaattctttcaaagcttcatcatccgaacgtggtagcattttatggtgttgtaaaagacgggcctggagggaccttggcgactgtgacagagtacatggttgatggttctctgaggcatgttctggtccggaaggacaggcatcttgatcgtcgtaagagactaatcattgccatggatgctgcatttggaatggaatatttacactccaaaaacactgttcactttgatttgaaatgtgacaatttacttgtgaacttgaaagatccttctcgcccaatctgcaaggttggtgactttggtttgtcaaaaatcaagagaaatacgttggtatctggtggtgtacgtggaaccttaccgtggatggcaccagagcttctaaacgggagcagtagcaaagtttctgaaaaggttgatgttttctctttcggtatcgttctgtgggagattctaaccggagaggaaccatatgccaatatgcactatggggcaataataggtgggatagtgaacaacacactgagaccaaccataccaggcttctgtgacgatgaatggagaacactaatggaggaatgttgggcaccaaacccaatggcaagaccatctttcacagagatagctggtcgcttacgagtaatgtcatcagcagcaacttcaactcaatccaagccatcagctcacagggcttccaaatga

SEQ ID NO: 91163 - protein, 1248 aa, Arabidopsis thaliana
  peptide (1)..(1248): Ceres Seq. ID no. 12726713
  misc_feature (191)..(278): Pfam Name: PB1 domain Pfam Description: PB1 domain
  misc_feature (373)..(719): Homolog of NCBI NO: 15219183 NR Description: putative Ser/Thr protein kinase; protein id:
  misc_feature (1)..(1248): Homolog of NCBI NO: 15226883 NR Description: putative protein kinase; protein id: At2g35050.1
  misc_feature (409)..(875): Homolog of NCBI NO: 15219183 NR Description: putative Ser/Thr protein kinase; protein id:
  misc_feature (851)..(1233): Homolog of NCBI NO: 15219796 NR Description: putative Ser/Thr protein kinase; protein id:
  misc_feature (177)..(315): Homolog of NCBI NO: 15219796 NR Description: putative Ser/Thr protein kinase; protein id:
  misc_feature (900)..(1238): Homolog of NCBI NO: 15232679 NR Description: protein kinase - like protein; protein id:
  misc_feature (150)..(426): Homolog of NCBI NO: 15232679 NR Description: protein kinase - like protein; protein id:
  misc_feature (933)..(1233): Homolog of NCBI NO: 25406805 NR Description: hypothetical protein [imported] - Arabidopsis >gi|2494111|gb|AAB80620.1| Contains similarity to Glycine protein
  misc_feature (84)..(315): Homolog of NCBI NO: 25406805 NR Description: hypothetical protein [imported] - Arabidopsis >gi|2494111|gb|AAB80620.1| Contains similarity to Glycine protein
  misc_feature (914)..(1233): Homolog of NCBI NO: 15242791 NR Description: putative protein; protein id: At5g57610.1 thaliana] >gi|9758322|dbj|BAB08796.1| contains similarity to
MDKARHQQLFQHSMEPGYRNETVPQPFMPDQTGSASANMRPPNSNGSDVKAVHNFSIQTGEEFSLEFMRDRVIPQRSSNPNGAGDMNYNTGYMELRGLIGISHTGSECASDVSRFSTVENGTSDIERTNSSLHEFGNKLNHVQSAPQALLSKDSSVGNLHGYKNTSSSASGSVTAKVKILCSFGGKILPRPGDSKLRYVGGETHIISIRKDISWQELRQKILEIYYQTRVVKYQLPGEDLDALVSVSSEEDLQNMLEEYNEMENRGGSQKLRMFLFSISDMDDALLGVNKNDGDSEFQYVVAVNGMDIGSGKNSTLLGLDSSSANNLAELDVRNTEGINTIAGDVVGVGASQLMVNGFQQTSAQQSESIPPSSSLHYSQSIPLNAAYQLQQSVPPSSALHYPQSITPGSSLQYPQSITPGSSYQYPQSIIPGSASSYGIYPQYYGHVVQHGERERFPLYPDHSSNYSAIGETTSSIPIQGHVSQQGGWAEGYPYPGSTPKSTQALAEEQKVSSDMKIREEVEPENRKTPGNDHQNPPQIDDVEVRNHNQVREMAVATTPPSQDAHLLPPSRDPRQNTTAKPATYRDAVITGQVPLSGIEDQLSTSSSTYAPVHSDSESNLIDLNYPEPEQSSQRVYCSERIPREQLELLNRLSKSDNSLSSQFVTSESPANTAQQDSGKEAVGKSHDEFKTVNDDANHHTHKDVETIFEKVGVSDETLESEPLHKIVNPDDANKNRVVNGADTEIGVSNLSHVNAAMSHVIPEEQASLQGDILIDINDRFPRDFLSEIFSQAISEDTSTVRPYPHDGAAVSMNVQNHDRKNWSYFQQLAEDQFIQRDVVLDQADSRIPSDRKDGGESSRLPYVSPLSRDGISTNLANPQLTLGQDYGGNFSEKDGGGTGSIPPALENEQMKVTESEEFGAMVENLRTPDSEPKDEKTETRHAALPPLGSEFDYSGLQIIKNEDLEELRELGSGTFGTVYHGKWRGSDVAIKRIKKSCFAGRSSEQERLTGEFWGEAEILSKLHHPNVVAFYGVVKDGPGGTLATVTEYMVDGSLRHVLVRKDRHLDRRKRLIIAMDAAFGMEYLHSKNTVHFDLKCDNLLVNLKDPSRPICKVGDFGLSKIKRNTLVSGGVRGTLPWMAPELLNGSSSKVSEKVDVFSFGIVLWEILTGEEPYANMHYGAIIGGIVNNTLRPTIPGFCDDEWRTLMEECWAPNPMARPSFTEIAGRLRVMSSAATSTQSKPSAHRASK

SEQ ID NO: 91164 - protein, 1235 aa, Arabidopsis thaliana
  peptide (1)..(1235): Ceres Seq. ID no. 12726714
  misc_feature (178)..(265): Pfam Name: PB1 domain Pfam Description: PB1 domain
  misc_feature (360)..(706): Homolog of NCBI NO: 15219183 NR Description: putative Ser/Thr protein kinase; protein id:
  misc_feature (1)..(1235): Homolog of NCBI NO: 15226883 NR Description: putative protein kinase; protein id: At2g35050.1
  misc_feature (396)..(862): Homolog of NCBI NO: 15219183 NR Description: putative Ser/Thr protein kinase; protein id:
  misc_feature (838)..(1220): Homolog of NCBI NO: 15219796 NR Description: putative Ser/Thr protein kinase; protein id:
  misc_feature (164)..(302): Homolog of NCBI NO: 15219796 NR Description: putative Ser/Thr protein kinase; protein id:
  misc_feature (887)..(1225): Homolog of NCBI NO: 15232679 NR Description: protein kinase - like protein; protein id:
  misc_feature (137)..(413): Homolog of NCBI NO: 15232679 NR Description: protein kinase - like protein; protein id:
  misc_feature (920)..(1220): Homolog of NCBI NO: 25406805 NR Description: hypothetical protein [imported] - Arabidopsis >gi|2494111|gb|AAB80620.1| Contains similarity to Glycine protein
  misc_feature (71)..(302): Homolog of NCBI NO: 25406805 NR Description: hypothetical protein [imported] - Arabidopsis >gi|2494111|gb|AAB80620.1| Contains similarity to Glycine protein
  misc_feature (901)..(1220): Homolog of NCBI NO: 15242791 NR Description: putative protein; protein id: At5g57610.1 thaliana] >gi|9758322|dbj|BAB08796.1| contains similarity to
MEPGYRNETVPQPFMPDQTGSASANMRPPNSNGSDVKAVHNFSIQTGEEFSLEFMRDRVIPQRSSNPNGAGDMNYNTGYMELRGLIGISHTGSECASDVSRFSTVENGTSDIERTNSSLHEFGNKLNHVQSAPQALLSKDSSVGNLHGYKNTSSSASGSVTAKVKILCSFGGKILPRPGDSKLRYVGGETHIISIRKDISWQELRQKILEIYYQTRVVKYQLPGEDLDALVSVSSEEDLQNMLEEYNEMENRGGSQKLRMFLFSISDMDDALLGVNKNDGDSEFQYVVAVNGMDIGSGKNSTLLGLDSSSANNLAELDVRNTEGINTIAGDVVGVGASQLMVNGFQQTSAQQSESIPPSSSLHYSQSIPLNAAYQLQQSVPPSSALHYPQSITPGSSLQYPQSITPGSSYQYPQSIIPGSASSYGIYPQYYGHVVQHGERERFPLYPDHSSNYSAIGETTSSIPIQGHVSQQGGWAEGYPYPGSTPKSTQALAEEQKVSSDMKIREEVEPENRKTPGNDHQNPPQIDDVEVRNHNQVREMAVATTPPSQDAHLLPPSRDPRQNTTAKPATYRDAVITGQVPLSGIEDQLSTSSSTYAPVHSDSESNLIDLNYPEPEQSSQRVYCSERIPREQLELLNRLSKSDNSLSSQFVTSESPANTAQQDSGKEAVGKSHDEFKTVNDDANHHTHKDVETIFEKVGVSDETLESEPLHKIVNPDDANKNRVVNGADTEIGVSNLSHVNAAMSHVIPEEQASLQGDILIDINDRFPRDFLSEIFSQAISEDTSTVRPYPHDGAAVSMNVQNHDRKNWSYFQQLAEDQFIQRDVVLDQADSRIPSDRKDGGESSRLPYVSPLSRDGISTNLANPQLTLGQDYGGNFSEKDGGGTGSIPPALENEQMKVTESEEFGAMVENLRTPDSEPKDEKTETRHAALPPLGSEFDYSGLQIIKNEDLEELRELGSGTFGTVYHGKWRGSDVAIKRIKKSCFAGRSSEQERLTGEFWGEAEILSKLHHPNVVAFYGVVKDGPGGTLATVTEYMVDGSLRHVLVRKDRHLDRRKRLIIAMDAAFGMEYLHSKNTVHFDLKCDNLLVNLKDPSRPICKVGDFGLSKIKRNTLVSGGVRGTLPWMAPELLNGSSSKVSEKVDVFSFGIVLWEILTGEEPYANMHYGAIIGGIVNNTLRPTIPGFCDDEWRTLMEECWAPNPMARPSFTEIAGRLRVMSSAATSTQSKPSAHRASK

SEQ ID NO: 91165 - protein, 1221 aa, Arabidopsis thaliana
  peptide (1)..(1221): Ceres Seq. ID no. 12726715
  misc_feature (164)..(251): Pfam Name: PB1 domain Pfam Description: PB1 domain
  misc_feature (346)..(692): Homolog of NCBI NO: 15219183 NR Description: putative Ser/Thr protein kinase; protein id:
  misc_feature (1)..(1221): Homolog of NCBI NO: 15226883 NR Description: putative protein kinase; protein id: At2g35050.1
  misc_feature (382)..(848): Homolog of NCBI NO: 15219183 NR Description: putative Ser/Thr protein kinase; protein id:
  misc_feature (824)..(1206): Homolog of NCBI NO: 15219796 NR Description: putative Ser/Thr protein kinase; protein id:
  misc_feature (150)..(288): Homolog of NCBI NO: 15219796 NR Description: putative Ser/Thr protein kinase; protein id:
  misc_feature (873)..(1211): Homolog of NCBI NO: 15232679 NR Description: protein kinase - like protein; protein id:
  misc_feature (123)..(399): Homolog of NCBI NO: 15232679 NR Description: protein kinase - like protein; protein id:
  misc_feature (906)..(1206): Homolog of NCBI NO: 25406805 NR Description: hypothetical protein [imported] - Arabidopsis >gi|2494111|gb|AAB80620.1| Contains similarity to Glycine protein
  misc_feature (57)..(288): Homolog of NCBI NO: 25406805 NR Description: hypothetical protein [imported] - Arabidopsis >gi|2494111|gb|AAB80620.1| Contains similarity to Glycine protein
  misc_feature (887)..(1206): Homolog of NCBI NO: 15242791 NR Description: putative protein; protein id: At5g57610.1 thaliana] >gi|9758322|dbj|BAB08796.1| contains similarity to
MPDQTGSASANMRPPNSNGSDVKAVHNFSIQTGEEFSLEFMRDRVIPQRSSNPNGAGDMNYNTGYMELRGLIGISHTGSECASDVSRFSTVENGTSDIERTNSSLHEFGNKLNHVQSAPQALLSKDSSVGNLHGYKNTSSSASGSVTAKVKILCSFGGKILPRPGDSKLRYVGGETHIISIRKDISWQELRQKILEIYYQTRVVKYQLPGEDLDALVSVSSEEDLQNMLEEYNEMENRGGSQKLRMFLFSISDMDDALLGVNKNDGDSEFQYVVAVNGMDIGSGKNSTLLGLDSSSANNLAELDVRNTEGINTIAGDVVGVGASQLMVNGFQQTSAQQSESIPPSSSLHYSQSIPLNAAYQLQQSVPPSSALHYPQSITPGSSLQYPQSITPGSSYQYPQSIIPGSASSYGIYPQYYGHVVQHGERERFPLYPDHSSNYSAIGETTSSIPIQGHVSQQGGWAEGYPYPGSTPKSTQALAEEQKVSSDMKIREEVEPENRKTPGNDHQNPPQIDDVEVRNHNQVREMAVATTPPSQDAHLLPPSRDPRQNTTAKPATYRDAVITGQVPLSGIEDQLSTSSSTYAPVHSDSESNLIDLNYPEPEQSSQRVYCSERIPREQLELLNRLSKSDNSLSSQFVTSESPANTAQQDSGKEAVGKSHDEFKTVNDDANHHTHKDVETIFEKVGVSDETLESEPLHKIVNPDDANKNRVVNGADTEIGVSNLSHVNAAMSHVIPEEQASLQGDILIDINDRFPRDFLSEIFSQAISEDTSTVRPYPHDGAAVSMNVQNHDRKNWSYFQQLAEDQFIQRDVVLDQADSRIPSDRKDGGESSRLPYVSPLSRDGISTNLANPQLTLGQDYGGNFSEKDGGGTGSIPPALENEQMKVTESEEFGAMVENLRTPDSEPKDEKTETRHAALPPLGSEFDYSGLQIIKNEDLEELRELGSGTFGTVYHGKWRGSDVAIKRIKKSCFAGRSSEQERLTGEFWGEAEILSKLHHPNVVAFYGVVKDGPGGTLATVTEYMVDGSLRHVLVRKDRHLDRRKRLIIAMDAAFGMEYLHSKNTVHFDLKCDNLLVNLKDPSRPICKVGDFGLSKIKRNTLVSGGVRGTLPWMAPELLNGSSSKVSEKVDVFSFGIVLWEILTGEEPYANMHYGAIIGGIVNNTLRPTIPGFCDDEWRTLMEECWAPNPMARPSFTEIAGRLRVMSSAATSTQSKPSAHRASK

SEQ ID NO: 91166 - DNA, 1941 bp, Arabidopsis thaliana
  misc_feature (1)..(1941): Ceres Seq. ID no. 12726723
  misc_feature: MA Experiment ID: 20000171 Result: Down-regulated in Transcription
  misc_feature: MA Experiment 20000171 PARAMETER Experiment Name: At_42deg_Heat_P Parameter: Age (day) Value: 14
  misc_feature: MA Experiment 20000171 PARAMETER Experiment Name: At_42deg_Heat_P Parameter: Organism Value: A. thaliana
  misc_feature: MA Experiment 20000171 PARAMETER Experiment Name: At_42deg_Heat_P Parameter: Plant Line Value: WS
  misc_feature: MA Experiment 20000171 PARAMETER Experiment Name: At_42deg_Heat_P Parameter: Temperature (deg C) Value: 42 vs. 22
  misc_feature: MA Experiment 20000171 PARAMETER Experiment Name: At_42deg_Heat_P Parameter: Timepoint (hr) Value: 1
  misc_feature: MA Experiment 20000171 PARAMETER Experiment Name: At_42deg_Heat_P Parameter: Tissue Value: Aerial
  misc_feature: MA Experiment ID: 20000173 Result: Down-regulated in Transcription
  misc_feature: MA Experiment 20000173 PARAMETER Experiment Name: At_42deg_Heat_P Parameter: Age (day) Value: 14
  misc_feature: MA Experiment 20000173 PARAMETER Experiment Name: At_42deg_Heat_P Parameter: Organism Value: A. thaliana
  misc_feature: MA Experiment 20000173 PARAMETER Experiment Name: At_42deg_Heat_P Parameter: Plant Line Value: WS
  misc_feature: MA Experiment 20000173 PARAMETER Experiment Name: At_42deg_Heat_P Parameter: Temperature (deg C) Value: 42 vs. 22
  misc_feature: MA Experiment 20000173 PARAMETER Experiment Name: At_42deg_Heat_P Parameter: Timepoint (hr) Value: 6
  misc_feature: MA Experiment 20000173 PARAMETER Experiment Name: At_42deg_Heat_P Parameter: Tissue Value: Aerial
  misc_feature: MA Experiment ID: 20000184 Result: Down-regulated in Transcription
  misc_feature: MA Experiment 20000184 PARAMETER Experiment Name: At_Shoots__P Parameter: Age (day) Value: 7
  misc_feature: MA Experiment 20000184 PARAMETER Experiment Name: At_Shoots__P Parameter: Tissue Value: Shoots vs. Whole Plant
  misc_feature: MA Experiment ID: 20000234 Result: Down-regulated in Transcription
  misc_feature: MA Experiment 20000234 PARAMETER Experiment Name: At_Siliques_P Parameter: Age (day) Value: 21
  misc_feature: MA Experiment 20000234 PARAMETER Experiment Name: At_Siliques_P Parameter: Organism Value: A. thaliana
  misc_feature: MA Experiment 20000234 PARAMETER Experiment Name: At_Siliques_P Parameter: Plant Line Value: WS
  misc_feature: MA Experiment 20000234 PARAMETER Experiment Name: At_Siliques_P Parameter: Tissue Value: Less Than 5mm Siliques vs. Whole Plant
  misc_feature: MA Experiment ID: 20000235 Result: Down-regulated in Transcription
  misc_feature: MA Experiment 20000235 PARAMETER Experiment Name: At_Siliques_P Parameter: Age (day) Value: 21
  misc_feature: MA Experiment 20000235 PARAMETER Experiment Name: At_Siliques_P Parameter: Organism Value: A. thaliana
  misc_feature: MA Experiment 20000235 PARAMETER Experiment Name: At_Siliques_P Parameter: Plant Line Value: WS
  misc_feature: MA Experiment 20000235 PARAMETER Experiment Name: At_Siliques_P Parameter: Tissue Value: 5-10mm Siliques vs. Whole Plant
  misc_feature: MA Experiment ID: 20000264 Result: Down-regulated in Transcription
  misc_feature: MA Experiment 20000264 PARAMETER Experiment Name: At_Open_Flower_P Parameter: Age (day) Value: 21
  misc_feature: MA Experiment 20000264 PARAMETER Experiment Name: At_Open_Flower_P Parameter: Plant Line Value: WS
  misc_feature: MA Experiment 20000264 PARAMETER Experiment Name: At_Open_Flower_P Parameter: Tissue Value: Open Flower vs. Whole Plant
  misc_feature: MA Experiment ID: 20000265 Result: Down-regulated in Transcription
  misc_feature: MA Experiment 20000265 PARAMETER Experiment Name: At_Open_Flower_P Parameter: Age (day) Value: 21
  misc_feature: MA Experiment 20000265 PARAMETER Experiment Name: At_Open_Flower_P Parameter: Plant Line Value: WS
  misc_feature: MA Experiment 20000265 PARAMETER Experiment Name: At_Open_Flower_P Parameter: Tissue Value: Closed Flower vs. Whole Plant
  misc_feature: MA Experiment ID: 20000286 Result: Down-regulated in Transcription
  misc_feature: MA Experiment 20000286 PARAMETER Experiment Name: At_Open_Flower_P Parameter: Age (day) Value: 21
  misc_feature: MA Experiment 20000286 PARAMETER Experiment Name: At_Open_Flower_P Parameter: Plant Line Value: WS
  misc_feature: MA Experiment 20000286 PARAMETER Experiment Name: At_Open_Flower_P Parameter: Tissue Value: Half Open vs. Whole Plant
  misc_feature: MA Experiment ID: 20000794 Result: Down-regulated in Transcription
  misc_feature: MA Experiment 20000794 PARAMETER Experiment Name: At_Petals_P Parameter: Age (day) Value: 23-25 days
  misc_feature: MA Experiment 20000794 PARAMETER Experiment Name: At_Petals_P Parameter: Plant Line Value: WS
  misc_feature: MA Experiment 20000794 PARAMETER Experiment Name: At_Petals_P Parameter: Tissue Value: Petals vs. Whole plant
  misc_feature: MA Experiment ID: 20001451 Result: Down-regulated in Transcription
  misc_feature: MA Experiment 20001451 PARAMETER Experiment Name: At_Far-red-induction_P Parameter: Age (day) Value: 7
  misc_feature: MA Experiment 20001451 PARAMETER Experiment Name: At_Far-red-induction_P Parameter: Light Value: Far-red vs. White
  misc_feature: MA Experiment 20001451 PARAMETER Experiment Name: At_Far-red-induction_P Parameter: Organism Value: A. thaliana
  misc_feature: MA Experiment 20001451 PARAMETER Experiment Name: At_Far-red-induction_P Parameter: Plant Line Value: Columbia
  misc_feature: MA Experiment 20001451 PARAMETER Experiment Name: At_Far-red-induction_P Parameter: Timepoint (hr) Value: 24
  misc_feature: MA Experiment 20001451 PARAMETER Experiment Name: At_Far-red-induction_P Parameter: Tissue Value: Whole Plant
atgccgattctgactcttcttcttcttattctgggtttgtttataagcccttctgtttcagactcgagaggagacacagtggctcagatatgcaacaacagaacaacgacgccgcaacagagaagtctcttcgtcaccaatttcctcgccgccatggacgcggtctctccactagtggaagctaaaggttacggacaagtggtcaacggtaccggaaacttaaccgtctacgcttacggagagtgtataaaagatcttgataagaaagattgcgacttgtgtttcgctcagatcaaagctaaagttcctcgttgcttacctttccaaaaaggtactcgtggtggtcaagtcttctcagatggttgctacatcaggtacgatgactacaatttctataacgagacgttaagcttgcaagaccggacagtttgtgctccaaaggagattaccggagtaaaccggacggtatttcgggataacgctgcagagttggttaagaacatgagtgtggaggcggtgagaaatggtggattctatgctggttttgtggatagacataacgtgacggttcatggtctggctcagtgttgggagactcttaatagaagtggttgtgttgagtgtttgagtaaagcttcagtgaggattggttcttgtttggttaatgaagaaggtcgagttcttagtgctggttgctatatgaggttttctactcaaaagttttataacaattctggaaattctacatcagatggtaatggtggtcataaccatttgggtgtgattttggcggtgacatcttcggttgtggcttttgttctgttggtctctgccgctggtttcttgcttaaaaagagacacgccaagaagcaaagagagaagaagcaactagggtcattattcatgcttgcgaacaaatctaatctctgtttctcctatgagaatctcgagagggctaccgattacttcagcgacaaaaataagttaggacaaggaggatctggctctgtctataagggagttcttactaatggtaagactgttgcagtaaagagactgttcttcaacacaaagcaatgggtggatcatttcttcaacgaagttaatctaataagccaagtagaccacaagaaccttgttaagctcttgggatgcagcataactggaccagagagccttctggtctatgaatacattgcaaatcaaagcctccacgactatcttttcgtaagaaaagatgttcaaccgttgaattgggcaaagagattcaagattatacttggtacagcagaaggaatggcgtatcttcacgaggagtcaaatcttagaatcatacatagagatattaagctgagtaatatccttttggaagatgattttactccaagaattgctgattttggattggctagattgttcccagaggacaagactcatatcagcactgccatcgccggtacactaggctacatggcaccagaatatgtagtacgaggaaaactaactgagaaagcagacgtttatagttttggagttcttatgattgaagttataaccggaaaacgtaacaatgccttcgtacaagacgctggttcgatcctacaatcggtatggagtctgtacagaacaagcaatgtggaagaggcagtggatccaatcttaggtgataacttcaacaagatagaagcgtcacggctacttcaaattgggcttctctgtgttcaagcagcgtttgatcagcggcctgcgatgtctgtggttgtgaaaatgatgaaagggagtttggagattcatacgccgacgcaaccaccgtttctgaatccaggaagtgtagtagagatgagaaagatgatgatgactcccacgacgaatcagtctaattcttcaggatcaaggagtgactacataaccgagggttcgagtttctttgaacctagatga

SEQ ID NO: 91167 - protein, 646 aa, Arabidopsis thaliana
  peptide (1)..(646): Ceres Seq. ID no. 12726724
  misc_feature (75)..(642): Homolog of NCBI NO: 10178148 NR Description: receptor-like serine/threonine kinase
  misc_feature (300)..(642): Homolog of NCBI NO: 15242677 NR Description: receptor-like protein kinase; protein id:
  misc_feature (14)..(279): Homolog of NCBI NO: 15242677 NR Description: receptor-like protein kinase; protein id:
  misc_feature (3)..(643): Homolog of NCBI NO: 15223169 NR Description: putative protein kinase; protein id: At1g70520.1
  misc_feature (48)..(607): Homolog of NCBI NO: 2465925 NR Description: receptor-like serine/threonine kinase
  misc_feature (48)..(334): Homolog of NCBI NO: 8778283 NR Description: F14D16.24 [Arabidopsis thaliana]
  misc_feature (311)..(607): Homolog of NCBI NO: 8778283 NR Description: F14D16.24 [Arabidopsis thaliana]
  misc_feature (3)..(641): Homolog of NCBI NO: 34913832 NR Description: putative protein kinase [Oryza sativa (japonica group)] >gi|20161899|dbj|BAB90811.1| putative protein kinase
  misc_feature (3)..(607): Homolog of NCBI NO: 15235391 NR Description: serine/threonine kinase-like protein; protein id:
  misc_feature (247)..(641): Homolog of NCBI NO: 15234659 NR Description: receptor protein kinase - like protein; protein At4g05200.1 [Arabidopsis thaliana] >gi|25387047|pir||D85065
MPILTLLLLILGLFISPSVSDSRGDTVAQICNNRTTTPQQRSLFVTNFLAAMDAVSPLVEAKGYGQVVNGTGNLTVYAYGECIKDLDKKDCDLCFAQIKAKVPRCLPFQKGTRGGQVFSDGCYIRYDDYNFYNETLSLQDRTVCAPKEITGVNRTVFRDNAAELVKNMSVEAVRNGGFYAGFVDRHNVTVHGLAQCWETLNRSGCVECLSKASVRIGSCLVNEEGRVLSAGCYMRFSTQKFYNNSGNSTSDGNGGHNHLGVILAVTSSVVAFVLLVSAAGFLLKKRHAKKQREKKQLGSLFMLANKSNLCFSYENLERATDYFSDKNKLGQGGSGSVYKGVLTNGKTVAVKRLFFNTKQWVDHFFNEVNLISQVDHKNLVKLLGCSITGPESLLVYEYIANQSLHDYLFVRKDVQPLNWAKRFKIILGTAEGMAYLHEESNLRIIHRDIKLSNILLEDDFTPRIADFGLARLFPEDKTHISTAIAGTLGYMAPEYVVRGKLTEKADVYSFGVLMIEVITGKRNNAFVQDAGSILQSVWSLYRTSNVEEAVDPILGDNFNKIEASRLLQIGLLCVQAAFDQRPAMSVVVKMMKGSLEIHTPTQPPFLNPGSVVEMRKMMMTPTTNQSNSSGSRSDYITEGSSFFEPR

SEQ ID NO: 91168 - protein, 595 aa, Arabidopsis thaliana
  peptide (1)..(595): Ceres Seq. ID no. 12726725
  misc_feature (24)..(591): Homolog of NCBI NO: 10178148 NR Description: receptor-like serine/threonine kinase
  misc_feature (249)..(591): Homolog of NCBI NO: 15242677 NR Description: receptor-like protein kinase; protein id:
  misc_feature (1)..(228): Homolog of NCBI NO: 15242677 NR Description: receptor-like protein kinase; protein id:
  misc_feature (1)..(592): Homolog of NCBI NO: 15223169 NR Description: putative protein kinase; protein id: At1g70520.1
  misc_feature (1)..(556): Homolog of NCBI NO: 2465925 NR Description: receptor-like serine/threonine kinase
  misc_feature (1)..(283): Homolog of NCBI NO: 8778283 NR Description: F14D16.24 [Arabidopsis thaliana]
  misc_feature (260)..(556): Homolog of NCBI NO: 8778283 NR Description: F14D16.24 [Arabidopsis thaliana]
  misc_feature (1)..(590): Homolog of NCBI NO: 34913832 NR Description: putative protein kinase [Oryza sativa (japonica group)] >gi|20161899|dbj|BAB90811.1| putative protein kinase
  misc_feature (1)..(556): Homolog of NCBI NO: 15235391 NR Description: serine/threonine kinase-like protein; protein id:
  misc_feature (196)..(590): Homolog of NCBI NO: 15234659 NR Description: receptor protein kinase - like protein; protein At4g05200.1 [Arabidopsis thaliana] >gi|25387047|pir||D85065
MDAVSPLVEAKGYGQVVNGTGNLTVYAYGECIKDLDKKDCDLCFAQIKAKVPRCLPFQKGTRGGQVFSDGCYIRYDDYNFYNETLSLQDRTVCAPKEITGVNRTVFRDNAAELVKNMSVEAVRNGGFYAGFVDRHNVTVHGLAQCWETLNRSGCVECLSKASVRIGSCLVNEEGRVLSAGCYMRFSTQKFYNNSGNSTSDGNGGHNHLGVILAVTSSVVAFVLLVSAAGFLLKKRHAKKQREKKQLGSLFMLANKSNLCFSYENLERATDYFSDKNKLGQGGSGSVYKGVLTNGKTVAVKRLFFNTKQWVDHFFNEVNLISQVDHKNLVKLLGCSITGPESLLVYEYIANQSLHDYLFVRKDVQPLNWAKRFKIILGTAEGMAYLHEESNLRIIHRDIKLSNILLEDDFTPRIADFGLARLFPEDKTHISTAIAGTLGYMAPEYVVRGKLTEKADVYSFGVLMIEVITGKRNNAFVQDAGSILQSVWSLYRTSNVEEAVDPILGDNFNKIEASRLLQIGLLCVQAAFDQRPAMSVVVKMMKGSLEIHTPTQPPFLNPGSVVEMRKMMMTPTTNQSNSSGSRSDYITEGSSFFEPR

SEQ ID NO: 91169 - protein, 479 aa, Arabidopsis thaliana
  peptide (1)..(479): Ceres Seq. ID no. 12726726
  misc_feature (1)..(475): Homolog of NCBI NO: 10178148 NR Description: receptor-like serine/threonine kinase
  misc_feature (133)..(475): Homolog of NCBI NO: 15242677 NR Description: receptor-like protein kinase; protein id:
  misc_feature (1)..(112): Homolog of NCBI NO: 15242677 NR Description: receptor-like protein kinase; protein id:
  misc_feature (1)..(476): Homolog of NCBI NO: 15223169 NR Description: putative protein kinase; protein id: At1g70520.1
  misc_feature (1)..(440): Homolog of NCBI NO: 2465925 NR Description: receptor-like serine/threonine kinase
  misc_feature (1)..(167): Homolog of NCBI NO: 8778283 NR Description: F14D16.24 [Arabidopsis thaliana]
  misc_feature (144)..(440): Homolog of NCBI NO: 8778283 NR Description: F14D16.24 [Arabidopsis thaliana]
  misc_feature (1)..(474): Homolog of NCBI NO: 34913832 NR Description: putative protein kinase [Oryza sativa (japonica group)] >gi|20161899|dbj|BAB90811.1| putative protein kinase
  misc_feature (1)..(440): Homolog of NCBI NO: 15235391 NR Description: serine/threonine kinase-like protein; protein id:
  misc_feature (80)..(474): Homolog of NCBI NO: 15234659 NR Description: receptor protein kinase - like protein; protein At4g05200.1 [Arabidopsis thaliana] >gi|25387047|pir||D85065
MSVEAVRNGGFYAGFVDRHNVTVHGLAQCWETLNRSGCVECLSKASVRIGSCLVNEEGRVLSAGCYMRFSTQKFYNNSGNSTSDGNGGHNHLGVILAVTSSVVAFVLLVSAAGFLLKKRHAKKQREKKQLGSLFMLANKSNLCFSYENLERATDYFSDKNKLGQGGSGSVYKGVLTNGKTVAVKRLFFNTKQWVDHFFNEVNLISQVDHKNLVKLLGCSITGPESLLVYEYIANQSLHDYLFVRKDVQPLNWAKRFKIILGTAEGMAYLHEESNLRIIHRDIKLSNILLEDDFTPRIADFGLARLFPEDKTHISTAIAGTLGYMAPEYVVRGKLTEKADVYSFGVLMIEVITGKRNNAFVQDAGSILQSVWSLYRTSNVEEAVDPILGDNFNKIEASRLLQIGLLCVQAAFDQRPAMSVVVKMMKGSLEIHTPTQPPFLNPGSVVEMRKMMMTPTTNQSNSSGSRSDYITEGSSFFEPR

SEQ ID NO: 91170 - DNA, 1233 bp, Arabidopsis thaliana
  misc_feature (1)..(1233): Ceres Seq. ID no. 12726727
  misc_feature: MA Experiment ID: 20000355 Result: Up-regulated in Transcription
  misc_feature: MA Experiment 20000355 PARAMETER Experiment Name: At_Siliques_Sub_P Parameter: Age (day) Value: 21
  misc_feature: MA Experiment 20000355 PARAMETER Experiment Name: At_Siliques_Sub_P Parameter: Organism Value: A. thaliana
  misc_feature: MA Experiment 20000355 PARAMETER Experiment Name: At_Siliques_Sub_P Parameter: Plant Line Value: WS
  misc_feature: MA Experiment 20000355 PARAMETER Experiment Name: At_Siliques_Sub_P Parameter: Tissue Value: Less Than 5mm Siliques vs. Whole Plant
  misc_feature: MA Experiment ID: 20000440 Result: Up-regulated in Transcription
  misc_feature: MA Experiment 20000440 PARAMETER Experiment Name: At_Closed-Flower__Sub_P Parameter: Tissue Value: Closed Flower vs. Whole Plant
atgttctcctctagctttctcagattgattcttttactctgtctcgtctcttcttccttctcctccaccacttcttcctccaactccactgccgccgatcaaactctccggccgcaagaagagctccagaagctaacactgattagacaagaactcgacaaaatcaacaagccggctgtgaaaactattcagagctcagatggagataaaatagattgtgtttcaactcatcagcaaccagctttcgatcatcctctcttacaaggacaaaaaccattggatccgcctgagataccaaaaggatacagcgaagatgatggatcatatgaaaactcccagctttggagtttatccggtgagtcttgtccggaaggtacgattccgataagaagaacaacggaacaagacatgttaagagcaagttctgtccaaagatttggtcggaaaatcaggcgcgtgaagagagattccacaaataacggacacgaacatgcggtgggatatgtaaccgggagacaatattacggggcaaaagcaagtattaacgtgtggtcgccacgtgttacgagccaatacgaatttagtctttctcagatttgggttattgccggttcgttcacacacgatcttaataccattgaagccggttggcaaattagcccggagttgtacggcgatacttacccaagattctttacctattggacgtccgatgcatatcgaacaacgggttgctacaatttgctatgttccggtttcgttcaaaccaaccgtcgaatcgcgataggagctgcgatttctcctagatcttcgtataaaggtggacaattcgatataagcttattaatttggaaggatccgaagcacggtcactggtggctacaattcgggtcaggtgcattagtcggttattggccagcgtttttattcacgcatctaaagcaacatggaagcatggtccaattcgggggcgagattgtgaacaaccgacccggcggttcacacactacgactcaaatgggtagtggacattttgccggtgaaggttttggtaaagcatcttatttccggaatctccaaattgttgactgggacaacactcttatacccgcttcgaatctaaagattctcgcagaccatcccaattgttatgatataagaggtgggacgaatcgtgtgtggggtaactatttttactatggaggtccaggaaaaaaccctagatgtccatga

SEQ ID NO: 91171 - protein, 410 aa, Arabidopsis thaliana
  peptide (1)..(410): Ceres Seq. ID no. 12726728
  misc_feature (174)..(368): Pfam Name: Arabidopsis proteins of unknown function Pfam Description: Arabidopsis proteins of unknown function
  misc_feature (1)..(410): Homolog of NCBI NO: 25345697 NR Description: unknown protein F5A18.27 [imported] - Arabidopsis
  misc_feature (1)..(410): Homolog of NCBI NO: 30698726 NR Description: expressed protein [Arabidopsis thaliana]
  misc_feature (1)..(410): Homolog of NCBI NO: 28416687 NR Description: At1g70550 [Arabidopsis thaliana]
  misc_feature (3)..(410): Homolog of NCBI NO: 30688348 NR Description: expressed protein [Arabidopsis thaliana] unknown protein [Arabidopsis thaliana]
  misc_feature (3)..(410): Homolog of NCBI NO: 25345695 NR Description: protein F26F24.22 [imported] - Arabidopsis >gi|9295704|gb|AAF87010.1|AC005292_19 F26F24.22 [Arabidopsis
  misc_feature (3)..(410): Homolog of NCBI NO: 21389708 NR Description: putative carboxyl-terminal proteinase [Gossypium
  misc_feature (9)..(410): Homolog of NCBI NO: 15220207 NR Description: putative carboxyl-terminal peptidase; protein id:
  misc_feature (3)..(410): Homolog of NCBI NO: 15240622 NR Description: putative protein; protein id: At5g50150.1, by cDNA: gi_15529144, supported by cDNA: gi_17386117 [Arabidopsis >gi|15529145|gb|AAK97667.1| AT5g50150/MPF21_17 [Arabidopsis
  misc_feature (3)..(409): Homolog of NCBI NO: 34913794 NR Description: OSJNBa0026J14.25 [Oryza sativa (japonica
  misc_feature (119)..(410): Homolog of NCBI NO: 25345706 NR Description: hypothetical protein [imported] - Arabidopsis >gi|4874273|gb|AAD31338.1|AC007354_11 Similar to gi|3128199
MFSSSFLRLILLLCLVSSSFSSTTSSSNSTAADQTLRPQEELQKLTLIRQELDKINKPAVKTIQSSDGDKIDCVSTHQQPAFDHPLLQGQKPLDPPEIPKGYSEDDGSYENSQLWSLSGESCPEGTIPIRRTTEQDMLRASSVQRFGRKIRRVKRDSTNNGHEHAVGYVTGRQYYGAKASINVWSPRVTSQYEFSLSQIWVIAGSFTHDLNTIEAGWQISPELYGDTYPRFFTYWTSDAYRTTGCYNLLCSGFVQTNRRIAIGAAISPRSSYKGGQFDISLLIWKDPKHGHWWLQFGSGALVGYWPAFLFTHLKQHGSMVQFGGEIVNNRPGGSHTTTQMGSGHFAGEGFGKASYFRNLQIVDWDNTLIPASNLKILADHPNCYDIRGGTNRVWGNYFYYGGPGKNPRCP

SEQ ID NO: 91172 - protein, 274 aa, Arabidopsis thaliana
  peptide (1)..(274): Ceres Seq. ID no. 12726729
  misc_feature (38)..(232): Pfam Name: Arabidopsis proteins of unknown function Pfam Description: Arabidopsis proteins of unknown function
  misc_feature (1)..(274): Homolog of NCBI NO: 25345697 NR Description: unknown protein F5A18.27 [imported] - Arabidopsis
  misc_feature (1)..(274): Homolog of NCBI NO: 30698726 NR Description: expressed protein [Arabidopsis thaliana]
  misc_feature (1)..(274): Homolog of NCBI NO: 28416687 NR Description: At1g70550 [Arabidopsis thaliana]
  misc_feature (1)..(274): Homolog of NCBI NO: 30688348 NR Description: expressed protein [Arabidopsis thaliana] unknown protein [Arabidopsis thaliana]
  misc_feature (1)..(274): Homolog of NCBI NO: 25345695 NR Description: protein F26F24.22 [imported] - Arabidopsis >gi|9295704|gb|AAF87010.1|AC005292_19 F26F24.22 [Arabidopsis
  misc_feature (1)..(274): Homolog of NCBI NO: 21389708 NR Description: putative carboxyl-terminal proteinase [Gossypium
  misc_feature (1)..(274): Homolog of NCBI NO: 15220207 NR Description: putative carboxyl-terminal peptidase; protein id:
  misc_feature (1)..(274): Homolog of NCBI NO: 15240622 NR Description: putative protein; protein id: At5g50150.1, by cDNA: gi_15529144, supported by cDNA: gi_17386117 [Arabidopsis >gi|15529145|gb|AAK97667.1| AT5g50150/MPF21_17 [Arabidopsis
  misc_feature (1)..(273): Homolog of NCBI NO: 34913794 NR Description: OSJNBa0026J14.25 [Oryza sativa (japonica
  misc_feature (1)..(274): Homolog of NCBI NO: 25345706 NR Description: hypothetical protein [imported] - Arabidopsis >gi|4874273|gb|AAD31338.1|AC007354_11 Similar to gi|3128199
MLRASSVQRFGRKIRRVKRDSTNNGHEHAVGYVTGRQYYGAKASINVWSPRVTSQYEFSLSQIWVIAGSFTHDLNTIEAGWQISPELYGDTYPRFFTYWTSDAYRTTGCYNLLCSGFVQTNRRIAIGAAISPRSSYKGGQFDISLLIWKDPKHGHWWLQFGSGALVGYWPAFLFTHLKQHGSMVQFGGEIVNNRPGGSHTTTQMGSGHFAGEGFGKASYFRNLQIVDWDNTLIPASNLKILADHPNCYDIRGGTNRVWGNYFYYGGPGKNPRCP

SEQ ID NO: 91173 - DNA, 1782 bp, Arabidopsis thaliana
  misc_feature (1)..(1782): Ceres Seq. ID no. 12726730
  misc_feature: MA Experiment ID: 108435 Result: Down-regulated in Transcription
  misc_feature: MA Experiment 108435 PARAMETER Experiment Name: At_stm_Mutants_cDNA_P Parameter: Plant Line Value: wt Landsburg vs stm
  misc_feature: MA Experiment 108435 PARAMETER Experiment Name: At_stm_Mutants_cDNA_P Parameter: Tissue Value: Shoot Apical Meristem Region
  misc_feature: MA Experiment ID: 108462 Result: Up-regulated in Transcription
  misc_feature: MA Experiment 108462 PARAMETER Experiment Name: At_Germinating_Seeds_cDNA_P Parameter: Age (day) Value: 2 vs. 0
  misc_feature: MA Experiment 108462 PARAMETER Experiment Name: At_Germinating_Seeds_cDNA_P Parameter: Tissue Value: Germinating Seeds
  misc_feature: MA Experiment ID: 108463 Result: Up-regulated in Transcription
  misc_feature: MA Experiment 108463 PARAMETER Experiment Name: At_Germinating_Seeds_cDNA_P Parameter: Age (day) Value: 3 vs. 0
  misc_feature: MA Experiment 108463 PARAMETER Experiment Name: At_Germinating_Seeds_cDNA_P Parameter: Tissue Value: Germinating Seeds
  misc_feature: MA Experiment ID: 108464 Result: Up-regulated in Transcription
  misc_feature: MA Experiment 108464 PARAMETER Experiment Name: At_Germinating_Seeds_cDNA_P Parameter: Age (day) Value: 4 vs. 0
  misc_feature: MA Experiment 108464 PARAMETER Experiment Name: At_Germinating_Seeds_cDNA_P Parameter: Tissue Value: Germinating Seeds
  misc_feature: MA Experiment ID: 108488 Result: Up-regulated in Transcription
  misc_feature: MA Experiment ID: 108573 Result: Up-regulated in Transcription
  misc_feature: MA Experiment 108573 PARAMETER Experiment Name: At_Drought_cDNA_P Parameter: Timepoint (hr) Value: 6
  misc_feature: MA Experiment 108573 PARAMETER Experiment Name: At_Drought_cDNA_P Parameter: Tissue Value: Aerial
  misc_feature: MA Experiment 108573 PARAMETER Experiment Name: At_Drought_cDNA_P Parameter: Treatment Value: Drought vs. No Drought
  misc_feature: MA Experiment ID: 108577 Result: Up-regulated in Transcription
  misc_feature: MA Experiment 108577 PARAMETER Experiment Name: At_42deg_Heat_cDNA_P Parameter: Temperature (deg C) Value: 42 vs. 22
  misc_feature: MA Experiment 108577 PARAMETER Experiment Name: At_42deg_Heat_cDNA_P Parameter: Timepoint (hr) Value: 6
  misc_feature: MA Experiment 108577 PARAMETER Experiment Name: At_42deg_Heat_cDNA_P Parameter: Tissue Value: Aerial
  misc_feature: MA Experiment ID: 108595 Result: Down-regulated in Transcription
  misc_feature: MA Experiment 108595 PARAMETER Experiment Name: At_Ler-pi_Ovule_cDNA_P Parameter: Plant Line Value: null
  misc_feature: MA Experiment ID: 20000072 Result: Down-regulated in Transcription
  misc_feature: MA Experiment 20000072 PARAMETER Experiment Name: At_100uM_ABA_Mutants_cDNA_P Parameter: Plant Line Value: CS8105
  misc_feature: MA Experiment 20000072 PARAMETER Experiment Name: At_100uM_ABA_Mutants_cDNA_P Parameter: Timepoint (hr) Value: 6
  misc_feature: MA Experiment 20000072 PARAMETER Experiment Name: At_100uM_ABA_Mutants_cDNA_P Parameter: Tissue Value: Aerial
  misc_feature: MA Experiment 20000072 PARAMETER Experiment Name: At_100uM_ABA_Mutants_cDNA_P Parameter: Treatment Value: 100uM ABA vs. No Treatment
  misc_feature: MA Experiment ID: 20000086 Result: Down-regulated in Transcription
  misc_feature: MA Experiment 20000086 PARAMETER Experiment Name: At_100uM_ABA_Mutants_cDNA_P Parameter: Plant Line Value: CS22
  misc_feature: MA Experiment 20000086 PARAMETER Experiment Name: At_100uM_ABA_Mutants_cDNA_P Parameter: Timepoint (hr) Value: 6
  misc_feature: MA Experiment 20000086 PARAMETER Experiment Name: At_100uM_ABA_Mutants_cDNA_P Parameter: Tissue Value: Aerial
  misc_feature: MA Experiment 20000086 PARAMETER Experiment Name: At_100uM_ABA_Mutants_cDNA_P Parameter: Treatment Value: 100uM ABA vs. No Treatment
  misc_feature: MA Experiment ID: 20000087 Result: Down-regulated in Transcription
  misc_feature: MA Experiment 20000087 PARAMETER Experiment Name: At_100uM_ABA_Mutants_cDNA_P Parameter: Plant Line Value: WS
  misc_feature: MA Experiment 20000087 PARAMETER Experiment Name: At_100uM_ABA_Mutants_cDNA_P Parameter: Timepoint (hr) Value: 6
  misc_feature: MA Experiment 20000087 PARAMETER Experiment Name: At_100uM_ABA_Mutants_cDNA_P Parameter: Tissue Value: Aerial
  misc_feature: MA Experiment 20000087 PARAMETER Experiment Name: At_100uM_ABA_Mutants_cDNA_P Parameter: Treatment Value: 100uM ABA vs. No Treatment
  misc_feature: MA Experiment ID: 20000089 Result: Down-regulated in Transcription
  misc_feature: MA Experiment ID: 20000090 Result: Down-regulated in Transcription
  misc_feature: MA Experiment ID: 20001248 Result: Down-regulated in Transcription
  misc_feature: MA Experiment 20001248 PARAMETER Experiment Name: At_Far-red-induction_P Parameter: Age (day) Value: 7
  misc_feature: MA Experiment 20001248 PARAMETER Experiment Name: At_Far-red-induction_P Parameter: Light Value: Far-red vs. White
  misc_feature: MA Experiment 20001248 PARAMETER Experiment Name: At_Far-red-induction_P Parameter: Organism Value: A. thaliana
  misc_feature: MA Experiment 20001248 PARAMETER Experiment Name: At_Far-red-induction_P Parameter: Plant Line Value: Columbia
  misc_feature: MA Experiment 20001248 PARAMETER Experiment Name: At_Far-red-induction_P Parameter: Timepoint (hr) Value: 4
  misc_feature: MA Experiment 20001248 PARAMETER Experiment Name: At_Far-red-induction_P Parameter: Tissue Value: Whole Plant
aagtctttcttacttgccctgctctggaacgtgactttggaggtaacgaaactgtgtcgtgagttgatctaagaggggaagtgaggaatcattttgcttttagctttgaaaagtaaatcctggaaatgtctctcaaggcgttagactacgagtccttgaatgaaaacgtgaagaattgtcagtatgcagtcagaggtgaactttatcttcgtgcttctgagcttcagaaagaaggcaaaaagattattttcacaaatgttggaaaccctcatgctttaggacagaaacctctgacttttcctcgtcaggtggtttctttatgccaagcaccatttctgttagatgatccaaatgttggtatgatattcccagcagatgctattgcaagagctaagcattatctttccttgacttctggtggtcttggtgcttacagtgactcaagaggtcttccgggagttcggaaagaagtcgctgagttcattgaacggcgtgatggatatccaagcgatccagaactcatatttctaactgatggagcgagcaaaggtgtgatgcaaatcttgaattgtgtcatacgcggtcagaaagacggaattctggttccagttccacagtatccactctactcggctactatatctctgttaggtggtactcttgttccttactatcttgaagagtctgaaaactggggacttgatgttaacaaccttcgccaatctgttgctcaagctcgctctcaaggaataacagtaagggcaatggtgattattaaccccggaaacccaactggccagtgtcttagcgaagctaacataagagagatactacggttctgttgtgatgagagattagttcttctcggagacgaagtgtatcagcaaaatatataccaagatgaacgtccctttatcagttccaagaaggttttgatggatatgggagcaccgatcagcaaggaagttcagctcatatctttccacaccgtttccaaaggatactggggcgaatgtgggcaacggggaggttactttgagatgacaaatatccctcccaggaccgttgaggagatatacaaggtggcctctatagctctcagccccaacgtctctgcgcagatatttatgggtttaatggttagcccaccaaagcctggagacatttcatatgaccaattcgttcgtgagagcaagggaatactagaatcactgagaagaagagcaaggatgatgactgatggattcaacagctgcaaaaacgtcgtctgtaatttcacagaaggtgctatgtattcattccctcaaataaagttgccgtcgaaagcaatccaagcagcaaaacaagccggaaaagtccctgacgttttctactgccttaagctcttagaagccacaggaatctccacagttccaggctctggatttggacaaaaagaaggggtgtttcatttaaggacaacaattctgccagcagaagaagaaatgccagagattatggacagtttcaaaaagttcaatgatgagtttatgtctcagtacgctgataactttggttactccagaatgtgaaaaagaaaggacttagagtcagagtcagagatcacttcttcttctttcacgacattattattgtctattcacactcttaaaaagcaataagtactggtcctactctgtgtcaaactcttcttggtgctcttaaaacctttgtatctattgttaccaatttgtgtgactcacacacacacacacacaaatctctaatgttcaattatatggt

SEQ ID NO: 91174 - protein, 481 aa, Arabidopsis thaliana; identical to SEQ ID NO: 41378
  peptide (1)..(481): Ceres Seq. ID no. 12726731
  misc_feature (118)..(465): Pfam Name: Aminotransferase class I and II Pfam Description: Aminotransferase class I and II
  misc_feature (1)..(481): Homolog of NCBI NO: 15223186 NR Description: putative alanine aminotransferase; protein id: supported by cDNA: 120310., supported by cDNA: gi_14334913, by cDNA: gi_17104534 [Arabidopsis thaliana]
  misc_feature (1)..(481): Homolog of NCBI NO: 21537112 NR Description: putative alanine aminotransferase [Arabidopsis
  misc_feature (1)..(481): Homolog of NCBI NO: 30688330 NR Description: alanine aminotransferase -related [Arabidopsis
  misc_feature (1)..(481): Homolog of NCBI NO: 16604499 NR Description: At1g23310/F26F24_4 [Arabidopsis thaliana]
  misc_feature (1)..(481): Homolog of NCBI NO: 13430566 NR Description: putative alanine aminotransferase [Arabidopsis
  misc_feature (4)..(481): Homolog of NCBI NO: 29569153 NR Description: alanine aminotransferase [Oryza sativa (indica
  misc_feature (4)..(481): Homolog of NCBI NO: 34899390 NR Description: putative alanine aminotransferase [Oryza sativa
  misc_feature (103)..(481): Homolog of NCBI NO: 14596229 NR Description: alanine aminotransferase-like protein
  misc_feature (4)..(473): Homolog of NCBI NO: 7434113 NR Description: alanine transaminase (EC 2.6.1.2) - Chlamydomonas
  misc_feature (1)..(474): Homolog of NCBI NO: 37533928 NR Description: putative alanine aminotransferase [Oryza sativa

SEQ ID NO: 91175 - protein, 403 aa, Arabidopsis thaliana; identical to SEQ ID NO: 41379
  peptide (1)..(403): Ceres Seq. ID no. 12726732
  misc_feature (40)..(387): Pfam Name: Aminotransferase class I and II Pfam Description: Aminotransferase class I and II
  misc_feature (1)..(403): Homolog of NCBI NO: 15223186 NR Description: putative alanine aminotransferase; protein id: supported by cDNA: 120310., supported by cDNA: gi_14334913, by cDNA: gi_17104534 [Arabidopsis thaliana]
  misc_feature (1)..(403): Homolog of NCBI NO: 21537112 NR Description: putative alanine aminotransferase [Arabidopsis
  misc_feature (1)..(403): Homolog of NCBI NO: 30688330 NR Description: alanine aminotransferase -related [Arabidopsis
  misc_feature (1)..(403): Homolog of NCBI NO: 16604499 NR Description: At1g23310/F26F24_4 [Arabidopsis thaliana]
  misc_feature (1)..(403): Homolog of NCBI NO: 13430566 NR Description: putative alanine aminotransferase [Arabidopsis
  misc_feature (1)..(403): Homolog of NCBI NO: 29569153 NR Description: alanine aminotransferase [Oryza sativa (indica
  misc_feature (1)..(403): Homolog of NCBI NO: 34899390 NR Description: putative alanine aminotransferase [Oryza sativa
  misc_feature (25)..(403): Homolog of NCBI NO: 14596229 NR Description: alanine aminotransferase-like protein
  misc_feature (1)..(395): Homolog of NCBI NO: 7434113 NR Description: alanine transaminase (EC 2.6.1.2) - Chlamydomonas
  misc_feature (1)..(396): Homolog of NCBI NO: 37533928 NR Description: putative alanine aminotransferase [Oryza sativa

SEQ ID NO: 91176 - protein, 338 aa, Arabidopsis thaliana; identical to SEQ ID NO: 41380
  peptide (1)..(338): Ceres Seq. ID no. 12726733
  misc_feature (1)..(322): Pfam Name: Aminotransferase class I and II Pfam Description: Aminotransferase class I and II
  misc_feature (1)..(338): Homolog of NCBI NO: 15223186 NR Description: putative alanine aminotransferase; protein id: supported by cDNA: 120310., supported by cDNA: gi_14334913, by cDNA: gi_17104534 [Arabidopsis thaliana]
  misc_feature (1)..(338): Homolog of NCBI NO: 21537112 NR Description: putative alanine aminotransferase [Arabidopsis
  misc_feature (1)..(338): Homolog of NCBI NO: 30688330 NR Description: alanine aminotransferase -related [Arabidopsis
  misc_feature (1)..(338): Homolog of NCBI NO: 16604499 NR Description: At1g23310/F26F24_4 [Arabidopsis thaliana]
  misc_feature (1)..(338): Homolog of NCBI NO: 13430566 NR Description: putative alanine aminotransferase [Arabidopsis
  misc_feature (1)..(338): Homolog of NCBI NO: 29569153 NR Description: alanine aminotransferase [Oryza sativa (indica
  misc_feature (1)..(338): Homolog of NCBI NO: 34899390 NR Description: putative alanine aminotransferase [Oryza sativa
  misc_feature (1)..(338): Homolog of NCBI NO: 14596229 NR Description: alanine aminotransferase-like protein
  misc_feature (1)..(330): Homolog of NCBI NO: 7434113 NR Description: alanine transaminase (EC 2.6.1.2) - Chlamydomonas
  misc_feature (1)..(331): Homolog of NCBI NO: 37533928 NR Description: putative alanine aminotransferase [Oryza sativa

SEQ ID NO: 91177 - DNA, 1329 bp, Arabidopsis thaliana
  misc_feature (1)..(1329): Ceres Seq. ID no. 12726744
  misc_feature: MA Experiment ID: 20000184 Result: Down-regulated in Transcription
  misc_feature: MA Experiment 20000184 PARAMETER Experiment Name: At_Shoots__P Parameter: Age (day) Value: 7
  misc_feature: MA Experiment 20000184 PARAMETER Experiment Name: At_Shoots__P Parameter: Tissue Value: Shoots vs. Whole Plant
  misc_feature: MA Experiment ID: 20000227 Result: Up-regulated in Transcription
  misc_feature: MA Experiment 20000227 PARAMETER Experiment Name: At_Root-Tips-vs-Tops_P Parameter: Tissue Value: Root Tips vs. Root Tops
  misc_feature: MA Experiment ID: 20000495 Result: Down-regulated in Transcription
  misc_feature: MA Experiment 20000495 PARAMETER Experiment Name: At_Guard_Cells_P Parameter: Harvest Date Value: 8/2/2002
  misc_feature: MA Experiment 20000495 PARAMETER Experiment Name: At_Guard_Cells_P Parameter: Organism Value: A. thaliana
  misc_feature: MA Experiment 20000495 PARAMETER Experiment Name: At_Guard_Cells_P Parameter: Tissue Value: Guard Cells vs. Leaves
  misc_feature: MA Experiment ID: 20001247 Result: Up-regulated in Transcription
  misc_feature: MA Experiment 20001247 PARAMETER Experiment Name: At_Far-red-induction_P Parameter: Age (day) Value: 7
  misc_feature: MA Experiment 20001247 PARAMETER Experiment Name: At_Far-red-induction_P Parameter: Light Value: Far-red vs. White
  misc_feature: MA Experiment 20001247 PARAMETER Experiment Name: At_Far-red-induction_P Parameter: Organism Value: A. thaliana
  misc_feature: MA Experiment 20001247 PARAMETER Experiment Name: At_Far-red-induction_P Parameter: Plant Line Value: Columbia
  misc_feature: MA Experiment 20001247 PARAMETER Experiment Name: At_Far-red-induction_P Parameter: Timepoint (hr) Value: 1
  misc_feature: MA Experiment 20001247 PARAMETER Experiment Name: At_Far-red-induction_P Parameter: Tissue Value: Whole Plant
  misc_feature: MA Experiment ID: 20001451 Result: Down-regulated in Transcription
  misc_feature: MA Experiment 20001451 PARAMETER Experiment Name: At_Far-red-induction_P Parameter: Age (day) Value: 7
  misc_feature: MA Experiment 20001451 PARAMETER Experiment Name: At_Far-red-induction_P Parameter: Light Value: Far-red vs. White
  misc_feature: MA Experiment 20001451 PARAMETER Experiment Name: At_Far-red-induction_P Parameter: Organism Value: A. thaliana
  misc_feature: MA Experiment 20001451 PARAMETER Experiment Name: At_Far-red-induction_P Parameter: Plant Line Value: Columbia
  misc_feature: MA Experiment 20001451 PARAMETER Experiment Name: At_Far-red-induction_P Parameter: Timepoint (hr) Value: 24
  misc_feature: MA Experiment 20001451 PARAMETER Experiment Name: At_Far-red-induction_P Parameter: Tissue Value: Whole Plant
atggaaaacgacgacgaagaaacagacgcagaggtttctataggtacagagattcctgatcatgagcaaatcggagatattccttctcaccagctcattcctcaccacgatgacgatgatcatgaggaggaaacgttggagttcaaaacagtaacgattgaaaccaagatgccagtcttaaacatcaacgaagagcggattttagaagctcaaggctcgatggaaagctcgcatagtagtctacataacgctatgtttcacttagagcaaagagtatctgttgatggtattgaatgtcctgaaggagtactcactgttgataagttgaagtttgagttacaagaagagagaaaagcacttcacgcgttatacgaggagctggaggtagagaggaatgcgtctgctgttgctgccagtgaaacaatggcgatgatcaataggttgcatgaggagaaagctgcgatgcagatggaagcgttgcagtatcagagaatgatggaggagcaagctgagtttgatcaagaagctttgcagttgttgaatgagcttatggtgaatagagagaaggagaatgctgagcttgagaaggagctagaggtgtatagaaagagaatggaggagtatgaagctaaagagaaaatggggatgttgaggaggagattgagagattcctctgttgattcgtatagaaataatggcgattctgatgagaatagcaatggagagttacagtttaagaacgttgaaggggttacggattggaaatatagagagaatgagatggagaatacgccggtggatgttgtacttcgtcttgatgagtgtttagatgattatgatggagagaggctttcgattcttgggagattgaagtttcttgaagagaaactcacagatcttaataacgaagaggacgacgaggaggaggctaaaacgtttgagagtaatggtagcatcaatggaaatgagcatattcatggcaaagaaacaaacgggaagcacagagttatcaagtcaaagagattacttcccctgtttgatgcggtcgatggagagatggaaaacgggttaagtaacggaaaccatcacgaaaacgggtttgatgattcggagaagggtgagaatgtgacgatagaagaagaagtggatgagctttacgagaggttagaagctctagaggcagatagagagttcttaagacattgtgttggttcattgaaaaaaggagacaaaggtgtacatctcctccatgagattctgcaacatcttcgtgatctaaggaatatcgatcttactcgcgtcagagaaaacggagacatgagtttatga

SEQ ID NO: 91178 - protein, 442 aa, Arabidopsis thaliana; identical to SEQ ID NO: 71516
  peptide (1)..(442): Ceres Seq. ID no. 12726745
  misc_feature (106)..(199): Pfam Name: Protein of unknown function, DUF593 Pfam Description: Protein of unknown function, DUF593
  misc_feature (1)..(442): Homolog of NCBI NO: 18409667 NR Description: expressed protein; protein id: At1g70750.1,
  misc_feature (1)..(442): Homolog of NCBI NO: 25406071 NR Description: unknown protein F5A18.7 [imported] - Arabidopsis
  misc_feature (1)..(251): Homolog of NCBI NO: 4101564 NR Description: IFA-binding protein [Arabidopsis thaliana]
  misc_feature (82)..(385): Homolog of NCBI NO: 13702818 NR Description: unknown protein [Oryza sativa]
  misc_feature (6)..(390): Homolog of NCBI NO: 11357812 NR Description: hypothetical protein F5E19_60 - Arabidopsis >gi|9755724|emb|CAC01836.1| putative protein [Arabidopsis
  misc_feature (6)..(390): Homolog of NCBI NO: 30685989 NR Description: expressed protein [Arabidopsis thaliana]
  misc_feature (64)..(437): Homolog of NCBI NO: 11357812 NR Description: hypothetical protein F5E19_60 - Arabidopsis >gi|9755724|emb|CAC01836.1| putative protein [Arabidopsis
  misc_feature (64)..(437): Homolog of NCBI NO: 30685989 NR Description: expressed protein [Arabidopsis thaliana]
  misc_feature (70)..(305): Homolog of NCBI NO: 25406384 NR Description: hypothetical protein F9E10.32 [imported] - thaliana >gi|5882740|gb|AAD55293.1|AC008263_24 F25A4.20
  misc_feature (70)..(305): Homolog of NCBI NO: 26451391 NR Description: unknown protein [Arabidopsis thaliana]

SEQ ID NO: 91179 - protein, 386 aa, Arabidopsis thaliana; identical to SEQ ID NO: 71517
  peptide (1)..(386): Ceres Seq. ID no. 12726746
  misc_feature (50)..(143): Pfam Name: Protein of unknown function, DUF593 Pfam Description: Protein of unknown function, DUF593
  misc_feature (1)..(386): Homolog of NCBI NO: 18409667 NR Description: expressed protein; protein id: At1g70750.1,
  misc_feature (1)..(386): Homolog of NCBI NO: 25406071 NR Description: unknown protein F5A18.7 [imported] - Arabidopsis
  misc_feature (1)..(195): Homolog of NCBI NO: 4101564 NR Description: IFA-binding protein [Arabidopsis thaliana]
  misc_feature (26)..(329): Homolog of NCBI NO: 13702818 NR Description: unknown protein [Oryza sativa]
  misc_feature (1)..(334): Homolog of NCBI NO: 11357812 NR Description: hypothetical protein F5E19_60 - Arabidopsis >gi|9755724|emb|CAC01836.1| putative protein [Arabidopsis
  misc_feature (1)..(334): Homolog of NCBI NO: 30685989 NR Description: expressed protein [Arabidopsis thaliana]
  misc_feature (8)..(381): Homolog of NCBI NO: 11357812 NR Description: hypothetical protein F5E19_60 - Arabidopsis >gi|9755724|emb|CAC01836.1| putative protein [Arabidopsis
  misc_feature (8)..(381): Homolog of NCBI NO: 30685989 NR Description: expressed protein [Arabidopsis thaliana]
  misc_feature (14)..(249): Homolog of NCBI NO: 25406384 NR Description: hypothetical protein F9E10.32 [imported] - thaliana >gi|5882740|gb|AAD55293.1|AC008263_24 F25A4.20
  misc_feature (14)..(249): Homolog of NCBI NO: 26451391 NR Description: unknown protein [Arabidopsis thaliana]

SEQ ID NO: 91180 - protein, 369 aa, Arabidopsis thaliana
  peptide (1)..(369): Ceres Seq. ID no. 12726747
  misc_feature (33)..(126): Pfam Name: Protein of unknown function, DUF593 Pfam Description: Protein of unknown function, DUF593
  misc_feature (1)..(369): Homolog of NCBI NO: 18409667 NR Description: expressed protein; protein id: At1g70750.1,
  misc_feature (1)..(369): Homolog of NCBI NO: 25406071 NR Description: unknown protein F5A18.7 [imported] - Arabidopsis
  misc_feature (1)..(178): Homolog of NCBI NO: 4101564 NR Description: IFA-binding protein [Arabidopsis thaliana]
  misc_feature (9)..(312): Homolog of NCBI NO: 13702818 NR Description: unknown protein [Oryza sativa]
  misc_feature (1)..(317): Homolog of NCBI NO: 11357812 NR Description: hypothetical protein F5E19_60 - Arabidopsis >gi|9755724|emb|CAC01836.1| putative protein [Arabidopsis
  misc_feature (1)..(317): Homolog of NCBI NO: 30685989 NR Description: expressed protein [Arabidopsis thaliana]
  misc_feature (1)..(364): Homolog of NCBI NO: 11357812 NR Description: hypothetical protein F5E19_60 - Arabidopsis >gi|9755724|emb|CAC01836.1| putative protein [Arabidopsis
  misc_feature (1)..(364): Homolog of NCBI NO: 30685989 NR Description: expressed protein [Arabidopsis thaliana]
  misc_feature (1)..(232): Homolog of NCBI NO: 25406384 NR Description: hypothetical protein F9E10.32 [imported] - thaliana >gi|5882740|gb|AAD55293.1|AC008263_24 F25A4.20
  misc_feature (1)..(232): Homolog of NCBI NO: 26451391 NR Description: unknown protein [Arabidopsis thaliana]
MESSHSSLHNAMFHLEQRVSVDGIECPEGVLTVDKLKFELQEERKALHALYEELEVERNASAVAASETMAMINRLHEEKAAMQMEALQYQRMMEEQAEFDQEALQLLNELMVNREKENAELEKELEVYRKRMEEYEAKEKMGMLRRRLRDSSVDSYRNNGDSDENSNGELQFKNVEGVTDWKYRENEMENTPVDVVLRLDECLDDYDGERLSILGRLKFLEEKLTDLNNEEDDEEEAKTFESNGSINGNEHIHGKETNGKHRVIKSKRLLPLFDAVDGEMENGLSNGNHHENGFDDSEKGENVTIEEEVDELYERLEALEADREFLRHCVGSLKKGDKGVHLLHEILQHLRDLRNIDLTRVRENGDMSL

SEQ ID NO: 91181 - DNA, 525 bp, Arabidopsis thaliana
  misc_feature (1)..(525): Ceres Seq. ID no. 12726748
  misc_feature: MA Experiment ID: 20000179 Result: Down-regulated in Transcription
  misc_feature: MA Experiment 20000179 PARAMETER Experiment Name: At_Germinating_Seeds_P Parameter: Age (hr) Value: 6 vs. 0
  misc_feature: MA Experiment 20000179 PARAMETER Experiment Name: At_Germinating_Seeds_P Parameter: Tissue Value: Germinating Seeds
  misc_feature: MA Experiment ID: 20000180 Result: Down-regulated in Transcription
  misc_feature: MA Experiment 20000180 PARAMETER Experiment Name: At_Germinating_Seeds_P Parameter: Age (hr) Value: 24 vs. 0
  misc_feature: MA Experiment 20000180 PARAMETER Experiment Name: At_Germinating_Seeds_P Parameter: Tissue Value: Germinating Seeds
  misc_feature: MA Experiment ID: 20000184 Result: Down-regulated in Transcription
  misc_feature: MA Experiment 20000184 PARAMETER Experiment Name: At_Shoots__P Parameter: Age (day) Value: 7
  misc_feature: MA Experiment 20000184 PARAMETER Experiment Name: At_Shoots__P Parameter: Tissue Value: Shoots vs. Whole Plant
  misc_feature: MA Experiment ID: 20000185 Result: Down-regulated in Transcription
  misc_feature: MA Experiment 20000185 PARAMETER Experiment Name: At_Roots__P Parameter: Age (day) Value: 7 vs. 21
  misc_feature: MA Experiment 20000185 PARAMETER Experiment Name: At_Roots__P Parameter: Organism Value: A. thaliana
  misc_feature: MA Experiment 20000185 PARAMETER Experiment Name: At_Roots__P Parameter: Tissue Value: Roots vs. Whole Plant
  misc_feature: MA Experiment ID: 20000227 Result: Down-regulated in Transcription
  misc_feature: MA Experiment 20000227 PARAMETER Experiment Name: At_Root-Tips-vs-Tops_P Parameter: Tissue Value: Root Tips vs. Root Tops
  misc_feature: MA Experiment ID: 20000264 Result: Down-regulated in Transcription
  misc_feature: MA Experiment 20000264 PARAMETER Experiment Name: At_Open_Flower_P Parameter: Age (day) Value: 21
  misc_feature: MA Experiment 20000264 PARAMETER Experiment Name: At_Open_Flower_P Parameter: Plant Line Value: WS
  misc_feature: MA Experiment 20000264 PARAMETER Experiment Name: At_Open_Flower_P Parameter: Tissue Value: Open Flower vs. Whole Plant
  misc_feature: MA Experiment ID: 20000437 Result: Up-regulated in Transcription
  misc_feature: MA Experiment 20000437 PARAMETER Experiment Name: At_Drought_P Parameter: Age (day) Value: 8
  misc_feature: MA Experiment 20000437 PARAMETER Experiment Name: At_Drought_P Parameter: Organism Value: A. thaliana
  misc_feature: MA Experiment 20000437 PARAMETER Experiment Name: At_Drought_P Parameter: Plant Line Value: WS
  misc_feature: MA Experiment 20000437 PARAMETER Experiment Name: At_Drought_P Parameter: Timepoint (hr) Value: 24
  misc_feature: MA Experiment 20000437 PARAMETER Experiment Name: At_Drought_P Parameter: Tissue Value: Whole Plant
  misc_feature: MA Experiment 20000437 PARAMETER Experiment Name: At_Drought_P Parameter: Treatment Value: Drought vs. No Drought
  misc_feature: MA Experiment ID: 20000438 Result: Down-regulated in Transcription
  misc_feature: MA Experiment 20000438 PARAMETER Experiment Name: At_Shoots__P Parameter: Age (day) Value: 14
  misc_feature: MA Experiment 20000438 PARAMETER Experiment Name: At_Shoots__P Parameter: Tissue Value: Shoots vs. Whole Plant
  misc_feature: MA Experiment ID: 20000439 Result: Down-regulated in Transcription
  misc_feature: MA Experiment 20000439 PARAMETER Experiment Name: At_Roots__P Parameter: Age (day) Value: 14 vs. 21
  misc_feature: MA Experiment 20000439 PARAMETER Experiment Name: At_Roots__P Parameter: Organism Value: A. thaliana
  misc_feature: MA Experiment 20000439 PARAMETER Experiment Name: At_Roots__P Parameter: Tissue Value: Roots vs. Whole Plant
  misc_feature: MA Experiment ID: 20000441 Result: Down-regulated in Transcription
  misc_feature: MA Experiment 20000441 PARAMETER Experiment Name: At_1uM_BR-BRZ__P Parameter: Tissue Value: Shoot Apices
  misc_feature: MA Experiment 20000441 PARAMETER Experiment Name: At_1uM_BR-BRZ__P Parameter: Treatment Value: 1uM BR vs. No Treatment
  misc_feature: MA Experiment ID: 20000495 Result: Down-regulated in Transcription
  misc_feature: MA Experiment 20000495 PARAMETER Experiment Name: At_Guard_Cells_P Parameter: Harvest Date Value: 8/2/2002
  misc_feature: MA Experiment 20000495 PARAMETER Experiment Name: At_Guard_Cells_P Parameter: Organism Value: A. thaliana
  misc_feature: MA Experiment 20000495 PARAMETER Experiment Name: At_Guard_Cells_P Parameter: Tissue Value: Guard Cells vs. Leaves
  misc_feature: MA Experiment ID: 20001450 Result: Down-regulated in Transcription
  misc_feature: MA Experiment 20001450 PARAMETER Experiment Name: At_Far-red-induction_P Parameter: Age (day) Value: 7
  misc_feature: MA Experiment 20001450 PARAMETER Experiment Name: At_Far-red-induction_P Parameter: Light Value: Far-red vs. White
  misc_feature: MA Experiment 20001450 PARAMETER Experiment Name: At_Far-red-induction_P Parameter: Organism Value: A. thaliana
  misc_feature: MA Experiment 20001450 PARAMETER Experiment Name: At_Far-red-induction_P Parameter: Plant Line Value: Columbia
  misc_feature: MA Experiment 20001450 PARAMETER Experiment Name: At_Far-red-induction_P Parameter: Timepoint (hr) Value: 8
  misc_feature: MA Experiment 20001450 PARAMETER Experiment Name: At_Far-red-induction_P Parameter: Tissue Value: Whole Plant
  misc_feature: MA Experiment ID: 20001451 Result: Down-regulated in Transcription
  misc_feature: MA Experiment 20001451 PARAMETER Experiment Name: At_Far-red-induction_P Parameter: Age (day) Value: 7
  misc_feature: MA Experiment 20001451 PARAMETER Experiment Name: At_Far-red-induction_P Parameter: Light Value: Far-red vs. White
  misc_feature: MA Experiment 20001451 PARAMETER Experiment Name: At_Far-red-induction_P Parameter: Organism Value: A. thaliana
  misc_feature: MA Experiment 20001451 PARAMETER Experiment Name: At_Far-red-induction_P Parameter: Plant Line Value: Columbia
  misc_feature: MA Experiment 20001451 PARAMETER Experiment Name: At_Far-red-induction_P Parameter: Timepoint (hr) Value: 24
  misc_feature: MA Experiment 20001451 PARAMETER Experiment Name: At_Far-red-induction_P Parameter: Tissue Value: Whole Plant
atggagaaaacagaggaagaggttgagatgaaggaactggtagggcttgtgagaatcctagtgaagagagggatcgatcttgctcgtcgagacgctctaagcagcgacccttttgtcgtcataaccatgggtccacagaagctgaaatcttttactgtgaagaataactgcaacccagagtggaacgaagagttgactcttgcgatcgaagatcccaatgaacctgtgaagctgatggtgtatgataaagatacatttacagcggacgacaagatgggagatgcgcagatagatatgaaaccgttcctagacgttcacaaactcggtttgaaagaacttccacatggaaaagagctcaagagaattgtgcccaccagagataactgcttgtctgaagatagcataatcgtctccgataatggcaagatcgttcaggacatgattcttctgttgaagaatgtcgaatgcggcaaggtcgagatccagcttgaatggcttaaaaatccaggtggtagtggactctga

SEQ ID NO: 91182 - protein, 174 aa, Arabidopsis thaliana
  peptide (1)..(174): Ceres Seq. ID no. 12726749
  misc_feature (17)..(96): Pfam Name: C2 domain Pfam Description: C2 domain
  misc_feature (1)..(174): Homolog of NCBI NO: 15223248 NR Description: unknown protein; protein id: At1g70800.1
  misc_feature (10)..(174): Homolog of NCBI NO: 18409682 NR Description: expressed protein; protein id: At1g70810.1, by cDNA: 23322., supported by cDNA: gi_13430459 [Arabidopsis
  misc_feature (10)..(174): Homolog of NCBI NO: 13430460 NR Description: unknown protein [Arabidopsis thaliana]
  misc_feature (10)..(172): Homolog of NCBI NO: 15220022 NR Description: unknown protein; protein id: At1g23140.1
  misc_feature (8)..(174): Homolog of NCBI NO: 18409675 NR Description: zinc finger and C2 domain protein, putative; id: At1g70790.1, supported by cDNA: 148076. [Arabidopsis
  misc_feature (8)..(174): Homolog of NCBI NO: 15226306 NR Description: hypothetical protein; protein id: At2g01540.1, by cDNA: gi_17065055, supported by cDNA: gi_20260029 [Arabidopsis >gi|25410912|pir||A84426 hypothetical protein At2g01540
  misc_feature (10)..(174): Homolog of NCBI NO: 15240322 NR Description: putative protein; protein id: At5g37740.1, by cDNA: gi_18377800, supported by cDNA: gi_21281220 [Arabidopsis
  misc_feature (10)..(174): Homolog of NCBI NO: 15221907 NR Description: unknown protein; protein id: At1g48590.1
  misc_feature (10)..(174): Homolog of NCBI NO: 25405940 NR Description: protein T1N15.21 [imported] - Arabidopsis >gi|8778695|gb|AAF79703.1|AC020889_11 T1N15.21 [Arabidopsis
  misc_feature (10)..(174): Homolog of NCBI NO: 30684739 NR Description: C2 domain-containing protein [Arabidopsis
MEKTEEEVEMKELVGLVRILVKRGIDLARRDALSSDPFVVITMGPQKLKSFTVKNNCNPEWNEELTLAIEDPNEPVKLMVYDKDTFTADDKMGDAQIDMKPFLDVHKLGLKELPHGKELKRIVPTRDNCLSEDSIIVSDNGKIVQDMILLLKNVECGKVEIQLEWLKNPGGSGL

SEQ ID NO: 91183 - protein, 165 aa, Arabidopsis thaliana
  peptide (1)..(165): Ceres Seq. ID no. 12726750
  misc_feature (8)..(87): Pfam Name: C2 domain Pfam Description: C2 domain
  misc_feature (1)..(165): Homolog of NCBI NO: 15223248 NR Description: unknown protein; protein id: At1g70800.1
  misc_feature (1)..(165): Homolog of NCBI NO: 18409682 NR Description: expressed protein; protein id: At1g70810.1, by cDNA: 23322., supported by cDNA: gi_13430459 [Arabidopsis
  misc_feature (1)..(165): Homolog of NCBI NO: 13430460 NR Description: unknown protein [Arabidopsis thaliana]
  misc_feature (1)..(163): Homolog of NCBI NO: 15220022 NR Description: unknown protein; protein id: At1g23140.1
  misc_feature (1)..(165): Homolog of NCBI NO: 18409675 NR Description: zinc finger and C2 domain protein, putative; id: At1g70790.1, supported by cDNA: 148076. [Arabidopsis
  misc_feature (1)..(165): Homolog of NCBI NO: 15226306 NR Description: hypothetical protein; protein id: At2g01540.1, by cDNA: gi_17065055, supported by cDNA: gi_20260029 [Arabidopsis >gi|25410912|pir||A84426 hypothetical protein At2g01540
  misc_feature (1)..(165): Homolog of NCBI NO: 15240322 NR Description: putative protein; protein id: At5g37740.1, by cDNA: gi_18377800, supported by cDNA: gi_21281220 [Arabidopsis
  misc_feature (1)..(165): Homolog of NCBI NO: 15221907 NR Description: unknown protein; protein id: At1g48590.1
  misc_feature (1)..(165): Homolog of NCBI NO: 25405940 NR Description: protein T1N15.21 [imported] - Arabidopsis >gi|8778695|gb|AAF79703.1|AC020889_11 T1N15.21 [Arabidopsis
  misc_feature (1)..(165): Homolog of NCBI NO: 30684739 NR Description: C2 domain-containing protein [Arabidopsis
MKELVGLVRILVKRGIDLARRDALSSDPFVVITMGPQKLKSFTVKNNCNPEWNEELTLAIEDPNEPVKLMVYDKDTFTADDKMGDAQIDMKPFLDVHKLGLKELPHGKELKRIVPTRDNCLSEDSIIVSDNGKIVQDMILLLKNVECGKVEIQLEWLKNPGGSGL

SEQ ID NO: 91184 - protein, 132 aa, Arabidopsis thaliana
  peptide (1)..(132): Ceres Seq. ID no. 12726751
  misc_feature (1)..(54): Pfam Name: C2 domain Pfam Description: C2 domain
  misc_feature (1)..(132): Homolog of NCBI NO: 15223248 NR Description: unknown protein; protein id: At1g70800.1
  misc_feature (1)..(132): Homolog of NCBI NO: 18409682 NR Description: expressed protein; protein id: At1g70810.1, by cDNA: 23322., supported by cDNA: gi_13430459 [Arabidopsis
  misc_feature (1)..(132): Homolog of NCBI NO: 13430460 NR Description: unknown protein [Arabidopsis thaliana]
  misc_feature (1)..(130): Homolog of NCBI NO: 15220022 NR Description: unknown protein; protein id: At1g23140.1
  misc_feature (1)..(132): Homolog of NCBI NO: 18409675 NR Description: zinc finger and C2 domain protein, putative; id: At1g70790.1, supported by cDNA: 148076. [Arabidopsis
  misc_feature (1)..(132): Homolog of NCBI NO: 15226306 NR Description: hypothetical protein; protein id: At2g01540.1, by cDNA: gi_17065055, supported by cDNA: gi_20260029 [Arabidopsis >gi|25410912|pir||A84426 hypothetical protein At2g01540
  misc_feature (1)..(132): Homolog of NCBI NO: 15240322 NR Description: putative protein; protein id: At5g37740.1, by cDNA: gi_18377800, supported by cDNA: gi_21281220 [Arabidopsis
  misc_feature (1)..(132): Homolog of NCBI NO: 15221907 NR Description: unknown protein; protein id: At1g48590.1
  misc_feature (1)..(132): Homolog of NCBI NO: 25405940 NR Description: protein T1N15.21 [imported] - Arabidopsis >gi|8778695|gb|AAF79703.1|AC020889_11 T1N15.21 [Arabidopsis
  misc_feature (1)..(132): Homolog of NCBI NO: 30684739 NR Description: C2 domain-containing protein [Arabidopsis
MGPQKLKSFTVKNNCNPEWNEELTLAIEDPNEPVKLMVYDKDTFTADDKMGDAQIDMKPFLDVHKLGLKELPHGKELKRIVPTRDNCLSEDSIIVSDNGKIVQDMILLLKNVECGKVEIQLEWLKNPGGSGL

SEQ ID NO: 91185 - DNA, 531 bp, Arabidopsis thaliana
  misc_feature (1)..(531): Ceres Seq. ID no. 12726771
  misc_feature: MA Experiment ID: 20000184 Result: Down-regulated in Transcription
  misc_feature: MA Experiment 20000184 PARAMETER Experiment Name: At_Shoots__P Parameter: Age (day) Value: 7
  misc_feature: MA Experiment 20000184 PARAMETER Experiment Name: At_Shoots__P Parameter: Tissue Value: Shoots vs. Whole Plant
  misc_feature: MA Experiment ID: 20000437 Result: Up-regulated in Transcription
  misc_feature: MA Experiment 20000437 PARAMETER Experiment Name: At_Drought_P Parameter: Age (day) Value: 8
  misc_feature: MA Experiment 20000437 PARAMETER Experiment Name: At_Drought_P Parameter: Organism Value: A. thaliana
  misc_feature: MA Experiment 20000437 PARAMETER Experiment Name: At_Drought_P Parameter: Plant Line Value: WS
  misc_feature: MA Experiment 20000437 PARAMETER Experiment Name: At_Drought_P Parameter: Timepoint (hr) Value: 24
  misc_feature: MA Experiment 20000437 PARAMETER Experiment Name: At_Drought_P Parameter: Tissue Value: Whole Plant
  misc_feature: MA Experiment 20000437 PARAMETER Experiment Name: At_Drought_P Parameter: Treatment Value: Drought vs. No Drought
  misc_feature: MA Experiment ID: 20000794 Result: Down-regulated in Transcription
  misc_feature: MA Experiment 20000794 PARAMETER Experiment Name: At_Petals_P Parameter: Age (day) Value: 23-25 days
  misc_feature: MA Experiment 20000794 PARAMETER Experiment Name: At_Petals_P Parameter: Plant Line Value: WS
  misc_feature: MA Experiment 20000794 PARAMETER Experiment Name: At_Petals_P Parameter: Tissue Value: Petals vs. Whole plant
atgagagattttgacataaaccaaacaccaaagacggaagaagatcgtgagtggatgatcggtgcaacaccacatgtcaacgaagatgatagcaactcgggtggccggcggcgcaaaaagctccgtctaacgaaagaacaatcacatcttcttgaagagagtttcatacaaaaccataccttaacccctaagcaaaaaaaagatttggccacctttttgaagcttagtcaaaggcaagttgaggtgtggtttcaaaatcgaagagctcggagtaagctaaagcacacggaaatggaatgtgagtatctaaaaagatggttcggatcgttgaaggaacaaaatcgacggctacaaatagaagttgaagaactacgagcgctaaagccatcatcgacctcggctttaaccatgtgtcctcggtgtgaacgtgtgactgatgcagtagataatgactctaatgccgttcaagagggggcagttcttagcagccggtcacggatgacaatttcctcttcctcttccctctgttga

SEQ ID NO: 91186 - protein, 176 aa, Arabidopsis thaliana; identical to SEQ ID NO: 44157
  peptide (1)..(176): Ceres Seq. ID no. 12726772
  misc_feature (37)..(93): Pfam Name: Homeobox domain Pfam Description: Homeobox domain
  misc_feature (1)..(176): Homolog of NCBI NO: 30698765 NR Description: homeodomain-leucine zipper protein, putative thaliana] >gi|26451347|dbj|BAC42774.1| unknown protein thaliana] >gi|28973379|gb|AAO64014.1| putative homeodomain
  misc_feature (1)..(147): Homolog of NCBI NO: 5006851 NR Description: homeodomain leucine zipper protein [Oryza sativa]
  misc_feature (1)..(147): Homolog of NCBI NO: 34911664 NR Description: putative homeodomain-leucine zipper [Oryza sativa
  misc_feature (5)..(155): Homolog of NCBI NO: 30677923 NR Description: homeodomain-leucine zipper protein ATHB-17
  misc_feature (6)..(155): Homolog of NCBI NO: 25386214 NR Description: probable homeodomain transcription factor - Arabidopsis thaliana >gi|3785973|gb|AAC67320.1| putative
  misc_feature (11)..(169): Homolog of NCBI NO: 12230908 NR Description: Homeobox-leucine zipper protein HAT14 (HD-ZIP leucine zipper protein~gene_id:MPH15.6 [Arabidopsis thaliana]
  misc_feature (11)..(169): Homolog of NCBI NO: 22326632 NR Description: homeobox-leucine zipper protein HAT14 (HD-Zip
  misc_feature (27)..(169): Homolog of NCBI NO: 25386203 NR Description: homeobox protein HAT14 [imported] - Arabidopsis
  misc_feature (11)..(169): Homolog of NCBI NO: 29028870 NR Description: At5g06710 [Arabidopsis thaliana]
  misc_feature (11)..(155): Homolog of NCBI NO: 25457630 NR Description: homeobox protein THOM1 [imported] - tomato

SEQ ID NO: 91187 - protein, 158 aa, Arabidopsis thaliana; identical to SEQ ID NO: 44158
  peptide (1)..(158): Ceres Seq. ID no. 12726773
  misc_feature (19)..(75): Pfam Name: Homeobox domain Pfam Description: Homeobox domain
  misc_feature (1)..(158): Homolog of NCBI NO: 30698765 NR Description: homeodomain-leucine zipper protein, putative thaliana] >gi|26451347|dbj|BAC42774.1| unknown protein thaliana] >gi|28973379|gb|AAO64014.1| putative homeodomain
  misc_feature (1)..(129): Homolog of NCBI NO: 5006851 NR Description: homeodomain leucine zipper protein [Oryza sativa]
  misc_feature (1)..(129): Homolog of NCBI NO: 34911664 NR Description: putative homeodomain-leucine zipper [Oryza sativa
  misc_feature (1)..(137): Homolog of NCBI NO: 30677923 NR Description: homeodomain-leucine zipper protein ATHB-17
  misc_feature (1)..(137): Homolog of NCBI NO: 25386214 NR Description: probable homeodomain transcription factor - Arabidopsis thaliana >gi|3785973|gb|AAC67320.1| putative
  misc_feature (1)..(151): Homolog of NCBI NO: 12230908 NR Description: Homeobox-leucine zipper protein HAT14 (HD-ZIP leucine zipper protein~gene_id:MPH15.6 [Arabidopsis thaliana]
  misc_feature (1)..(151): Homolog of NCBI NO: 22326632 NR Description: homeobox-leucine zipper protein HAT14 (HD-Zip
  misc_feature (9)..(151): Homolog of NCBI NO: 25386203 NR Description: homeobox protein HAT14 [imported] - Arabidopsis
  misc_feature (1)..(151): Homolog of NCBI NO: 29028870 NR Description: At5g06710 [Arabidopsis thaliana]
  misc_feature (1)..(137): Homolog of NCBI NO: 25457630 NR Description: homeobox protein THOM1 [imported] - tomato

SEQ ID NO: 91188 - DNA, 588 bp, Arabidopsis thaliana
  misc_feature (1)..(588): Ceres Seq. ID no. 12726786
  misc_feature: MA Experiment ID: 20000169 Result: Up-regulated in Transcription
  misc_feature: MA Experiment 20000169 PARAMETER Experiment Name: At_100uM_ABA_P Parameter: Age (day) Value: 14
  misc_feature: MA Experiment 20000169 PARAMETER Experiment Name: At_100uM_ABA_P Parameter: Organism Value: A. thaliana
  misc_feature: MA Experiment 20000169 PARAMETER Experiment Name: At_100uM_ABA_P Parameter: Plant Line Value: WS
  misc_feature: MA Experiment 20000169 PARAMETER Experiment Name: At_100uM_ABA_P Parameter: Timepoint (hr) Value: 6
  misc_feature: MA Experiment 20000169 PARAMETER Experiment Name: At_100uM_ABA_P Parameter: Tissue Value: Aerial
  misc_feature: MA Experiment 20000169 PARAMETER Experiment Name: At_100uM_ABA_P Parameter: Treatment Value: 100uM ABA vs. No Treatment
  misc_feature: MA Experiment ID: 20000180 Result: Down-regulated in Transcription
  misc_feature: MA Experiment 20000180 PARAMETER Experiment Name: At_Germinating_Seeds_P Parameter: Age (hr) Value: 24 vs. 0
  misc_feature: MA Experiment 20000180 PARAMETER Experiment Name: At_Germinating_Seeds_P Parameter: Tissue Value: Germinating Seeds
  misc_feature: MA Experiment ID: 20000264 Result: Up-regulated in Transcription
  misc_feature: MA Experiment 20000264 PARAMETER Experiment Name: At_Open_Flower_P Parameter: Age (day) Value: 21
  misc_feature: MA Experiment 20000264 PARAMETER Experiment Name: At_Open_Flower_P Parameter: Plant Line Value: WS
  misc_feature: MA Experiment 20000264 PARAMETER Experiment Name: At_Open_Flower_P Parameter: Tissue Value: Open Flower vs. Whole Plant
  misc_feature: MA Experiment ID: 20000286 Result: Up-regulated in Transcription
  misc_feature: MA Experiment 20000286 PARAMETER Experiment Name: At_Open_Flower_P Parameter: Age (day) Value: 21
  misc_feature: MA Experiment 20000286 PARAMETER Experiment Name: At_Open_Flower_P Parameter: Plant Line Value: WS
  misc_feature: MA Experiment 20000286 PARAMETER Experiment Name: At_Open_Flower_P Parameter: Tissue Value: Half Open vs. Whole Plant
  misc_feature: MA Experiment ID: 20001248 Result: Down-regulated in Transcription
  misc_feature: MA Experiment 20001248 PARAMETER Experiment Name: At_Far-red-induction_P Parameter: Age (day) Value: 7
  misc_feature: MA Experiment 20001248 PARAMETER Experiment Name: At_Far-red-induction_P Parameter: Light Value: Far-red vs. White
  misc_feature: MA Experiment 20001248 PARAMETER Experiment Name: At_Far-red-induction_P Parameter: Organism Value: A. thaliana
  misc_feature: MA Experiment 20001248 PARAMETER Experiment Name: At_Far-red-induction_P Parameter: Plant Line Value: Columbia
  misc_feature: MA Experiment 20001248 PARAMETER Experiment Name: At_Far-red-induction_P Parameter: Timepoint (hr) Value: 4
  misc_feature: MA Experiment 20001248 PARAMETER Experiment Name: At_Far-red-induction_P Parameter: Tissue Value: Whole Plant
  misc_feature: MA Experiment ID: 20001556 Result: Down-regulated in Transcription
  misc_feature: MA Experiment 20001556 PARAMETER Experiment Name: At_Drought_Soil_Dry_P Parameter: Age (day) Value: 26
  misc_feature: MA Experiment 20001556 PARAMETER Experiment Name: At_Drought_Soil_Dry_P Parameter: Organism Value: A. thaliana
  misc_feature: MA Experiment 20001556 PARAMETER Experiment Name: At_Drought_Soil_Dry_P Parameter: Plant Line Value: WS
  misc_feature: MA Experiment 20001556 PARAMETER Experiment Name: At_Drought_Soil_Dry_P Parameter: Post Timepoint (hr) Value: None
  misc_feature: MA Experiment 20001556 PARAMETER Experiment Name: At_Drought_Soil_Dry_P Parameter: Post-Treatment Value: None
  misc_feature: MA Experiment 20001556 PARAMETER Experiment Name: At_Drought_Soil_Dry_P Parameter: Timepoint (day) Value: 12
  misc_feature: MA Experiment 20001556 PARAMETER Experiment Name: At_Drought_Soil_Dry_P Parameter: Treatment Value: Drought vs. No Drought
  misc_feature: MA Experiment ID: 20001557 Result: Down-regulated in Transcription
  misc_feature: MA Experiment 20001557 PARAMETER Experiment Name: At_Drought_Soil_Dry_P Parameter: Age (day) Value: 27
  misc_feature: MA Experiment 20001557 PARAMETER Experiment Name: At_Drought_Soil_Dry_P Parameter: Organism Value: A. thaliana
  misc_feature: MA Experiment 20001557 PARAMETER Experiment Name: At_Drought_Soil_Dry_P Parameter: Plant Line Value: WS
  misc_feature: MA Experiment 20001557 PARAMETER Experiment Name: At_Drought_Soil_Dry_P Parameter: Post Timepoint (hr) Value: 3
  misc_feature: MA Experiment 20001557 PARAMETER Experiment Name: At_Drought_Soil_Dry_P Parameter: Post-Treatment Value: Re-Water vs. No Drought
  misc_feature: MA Experiment 20001557 PARAMETER Experiment Name: At_Drought_Soil_Dry_P Parameter: Timepoint (day) Value: 13
  misc_feature: MA Experiment 20001557 PARAMETER Experiment Name: At_Drought_Soil_Dry_P Parameter: Treatment Value: Drought vs. No Drought
  misc_feature: MA Experiment ID: 20001558 Result: Down-regulated in Transcription
  misc_feature: MA Experiment 20001558 PARAMETER Experiment Name: At_Drought_Soil_Dry_P Parameter: Age (day) Value: 27
  misc_feature: MA Experiment 20001558 PARAMETER Experiment Name: At_Drought_Soil_Dry_P Parameter: Organism Value: A. thaliana
  misc_feature: MA Experiment 20001558 PARAMETER Experiment Name: At_Drought_Soil_Dry_P Parameter: Plant Line Value: WS
  misc_feature: MA Experiment 20001558 PARAMETER Experiment Name: At_Drought_Soil_Dry_P Parameter: Post Timepoint (hr) Value: 6
  misc_feature: MA Experiment 20001558 PARAMETER Experiment Name: At_Drought_Soil_Dry_P Parameter: Post-Treatment Value: Re-Water vs. No Drought
  misc_feature: MA Experiment 20001558 PARAMETER Experiment Name: At_Drought_Soil_Dry_P Parameter: Timepoint (day) Value: 13
  misc_feature: MA Experiment 20001558 PARAMETER Experiment Name: At_Drought_Soil_Dry_P Parameter: Treatment Value: Drought vs. No Drought
atgggaaatagcttgggaaccaagaaaacagcgacaatcatgaacatcaatggcgagagtttcaaactgaaaacgcctgtggaagctggtacagtggttaaagattttccaggccacgttctcttggaatccgaagcagtgaagcgtttaggaatcagagcaaagcccttggagcctcaccaaaacttggaatccaaaaggatttacttcatggttgaacttccaagaacatggaaagagagaactccaagaagggttcggtcgggaatccagatgagtgcgaaggagagattagagaatctgaagctgtctcgtagatcatcatctgatctctcggtaatgaagaagaagacagaggttaatgatgaagagagagaagtgagtagcgtgaagttgaagttaccaaagtggaaaattgagaaactgaggaaagagagtgagagtggctctgatttctccaacaagatcacacaactttgtctccttcacataccaagtggtttgattcatcaaagacaacatttgcttcgtaatggaggaagaaactttgggattgaagaaaaagaagaaggtgccaaaatcacatga

SEQ ID NO: 91189 - protein, 195 aa, Arabidopsis thaliana
  peptide (1)..(195): Ceres Seq. ID no. 12726787
  misc_feature (1)..(195): Homolog of NCBI NO: 22330562 NR Description: hypothetical protein; protein id: At1g71015.1 thaliana] >gi|5902399|gb|AAD55501.1|AC008148_11 Hypothetical
  misc_feature (1)..(159): Homolog of NCBI NO: 30677912 NR Description: expressed protein [Arabidopsis thaliana]
MGNSLGTKKTATIMNINGESFKLKTPVEAGTVVKDFPGHVLLESEAVKRLGIRAKPLEPHQNLESKRIYFMVELPRTWKERTPRRVRSGIQMSAKERLENLKLSRRSSSDLSVMKKKTEVNDEEREVSSVKLKLPKWKIEKLRKESESGSDFSNKITQLCLLHIPSGLIHQRQHLLRNGGRNFGIEEKEEGAKIT

SEQ ID NO: 91190 - protein, 182 aa, Arabidopsis thaliana
  peptide (1)..(182): Ceres Seq. ID no. 12726788
  misc_feature (1)..(182): Homolog of NCBI NO: 22330562 NR Description: hypothetical protein; protein id: At1g71015.1 thaliana] >gi|5902399|gb|AAD55501.1|AC008148_11 Hypothetical
  misc_feature (1)..(146): Homolog of NCBI NO: 30677912 NR Description: expressed protein [Arabidopsis thaliana]
MNINGESFKLKTPVEAGTVVKDFPGHVLLESEAVKRLGIRAKPLEPHQNLESKRIYFMVELPRTWKERTPRRVRSGIQMSAKERLENLKLSRRSSSDLSVMKKKTEVNDEEREVSSVKLKLPKWKIEKLRKESESGSDFSNKITQLCLLHIPSGLIHQRQHLLRNGGRNFGIEEKEEGAKIT

SEQ ID NO: 91191 - protein, 125 aa, Arabidopsis thaliana
  peptide (1)..(125): Ceres Seq. ID no. 12726789
  misc_feature (1)..(125): Homolog of NCBI NO: 22330562 NR Description: hypothetical protein; protein id: At1g71015.1 thaliana] >gi|5902399|gb|AAD55501.1|AC008148_11 Hypothetical
  misc_feature (1)..(89): Homolog of NCBI NO: 30677912 NR Description: expressed protein [Arabidopsis thaliana]
MVELPRTWKERTPRRVRSGIQMSAKERLENLKLSRRSSSDLSVMKKKTEVNDEEREVSSVKLKLPKWKIEKLRKESESGSDFSNKITQLCLLHIPSGLIHQRQHLLRNGGRNFGIEEKEEGAKIT

SEQ ID NO: 91192 - DNA, 1773 bp, Arabidopsis thaliana
  misc_feature (1)..(1773): Ceres Seq. ID no. 12726794
  misc_feature: MA Experiment ID: 20000171 Result: Down-regulated in Transcription
  misc_feature: MA Experiment 20000171 PARAMETER Experiment Name: At_42deg_Heat_P Parameter: Age (day) Value: 14
  misc_feature: MA Experiment 20000171 PARAMETER Experiment Name: At_42deg_Heat_P Parameter: Organism Value: A. thaliana
  misc_feature: MA Experiment 20000171 PARAMETER Experiment Name: At_42deg_Heat_P Parameter: Plant Line Value: WS
  misc_feature: MA Experiment 20000171 PARAMETER Experiment Name: At_42deg_Heat_P Parameter: Temperature (deg C) Value: 42 vs. 22
  misc_feature: MA Experiment 20000171 PARAMETER Experiment Name: At_42deg_Heat_P Parameter: Timepoint (hr) Value: 1
  misc_feature: MA Experiment 20000171 PARAMETER Experiment Name: At_42deg_Heat_P Parameter: Tissue Value: Aerial
  misc_feature: MA Experiment ID: 20000173 Result: Down-regulated in Transcription
  misc_feature: MA Experiment 20000173 PARAMETER Experiment Name: At_42deg_Heat_P Parameter: Age (day) Value: 14
  misc_feature: MA Experiment 20000173 PARAMETER Experiment Name: At_42deg_Heat_P Parameter: Organism Value: A. thaliana
  misc_feature: MA Experiment 20000173 PARAMETER Experiment Name: At_42deg_Heat_P Parameter: Plant Line Value: WS
  misc_feature: MA Experiment 20000173 PARAMETER Experiment Name: At_42deg_Heat_P Parameter: Temperature (deg C) Value: 42 vs. 22
  misc_feature: MA Experiment 20000173 PARAMETER Experiment Name: At_42deg_Heat_P Parameter: Timepoint (hr) Value: 6
  misc_feature: MA Experiment 20000173 PARAMETER Experiment Name: At_42deg_Heat_P Parameter: Tissue Value: Aerial
  misc_feature: MA Experiment ID: 20000235 Result: Up-regulated in Transcription
  misc_feature: MA Experiment 20000235 PARAMETER Experiment Name: At_Siliques_P Parameter: Age (day) Value: 21
  misc_feature: MA Experiment 20000235 PARAMETER Experiment Name: At_Siliques_P Parameter: Organism Value: A. thaliana
  misc_feature: MA Experiment 20000235 PARAMETER Experiment Name: At_Siliques_P Parameter: Plant Line Value: WS
  misc_feature: MA Experiment 20000235 PARAMETER Experiment Name: At_Siliques_P Parameter: Tissue Value: 5-10mm Siliques vs. Whole Plant
  misc_feature: MA Experiment ID: 20001451 Result: Down-regulated in Transcription
  misc_feature: MA Experiment 20001451 PARAMETER Experiment Name: At_Far-red-induction_P Parameter: Age (day) Value: 7
  misc_feature: MA Experiment 20001451 PARAMETER Experiment Name: At_Far-red-induction_P Parameter: Light Value: Far-red vs. White
  misc_feature: MA Experiment 20001451 PARAMETER Experiment Name: At_Far-red-induction_P Parameter: Organism Value: A. thaliana
  misc_feature: MA Experiment 20001451 PARAMETER Experiment Name: At_Far-red-induction_P Parameter: Plant Line Value: Columbia
  misc_feature: MA Experiment 20001451 PARAMETER Experiment Name: At_Far-red-induction_P Parameter: Timepoint (hr) Value: 24
  misc_feature: MA Experiment 20001451 PARAMETER Experiment Name: At_Far-red-induction_P Parameter: Tissue Value: Whole Plant
  misc_feature: MA Experiment ID: 20001911 Result: Down-regulated in Transcription
  misc_feature: MA Experiment 20001911 PARAMETER Experiment Name: At_Drought_Reproduction_P Parameter: Age (day) Value: 40
  misc_feature: MA Experiment 20001911 PARAMETER Experiment Name: At_Drought_Reproduction_P Parameter: Organism Value: A. thaliana
  misc_feature: MA Experiment 20001911 PARAMETER Experiment Name: At_Drought_Reproduction_P Parameter: Plant Line Value: WS
  misc_feature: MA Experiment 20001911 PARAMETER Experiment Name: At_Drought_Reproduction_P Parameter: Timepoint (day) Value: 10
  misc_feature: MA Experiment 20001911 PARAMETER Experiment Name: At_Drought_Reproduction_P Parameter: Tissue Value: Flowers
  misc_feature: MA Experiment 20001911 PARAMETER Experiment Name: At_Drought_Reproduction_P Parameter: Treatment Value: Drought vs. No Drought
acaaccgaccgagtcggagatcgaagttttgaacctaagaatctcgttgtcttcttcttctgcagagcctccaaagtctaaatcttttggttacgtctctcaaaccccaacctttatactcactctctttctttttctctcttacctccattggcttcttcttgagatctcgtcaggctctgatcccaatctatgttcgatctcactctcaccgagatctcatcttcctccattttttcaaagatccatatatgagctctaaaaccacagatttcaatctgtgaatccgtatatatgctcaatcggagccagattctaacaaatcaaagaaaggaagaagaagtgaagaacaatgggagctgaaaagaaatggcttttcacactcttctctgtagtattcctctcagtgttccttctcttactttattctatctctgctttcacctctaaaccattcccttcttcaattcgtcacggtgctcattacccacctgcttttgcttattacataaccggtggtcgtggagataatgaccggatctctcggttattgcttgcggtttatcatcctaggaatcggtatcttatccatctgggtgctgaagctactgatgcagagaggctagctcttctctctgatttgaaatctgttcctgctgtgaatgcttttgggaatgttgatgttttagggaaagttgatcgtttgtctgagaatggtgcttctaagattgcttctactcttcacgctgtttctattcttcttaagcttgatcctacttggaattggtttattgagcttagtgctttggattatcctctcataactcaagatgacctatctcatgtgtttgcctcggtgaacagaagtctcaattttattgatcacactagtgaccttgcttggaaagaatctcagagaatcaagcctattgttgttgatccagcactttacttagctagaagaactcagctcttcactgctaccgaaaagcgaccaacaccagatgcattcaaagtctttacaggctcgccttggattgtactaagcagacctttcctagaatactgcatcttcggttgggataatttaccaagaatccttctcatgtattttaacaatgtcattctctctgaagaatgctacttccacacggtgatatgcaacgcaccggagttcagtaacacgacagtcaacggggacttacgatacatgatatgggacagtccaccaaaaatggaaccacatttccttactatatcggatttcgaccaaatggctcaaagcggagcagctttcgctagacaattcaagaaagatgatccagtactcgacatggtcgatagagagatcctgaaacgtggacgttacagagtcactcctggcgcttggtgctcgagccacagtagctggtggacagatccttgctcggagtgggatgaagtaaacattgtcaaagctggacctcaagctaagaagctagacgaaacaataacgaattttcttgatgatttgaattcacaatcgaatcaatgcaagtgattatacgacacacgagactacattgttttcagtctctgtaaggttaaattctttgggcaacaacacagtggctgctgtatttatacgaggagaaggagaaagagaagagaaaggagatatttttattctctttcccagattttgtaattcctttgttaaagccattagagaacttttgttcgcaaatttgataaacctttgttcctctgttgtatcttagttaattgaaagtt

SEQ ID NO: 91193 - protein, 395 aa, Arabidopsis thaliana
  peptide (1)..(395): Ceres Seq. ID no. 12726795
  misc_feature (49)..(274): Pfam Name: Core-2/I-Branching enzyme Pfam Description: Core-2/I-Branching enzyme
  misc_feature (1)..(395): Homolog of NCBI NO: 18409754 NR Description: N-acetylglucosaminyltransferase family enzyme family); protein id: At1g71070.1, supported by cDNA:
  misc_feature (1)..(395): Homolog of NCBI NO: 34895394 NR Description: P0445D12.4 [Oryza sativa (japonica
  misc_feature (28)..(395): Homolog of NCBI NO: 15242532 NR Description: N-acetylglucosaminyltransferase family
  misc_feature (46)..(395): Homolog of NCBI NO: 15242199 NR Description: N-acetylglucosaminyltransferase family enzyme family); protein id: At5g15050.1, supported by cDNA: supported by cDNA: gi_16209673 [Arabidopsis thaliana]
  misc_feature (47)..(395): Homolog of NCBI NO: 15146308 NR Description: AT3g15350/K7L4_15 [Arabidopsis thaliana]
  misc_feature (47)..(395): Homolog of NCBI NO: 18400725 NR Description: N-acetylglucosaminyltransferase family enzyme family); protein id: At3g15350.1, supported by cDNA:
  misc_feature (46)..(394): Homolog of NCBI NO: 32489778 NR Description: OSJNBb0018A10.9 [Oryza sativa (japonica
  misc_feature (30)..(394): Homolog of NCBI NO: 15218824 NR Description: N-acetylglucosaminyltransferase family enzyme family); protein id: At1g03520.1, supported by cDNA: supported by cDNA: gi_20465790 [Arabidopsis thaliana] thaliana
  misc_feature (47)..(394): Homolog of NCBI NO: 15236287 NR Description: N-acetylglucosaminyltransferase family
  misc_feature (8)..(394): Homolog of NCBI NO: 15229570 NR Description: hypothetical protein; protein id: At3g24040.1 thaliana] >gi|9294673|dbj|BAB03022.1|
MGAEKKWLFTLFSVVFLSVFLLLLYSISAFTSKPFPSSIRHGAHYPPAFAYYITGGRGDNDRISRLLLAVYHPRNRYLIHLGAEATDAERLALLSDLKSVPAVNAFGNVDVLGKVDRLSENGASKIASTLHAVSILLKLDPTWNWFIELSALDYPLITQDDLSHVFASVNRSLNFIDHTSDLAWKESQRIKPIVVDPALYLARRTQLFTATEKRPTPDAFKVFTGSPWIVLSRPFLEYCIFGWDNLPRILLMYFNNVILSEECYFHTVICNAPEFSNTTVNGDLRYMIWDSPPKMEPHFLTISDFDQMAQSGAAFARQFKKDDPVLDMVDREILKRGRYRVTPGAWCSSHSSWWTDPCSEWDEVNIVKAGPQAKKLDETITNFLDDLNSQSNQCK

SEQ ID NO: 91194 - DNA, 1543 bp, Arabidopsis thaliana
  misc_feature (1)..(1543): Ceres Seq. ID no. 12726796
  misc_feature: MA Experiment ID: 108461 Result: Down-regulated in Transcription
  misc_feature: MA Experiment 108461 PARAMETER Experiment Name: At_Germinating_Seeds_cDNA_P Parameter: Age (day) Value: 1 vs. 0
  misc_feature: MA Experiment 108461 PARAMETER Experiment Name: At_Germinating_Seeds_cDNA_P Parameter: Tissue Value: Germinating Seeds
  misc_feature: MA Experiment ID: 108462 Result: Down-regulated in Transcription
  misc_feature: MA Experiment 108462 PARAMETER Experiment Name: At_Germinating_Seeds_cDNA_P Parameter: Age (day) Value: 2 vs. 0
  misc_feature: MA Experiment 108462 PARAMETER Experiment Name: At_Germinating_Seeds_cDNA_P Parameter: Tissue Value: Germinating Seeds
  misc_feature: MA Experiment ID: 108464 Result: Down-regulated in Transcription
  misc_feature: MA Experiment 108464 PARAMETER Experiment Name: At_Germinating_Seeds_cDNA_P Parameter: Age (day) Value: 4 vs. 0
  misc_feature: MA Experiment 108464 PARAMETER Experiment Name: At_Germinating_Seeds_cDNA_P Parameter: Tissue Value: Germinating Seeds
  misc_feature: MA Experiment ID: 108469 Result: Up-regulated in Transcription
  misc_feature: MA Experiment ID: 108667 Result: Up-regulated in Transcription
  misc_feature: MA Experiment 108667 PARAMETER Experiment Name: At_2mM_SA_cDNA_P Parameter: Plant Line Value: WS
  misc_feature: MA Experiment 108667 PARAMETER Experiment Name: At_2mM_SA_cDNA_P Parameter: Timepoint (hr) Value: 1
  misc_feature: MA Experiment 108667 PARAMETER Experiment Name: At_2mM_SA_cDNA_P Parameter: Treatment Value: 2mM SA vs. No Treatment
  misc_feature: MA Experiment ID: 108668 Result: Up-regulated in Transcription
  misc_feature: MA Experiment 108668 PARAMETER Experiment Name: At_2mM_SA_cDNA_P Parameter: Plant Line Value: WS
  misc_feature: MA Experiment 108668 PARAMETER Experiment Name: At_2mM_SA_cDNA_P Parameter: Timepoint (hr) Value: 6
  misc_feature: MA Experiment 108668 PARAMETER Experiment Name: At_2mM_SA_cDNA_P Parameter: Treatment Value: 2mM SA vs. No Treatment
  misc_feature: MA Experiment ID: 20000068 Result: Up-regulated in Transcription
  misc_feature: MA Experiment ID: 20000171 Result: Down-regulated in Transcription
  misc_feature: MA Experiment 20000171 PARAMETER Experiment Name: At_42deg_Heat_P Parameter: Age (day) Value: 14
  misc_feature: MA Experiment 20000171 PARAMETER Experiment Name: At_42deg_Heat_P Parameter: Organism Value: A. thaliana
  misc_feature: MA Experiment 20000171 PARAMETER Experiment Name: At_42deg_Heat_P Parameter: Plant Line Value: WS
  misc_feature: MA Experiment 20000171 PARAMETER Experiment Name: At_42deg_Heat_P Parameter: Temperature (deg C) Value: 42 vs. 22
  misc_feature: MA Experiment 20000171 PARAMETER Experiment Name: At_42deg_Heat_P Parameter: Timepoint (hr) Value: 1
  misc_feature: MA Experiment 20000171 PARAMETER Experiment Name: At_42deg_Heat_P Parameter: Tissue Value: Aerial
  misc_feature: MA Experiment ID: 20000173 Result: Down-regulated in Transcription
  misc_feature: MA Experiment 20000173 PARAMETER Experiment Name: At_42deg_Heat_P Parameter: Age (day) Value: 14
  misc_feature: MA Experiment 20000173 PARAMETER Experiment Name: At_42deg_Heat_P Parameter: Organism Value: A. thaliana
  misc_feature: MA Experiment 20000173 PARAMETER Experiment Name: At_42deg_Heat_P Parameter: Plant Line Value: WS
  misc_feature: MA Experiment 20000173 PARAMETER Experiment Name: At_42deg_Heat_P Parameter: Temperature (deg C) Value: 42 vs. 22
  misc_feature: MA Experiment 20000173 PARAMETER Experiment Name: At_42deg_Heat_P Parameter: Timepoint (hr) Value: 6
  misc_feature: MA Experiment 20000173 PARAMETER Experiment Name: At_42deg_Heat_P Parameter: Tissue Value: Aerial
  misc_feature: MA Experiment ID: 20000179 Result: Down-regulated in Transcription
  misc_feature: MA Experiment 20000179 PARAMETER Experiment Name: At_Germinating_Seeds_P Parameter: Age (hr) Value: 6 vs. 0
  misc_feature: MA Experiment 20000179 PARAMETER Experiment Name: At_Germinating_Seeds_P Parameter: Tissue Value: Germinating Seeds
  misc_feature: MA Experiment ID: 20000180 Result: Down-regulated in Transcription
  misc_feature: MA Experiment 20000180 PARAMETER Experiment Name: At_Germinating_Seeds_P Parameter: Age (hr) Value: 24 vs. 0
  misc_feature: MA Experiment 20000180 PARAMETER Experiment Name: At_Germinating_Seeds_P Parameter: Tissue Value: Germinating Seeds
  misc_feature: MA Experiment ID: 20000182 Result: Up-regulated in Transcription
  misc_feature: MA Experiment 20000182 PARAMETER Experiment Name: At_2mM_SA_P Parameter: Age (day) Value: 14
  misc_feature: MA Experiment 20000182 PARAMETER Experiment Name: At_2mM_SA_P Parameter: Organism Value: A. thaliana
  misc_feature: MA Experiment 20000182 PARAMETER Experiment Name: At_2mM_SA_P Parameter: Plant Line Value: WS
  misc_feature: MA Experiment 20000182 PARAMETER Experiment Name: At_2mM_SA_P Parameter: Timepoint (hr) Value: 6
  misc_feature: MA Experiment 20000182 PARAMETER Experiment Name: At_2mM_SA_P Parameter: Tissue Value: Aerial
  misc_feature: MA Experiment 20000182 PARAMETER Experiment Name: At_2mM_SA_P Parameter: Treatment Value: 2mM SA vs. No Treatment
  misc_feature: MA Experiment ID: 20000184 Result: Down-regulated in Transcription
  misc_feature: MA Experiment 20000184 PARAMETER Experiment Name: At_Shoots__P Parameter: Age (day) Value: 7
  misc_feature: MA Experiment 20000184 PARAMETER Experiment Name: At_Shoots__P Parameter: Tissue Value: Shoots vs. Whole Plant
  misc_feature: MA Experiment ID: 20000185 Result: Down-regulated in Transcription
  misc_feature: MA Experiment 20000185 PARAMETER Experiment Name: At_Roots__P Parameter: Age (day) Value: 7 vs. 21
  misc_feature: MA Experiment 20000185 PARAMETER Experiment Name: At_Roots__P Parameter: Organism Value: A. thaliana
  misc_feature: MA Experiment 20000185 PARAMETER Experiment Name: At_Roots__P Parameter: Tissue Value: Roots vs. Whole Plant
  misc_feature: MA Experiment ID: 20000234 Result: Down-regulated in Transcription
  misc_feature: MA Experiment 20000234 PARAMETER Experiment Name: At_Siliques_P Parameter: Age (day) Value: 21
  misc_feature: MA Experiment 20000234 PARAMETER Experiment Name: At_Siliques_P Parameter: Organism Value: A. thaliana
  misc_feature: MA Experiment 20000234 PARAMETER Experiment Name: At_Siliques_P Parameter: Plant Line Value: WS
  misc_feature: MA Experiment 20000234 PARAMETER Experiment Name: At_Siliques_P Parameter: Tissue Value: Less Than 5mm Siliques vs. Whole Plant
  misc_feature: MA Experiment ID: 20000265 Result: Down-regulated in Transcription
  misc_feature: MA Experiment 20000265 PARAMETER Experiment Name: At_Open_Flower_P Parameter: Age (day) Value: 21
  misc_feature: MA Experiment 20000265 PARAMETER Experiment Name: At_Open_Flower_P Parameter: Plant Line Value: WS
  misc_feature: MA Experiment 20000265 PARAMETER Experiment Name: At_Open_Flower_P Parameter: Tissue Value: Closed Flower vs. Whole Plant
  misc_feature: MA Experiment ID: 20000286 Result: Down-regulated in Transcription
  misc_feature: MA Experiment 20000286 PARAMETER Experiment Name: At_Open_Flower_P Parameter: Age (day) Value: 21
  misc_feature: MA Experiment 20000286 PARAMETER Experiment Name: At_Open_Flower_P Parameter: Plant Line Value: WS
  misc_feature: MA Experiment 20000286 PARAMETER Experiment Name: At_Open_Flower_P Parameter: Tissue Value: Half Open vs. Whole Plant
  misc_feature: MA Experiment ID: 20000439 Result: Down-regulated in Transcription
  misc_feature: MA Experiment 20000439 PARAMETER Experiment Name: At_Roots__P Parameter: Age (day) Value: 14 vs. 21
  misc_feature: MA Experiment 20000439 PARAMETER Experiment Name: At_Roots__P Parameter: Organism Value: A. thaliana
  misc_feature: MA Experiment 20000439 PARAMETER Experiment Name: At_Roots__P Parameter: Tissue Value: Roots vs. Whole Plant
  misc_feature: MA Experiment ID: 20000451 Result: Up-regulated in Transcription
  misc_feature: MA Experiment 20000451 PARAMETER Experiment Name: At_CS6879_Shoots-Roots_P Parameter: Age (day) Value: 14
  misc_feature: MA Experiment 20000451 PARAMETER Experiment Name: At_CS6879_Shoots-Roots_P Parameter: Organism Value: A. thaliana
  misc_feature: MA Experiment 20000451 PARAMETER Experiment Name: At_CS6879_Shoots-Roots_P Parameter: Plant Line Value: CS6879 vs. WS
  misc_feature: MA Experiment 20000451 PARAMETER Experiment Name: At_CS6879_Shoots-Roots_P Parameter: Tissue Value: Roots
  misc_feature: MA Experiment ID: 20000453 Result: Down-regulated in Transcription
  misc_feature: MA Experiment 20000453 PARAMETER Experiment Name: At_100uM_ABA_P Parameter: Age (day) Value: 15
  misc_feature: MA Experiment 20000453 PARAMETER Experiment Name: At_100uM_ABA_P Parameter: Organism Value: A. thaliana
  misc_feature: MA Experiment 20000453 PARAMETER Experiment Name: At_100uM_ABA_P Parameter: Plant Line Value: WS
  misc_feature: MA Experiment 20000453 PARAMETER Experiment Name: At_100uM_ABA_P Parameter: Timepoint (hr) Value: 24
  misc_feature: MA Experiment 20000453 PARAMETER Experiment Name: At_100uM_ABA_P Parameter: Tissue Value: Aerial
  misc_feature: MA Experiment 20000453 PARAMETER Experiment Name: At_100uM_ABA_P Parameter: Treatment Value: 100uM ABA vs. No Treatment
  misc_feature: MA Experiment ID: 20000495 Result: Down-regulated in Transcription
  misc_feature: MA Experiment 20000495 PARAMETER Experiment Name: At_Guard_Cells_P Parameter: Harvest Date Value: 8/2/2002
  misc_feature: MA Experiment 20000495 PARAMETER Experiment Name: At_Guard_Cells_P Parameter: Organism Value: A. thaliana
  misc_feature: MA Experiment 20000495 PARAMETER Experiment Name: At_Guard_Cells_P Parameter: Tissue Value: Guard Cells vs. Leaves
  misc_feature: MA Experiment ID: 20000709 Result: Up-regulated in Transcription
  misc_feature: MA Experiment 20000709 PARAMETER Experiment Name: At_15mM_NH4NO3_L-to-H_P Parameter: Age (hr) Value: 14
  misc_feature: MA Experiment 20000709 PARAMETER Experiment Name: At_15mM_NH4NO3_L-to-H_P Parameter: Organism Value: A. thaliana
  misc_feature: MA Experiment 20000709 PARAMETER Experiment Name: At_15mM_NH4NO3_L-to-H_P Parameter: Plant Line Value: WS
  misc_feature: MA Experiment 20000709 PARAMETER Experiment Name: At_15mM_NH4NO3_L-to-H_P Parameter: Timepoint (hr) Value: 4
  misc_feature: MA Experiment 20000709 PARAMETER Experiment Name: At_15mM_NH4NO3_L-to-H_P Parameter: Tissue Value: Aerial
  misc_feature: MA Experiment 20000709 PARAMETER Experiment Name: At_15mM_NH4NO3_L-to-H_P Parameter: Treatment Value: 15mM NH4NO3 vs. 30mM Mannitol
  misc_feature: MA Experiment ID: 20001248 Result: Down-regulated in Transcription
  misc_feature: MA Experiment 20001248 PARAMETER Experiment Name: At_Far-red-induction_P Parameter: Age (day) Value: 7
  misc_feature: MA Experiment 20001248 PARAMETER Experiment Name: At_Far-red-induction_P Parameter: Light Value: Far-red vs. White
  misc_feature: MA Experiment 20001248 PARAMETER Experiment Name: At_Far-red-induction_P Parameter: Organism Value: A. thaliana
  misc_feature: MA Experiment 20001248 PARAMETER Experiment Name: At_Far-red-induction_P Parameter: Plant Line Value: Columbia
  misc_feature: MA Experiment 20001248 PARAMETER Experiment Name: At_Far-red-induction_P Parameter: Timepoint (hr) Value: 4
  misc_feature: MA Experiment 20001248 PARAMETER Experiment Name: At_Far-red-induction_P Parameter: Tissue Value: Whole Plant
  misc_feature: MA Experiment ID: 20001450 Result: Down-regulated in Transcription
  misc_feature: MA Experiment 20001450 PARAMETER Experiment Name: At_Far-red-induction_P Parameter: Age (day) Value: 7
  misc_feature: MA Experiment 20001450 PARAMETER Experiment Name: At_Far-red-induction_P Parameter: Light Value: Far-red vs. White
  misc_feature: MA Experiment 20001450 PARAMETER Experiment Name: At_Far-red-induction_P Parameter: Organism Value: A. thaliana
  misc_feature: MA Experiment 20001450 PARAMETER Experiment Name: At_Far-red-induction_P Parameter: Plant Line Value: Columbia
  misc_feature: MA Experiment 20001450 PARAMETER Experiment Name: At_Far-red-induction_P Parameter: Timepoint (hr) Value: 8
  misc_feature: MA Experiment 20001450 PARAMETER Experiment Name: At_Far-red-induction_P Parameter: Tissue Value: Whole Plant
  misc_feature: MA Experiment ID: 20001451 Result: Down-regulated in Transcription
  misc_feature: MA Experiment 20001451 PARAMETER Experiment Name: At_Far-red-induction_P Parameter: Age (day) Value: 7
  misc_feature: MA Experiment 20001451 PARAMETER Experiment Name: At_Far-red-induction_P Parameter: Light Value: Far-red vs. White
  misc_feature: MA Experiment 20001451 PARAMETER Experiment Name: At_Far-red-induction_P Parameter: Organism Value: A. thaliana
  misc_feature: MA Experiment 20001451 PARAMETER Experiment Name: At_Far-red-induction_P Parameter: Plant Line Value: Columbia
  misc_feature: MA Experiment 20001451 PARAMETER Experiment Name: At_Far-red-induction_P Parameter: Timepoint (hr) Value: 24
  misc_feature: MA Experiment 20001451 PARAMETER Experiment Name: At_Far-red-induction_P Parameter: Tissue Value: Whole Plant
  misc_feature: MA Experiment ID: 20001554 Result: Down-regulated in Transcription
  misc_feature: MA Experiment 20001554 PARAMETER Experiment Name: At_Drought_Soil_Dry_P Parameter: Age (day) Value: 21
  misc_feature: MA Experiment 20001554 PARAMETER Experiment Name: At_Drought_Soil_Dry_P Parameter: Organism Value: A. thaliana
  misc_feature: MA Experiment 20001554 PARAMETER Experiment Name: At_Drought_Soil_Dry_P Parameter: Plant Line Value: WS
  misc_feature: MA Experiment 20001554 PARAMETER Experiment Name: At_Drought_Soil_Dry_P Parameter: Post Timepoint (hr) Value: None
  misc_feature: MA Experiment 20001554 PARAMETER Experiment Name: At_Drought_Soil_Dry_P Parameter: Post-Treatment Value: None
  misc_feature: MA Experiment 20001554 PARAMETER Experiment Name: At_Drought_Soil_Dry_P Parameter: Timepoint (day) Value: 7
  misc_feature: MA Experiment 20001554 PARAMETER Experiment Name: At_Drought_Soil_Dry_P Parameter: Treatment Value: Drought vs. No Drought
  misc_feature: MA Experiment ID: 20001556 Result: Down-regulated in Transcription
  misc_feature: MA Experiment 20001556 PARAMETER Experiment Name: At_Drought_Soil_Dry_P Parameter: Age (day) Value: 26
  misc_feature: MA Experiment 20001556 PARAMETER Experiment Name: At_Drought_Soil_Dry_P Parameter: Organism Value: A. thaliana
  misc_feature: MA Experiment 20001556 PARAMETER Experiment Name: At_Drought_Soil_Dry_P Parameter: Plant Line Value: WS
  misc_feature: MA Experiment 20001556 PARAMETER Experiment Name: At_Drought_Soil_Dry_P Parameter: Post Timepoint (hr) Value: None
  misc_feature: MA Experiment 20001556 PARAMETER Experiment Name: At_Drought_Soil_Dry_P Parameter: Post-Treatment Value: None
  misc_feature: MA Experiment 20001556 PARAMETER Experiment Name: At_Drought_Soil_Dry_P Parameter: Timepoint (day) Value: 12
  misc_feature: MA Experiment 20001556 PARAMETER Experiment Name: At_Drought_Soil_Dry_P Parameter: Treatment Value: Drought vs. No Drought
  misc_feature: MA Experiment ID: 20001557 Result: Down-regulated in Transcription
  misc_feature: MA Experiment 20001557 PARAMETER Experiment Name: At_Drought_Soil_Dry_P Parameter: Age (day) Value: 27
  misc_feature: MA Experiment 20001557 PARAMETER Experiment Name: At_Drought_Soil_Dry_P Parameter: Organism Value: A. thaliana
  misc_feature: MA Experiment 20001557 PARAMETER Experiment Name: At_Drought_Soil_Dry_P Parameter: Plant Line Value: WS
  misc_feature: MA Experiment 20001557 PARAMETER Experiment Name: At_Drought_Soil_Dry_P Parameter: Post Timepoint (hr) Value: 3
  misc_feature: MA Experiment 20001557 PARAMETER Experiment Name: At_Drought_Soil_Dry_P Parameter: Post-Treatment Value: Re-Water vs. No Drought
  misc_feature: MA Experiment 20001557 PARAMETER Experiment Name: At_Drought_Soil_Dry_P Parameter: Timepoint (day) Value: 13
  misc_feature: MA Experiment 20001557 PARAMETER Experiment Name: At_Drought_Soil_Dry_P Parameter: Treatment Value: Drought vs. No Drought
agtatataaagtatagggttgattcggagaaagaggttaaagtattagattgaaacaacaaatctcaggggaagaagaagagagaatggattcggcggagaagggcttgcttgttgtgagcgacagagaagaagtaaacaagaaagatgggtttttgcgggaaacgaagaaacttagttacatcgccggtccgatgattgcagtgaactcgtctatgtatgttcttcaggtgatatctataatgatggttggtcatctcggtgagcttttcctctctagcaccgccattgctgtttctttctgcagcgtcaccggtttcagcgtcgtttttggattggctagtgcgttggaaactttatgtggtcaagctaatggagctaagcaatatgagaagcttggtgttcatacttacacaggaattgtctctttgtttcttgtgtgtattcctctctctcttctctggacatacattggtgatatactttctcttattggacaagatgctatggttgctcaagaagctgggaagtttgcaacttggctcatacccgcgctctttggttacgctactttgcagccgcttgttcggtttttccaagcacagtctctgattttgcctttggttatgagttcagtctcttctctctgtatccacattgtcctctgttggagcttggtctttaagtttggtcttggaagcctcggtgcagctattgcgatcggtgtttcttactggctaaacgtgactgttcttggattatacatgacgttttcttctagctgtagcaagagccgtgcaactatctccatgagtttgtttgaaggaatgggagagtttttccggtttggaatcccatctgcatctatgatttgccttgagtggtggtcattcgaatttttagtcctgctctctggtattttaccaaatccgaagctagaagcctctgttctctcagtctgtctttcaacacaatcctccttgtaccaaatcccagagagtctcggtgcagcagcaagtacaagagttgcaaacgagttaggagctggaaacccgaaacaagctcgaatggcggtttacacagcgatggttataacaggtgtagaatcaataatggtgggtgcaatagtctttggtgcaagaaatgtatttggttacctattcagttctgaaactgaagttgtagactatgtaaaatcaatggctccactgctttctttatcggtcatattcgatgcccttcacgcagctctctcgggtgtggctagaggatcagggaggcaagatattggggcatacgtaaacctagcagcatactatctctttggaataccaactgctatactattagcttttgggtttaaaatgagaggaagaggactctggattggaatcacagttgggtcatgtgtacaagctgttttgctcggtcttatcgtaatcctcactaattggaaaaaacaggcgagaaaggctagagaaagagtgatgggtgatgagtatgaagagaaagaaagtgaagaagaacatgaatacatcagctaa

SEQ ID NO: 91195 - protein, 485 aa, Arabidopsis thaliana
  peptide (1)..(485): Ceres Seq. ID no. 12726797
  misc_feature (1)..(485): Homolog of NCBI NO: 15223961 NR Description: hypothetical protein; protein id: At1g71140.1
  misc_feature (2)..(467): Homolog of NCBI NO: 15218070 NR Description: hypothetical protein; protein id: At1g15170.1 thaliana] >gi|22655074|gb|AAM98128.1| unknown protein
  misc_feature (2)..(459): Homolog of NCBI NO: 25511632 NR Description: F9L1.11 protein - Arabidopsis thaliana Strong similarity to gi|4734005 F3L12.7 hypothetical protein from
  misc_feature (1)..(478): Homolog of NCBI NO: 22329577 NR Description: hypothetical protein; protein id: At1g15150.1, by cDNA: gi_17979411 [Arabidopsis thaliana] unknown protein [Arabidopsis thaliana]
  misc_feature (1)..(478): Homolog of NCBI NO: 15218068 NR Description: hypothetical protein; protein id: At1g15160.1
  misc_feature (20)..(467): Homolog of NCBI NO: 18394206 NR Description: expressed protein; protein id: At1g15180.1, by cDNA: gi_15028308, supported by cDNA: gi_19310610 [Arabidopsis >gi|15028309|gb|AAK76631.1| unknown protein [Arabidopsis
  misc_feature (1)..(459): Homolog of NCBI NO: 25518548 NR Description: hypothetical protein F9L1.10 - Arabidopsis >gi|5103818|gb|AAD39648.1|AC007591_13 Strong similarity to F3L12.7 hypothetical protein from Arabidopsis thaliana BAC
  misc_feature (20)..(459): Homolog of NCBI NO: 25518684 NR Description: hypothetical protein F9L1.12 [imported] - thaliana >gi|5103816|gb|AAD39646.1|AC007591_11 Strong similarity gi|4734005 F3L12.7 hypothetical protein from Arabidopsis thaliana
  misc_feature (1)..(459): Homolog of NCBI NO: 25518472 NR Description: hypothetical protein F9L1.9 [imported] - thaliana >gi|5103815|gb|AAD39645.1|AC007591_10 Strong similarity gi|4734005 F3L12.7 hypothetical protein from Arabidopsis thaliana
  misc_feature (26)..(471): Homolog of NCBI NO: 15228073 NR Description: hypothetical protein; protein id: At2g04050.1
MDSAEKGLLVVSDREEVNKKDGFLRETKKLSYIAGPMIAVNSSMYVLQVISIMMVGHLGELFLSSTAIAVSFCSVTGFSVVFGLASALETLCGQANGAKQYEKLGVHTYTGIVSLFLVCIPLSLLWTYIGDILSLIGQDAMVAQEAGKFATWLIPALFGYATLQPLVRFFQAQSLILPLVMSSVSSLCIHIVLCWSLVFKFGLGSLGAAIAIGVSYWLNVTVLGLYMTFSSSCSKSRATISMSLFEGMGEFFRFGIPSASMICLEWWSFEFLVLLSGILPNPKLEASVLSVCLSTQSSLYQIPESLGAAASTRVANELGAGNPKQARMAVYTAMVITGVESIMVGAIVFGARNVFGYLFSSETEVVDYVKSMAPLLSLSVIFDALHAALSGVARGSGRQDIGAYVNLAAYYLFGIPTAILLAFGFKMRGRGLWIGITVGSCVQAVLLGLIVILTNWKKQARKARERVMGDEYEEKESEEEHEYIS

SEQ ID NO: 91196 - protein, 449 aa, Arabidopsis thaliana
  peptide (1)..(449): Ceres Seq. ID no. 12726798
  misc_feature (1)..(449): Homolog of NCBI NO: 15223961 NR Description: hypothetical protein; protein id: At1g71140.1
  misc_feature (1)..(431): Homolog of NCBI NO: 15218070 NR Description: hypothetical protein; protein id: At1g15170.1 thaliana] >gi|22655074|gb|AAM98128.1| unknown protein
  misc_feature (1)..(423): Homolog of NCBI NO: 25511632 NR Description: F9L1.11 protein - Arabidopsis thaliana Strong similarity to gi|4734005 F3L12.7 hypothetical protein from
  misc_feature (1)..(442): Homolog of NCBI NO: 22329577 NR Description: hypothetical protein; protein id: At1g15150.1, by cDNA: gi_17979411 [Arabidopsis thaliana] unknown protein [Arabidopsis thaliana]
  misc_feature (1)..(442): Homolog of NCBI NO: 15218068 NR Description: hypothetical protein; protein id: At1g15160.1
  misc_feature (1)..(431): Homolog of NCBI NO: 18394206 NR Description: expressed protein; protein id: At1g15180.1, by cDNA: gi_15028308, supported by cDNA: gi_19310610 [Arabidopsis >gi|15028309|gb|AAK76631.1| unknown protein [Arabidopsis
  misc_feature (1)..(423): Homolog of NCBI NO: 25518548 NR Description: hypothetical protein F9L1.10 - Arabidopsis >gi|5103818|gb|AAD39648.1|AC007591_13 Strong similarity to F3L12.7 hypothetical protein from Arabidopsis thaliana BAC
  misc_feature (1)..(423): Homolog of NCBI NO: 25518684 NR Description: hypothetical protein F9L1.12 [imported] - thaliana >gi|5103816|gb|AAD39646.1|AC007591_11 Strong similarity gi|4734005 F3L12.7 hypothetical protein from Arabidopsis thaliana
  misc_feature (1)..(423): Homolog of NCBI NO: 25518472 NR Description: hypothetical protein F9L1.9 [imported] - thaliana >gi|5103815|gb|AAD39645.1|AC007591_10 Strong similarity gi|4734005 F3L12.7 hypothetical protein from Arabidopsis thaliana
  misc_feature (1)..(435): Homolog of NCBI NO: 15228073 NR Description: hypothetical protein; protein id: At2g04050.1
MIAVNSSMYVLQVISIMMVGHLGELFLSSTAIAVSFCSVTGFSVVFGLASALETLCGQANGAKQYEKLGVHTYTGIVSLFLVCIPLSLLWTYIGDILSLIGQDAMVAQEAGKFATWLIPALFGYATLQPLVRFFQAQSLILPLVMSSVSSLCIHIVLCWSLVFKFGLGSLGAAIAIGVSYWLNVTVLGLYMTFSSSCSKSRATISMSLFEGMGEFFRFGIPSASMICLEWWSFEFLVLLSGILPNPKLEASVLSVCLSTQSSLYQIPESLGAAASTRVANELGAGNPKQARMAVYTAMVITGVESIMVGAIVFGARNVFGYLFSSETEVVDYVKSMAPLLSLSVIFDALHAALSGVARGSGRQDIGAYVNLAAYYLFGIPTAILLAFGFKMRGRGLWIGITVGSCVQAVLLGLIVILTNWKKQARKARERVMGDEYEEKESEEEHEYIS

SEQ ID NO: 91197 - protein, 442 aa, Arabidopsis thaliana
  peptide (1)..(442): Ceres Seq. ID no. 12726799
  misc_feature (1)..(442): Homolog of NCBI NO: 15223961 NR Description: hypothetical protein; protein id: At1g71140.1
  misc_feature (1)..(424): Homolog of NCBI NO: 15218070 NR Description: hypothetical protein; protein id: At1g15170.1 thaliana] >gi|22655074|gb|AAM98128.1| unknown protein
  misc_feature (1)..(416): Homolog of NCBI NO: 25511632 NR Description: F9L1.11 protein - Arabidopsis thaliana Strong similarity to gi|4734005 F3L12.7 hypothetical protein from
  misc_feature (1)..(435): Homolog of NCBI NO: 22329577 NR Description: hypothetical protein; protein id: At1g15150.1, by cDNA: gi_17979411 [Arabidopsis thaliana] unknown protein [Arabidopsis thaliana]
  misc_feature (1)..(435): Homolog of NCBI NO: 15218068 NR Description: hypothetical protein; protein id: At1g15160.1
  misc_feature (1)..(424): Homolog of NCBI NO: 18394206 NR Description: expressed protein; protein id: At1g15180.1, by cDNA: gi_15028308, supported by cDNA: gi_19310610 [Arabidopsis >gi|15028309|gb|AAK76631.1| unknown protein [Arabidopsis
  misc_feature (1)..(416): Homolog of NCBI NO: 25518548 NR Description: hypothetical protein F9L1.10 - Arabidopsis >gi|5103818|gb|AAD39648.1|AC007591_13 Strong similarity to F3L12.7 hypothetical protein from Arabidopsis thaliana BAC
  misc_feature (1)..(416): Homolog of NCBI NO: 25518684 NR Description: hypothetical protein F9L1.12 [imported] - thaliana >gi|5103816|gb|AAD39646.1|AC007591_11 Strong similarity gi|4734005 F3L12.7 hypothetical protein from Arabidopsis thaliana
  misc_feature (1)..(416): Homolog of NCBI NO: 25518472 NR Description: hypothetical protein F9L1.9 [imported] - thaliana >gi|5103815|gb|AAD39645.1|AC007591_10 Strong similarity gi|4734005 F3L12.7 hypothetical protein from Arabidopsis thaliana
  misc_feature (1)..(428): Homolog of NCBI NO: 15228073 NR Description: hypothetical protein; protein id: At2g04050.1
MYVLQVISIMMVGHLGELFLSSTAIAVSFCSVTGFSVVFGLASALETLCGQANGAKQYEKLGVHTYTGIVSLFLVCIPLSLLWTYIGDILSLIGQDAMVAQEAGKFATWLIPALFGYATLQPLVRFFQAQSLILPLVMSSVSSLCIHIVLCWSLVFKFGLGSLGAAIAIGVSYWLNVTVLGLYMTFSSSCSKSRATISMSLFEGMGEFFRFGIPSASMICLEWWSFEFLVLLSGILPNPKLEASVLSVCLSTQSSLYQIPESLGAAASTRVANELGAGNPKQARMAVYTAMVITGVESIMVGAIVFGARNVFGYLFSSETEVVDYVKSMAPLLSLSVIFDALHAALSGVARGSGRQDIGAYVNLAAYYLFGIPTAILLAFGFKMRGRGLWIGITVGSCVQAVLLGLIVILTNWKKQARKARERVMGDEYEEKESEEEHEYIS

SEQ ID NO: 91198 - DNA, 1056 bp, Arabidopsis thaliana
  misc_feature (1)..(1056): Ceres Seq. ID no. 12726800
  misc_feature: MA Experiment ID: 20000306 Result: Down-regulated in Transcription
  misc_feature: MA Experiment 20000306 PARAMETER Experiment Name: At_Germinating_Seeds_Sub_P Parameter: Age (hr) Value: 6 vs. 0
  misc_feature: MA Experiment 20000306 PARAMETER Experiment Name: At_Germinating_Seeds_Sub_P Parameter: Organism Value: A. thaliana
  misc_feature: MA Experiment 20000306 PARAMETER Experiment Name: At_Germinating_Seeds_Sub_P Parameter: Plant Line Value: WS
  misc_feature: MA Experiment 20000306 PARAMETER Experiment Name: At_Germinating_Seeds_Sub_P Parameter: Tissue Value: Germinating Seeds
  misc_feature: MA Experiment ID: 20000307 Result: Down-regulated in Transcription
  misc_feature: MA Experiment 20000307 PARAMETER Experiment Name: At_Germinating_Seeds_Sub_P Parameter: Age (hr) Value: 24 vs. 0
  misc_feature: MA Experiment 20000307 PARAMETER Experiment Name: At_Germinating_Seeds_Sub_P Parameter: Organism Value: A. thaliana
  misc_feature: MA Experiment 20000307 PARAMETER Experiment Name: At_Germinating_Seeds_Sub_P Parameter: Plant Line Value: WS
  misc_feature: MA Experiment 20000307 PARAMETER Experiment Name: At_Germinating_Seeds_Sub_P Parameter: Tissue Value: Germinating Seeds
  misc_feature: MA Experiment ID: 20000347 Result: Up-regulated in Transcription
  misc_feature: MA Experiment 20000347 PARAMETER Experiment Name: At_2mM_SA_Sub_P Parameter: Age (day) Value: 14
  misc_feature: MA Experiment 20000347 PARAMETER Experiment Name: At_2mM_SA_Sub_P Parameter: Organism Value: A. thaliana
  misc_feature: MA Experiment 20000347 PARAMETER Experiment Name: At_2mM_SA_Sub_P Parameter: Plant Line Value: WS
  misc_feature: MA Experiment 20000347 PARAMETER Experiment Name: At_2mM_SA_Sub_P Parameter: Timepoint (hr) Value: 6
  misc_feature: MA Experiment 20000347 PARAMETER Experiment Name: At_2mM_SA_Sub_P Parameter: Tissue Value: Aerial
  misc_feature: MA Experiment 20000347 PARAMETER Experiment Name: At_2mM_SA_Sub_P Parameter: Treatment Value: 2mM SA vs. No Treatment
atggcgaaaccaaacatagacgaattgaatcaaatccttactagttatcaaaacaccatcaacgatactctccagttgttcgagcaagttccgtctccgacacaagacaaattatattggaacgatgtccttcagatttctgatcatctctccaaacaagctactatagtgggaatgctatggatcactggagaacctccaaaagctgaagcaatgaaggagactatggaagcatacttcaacgctcttcaaggatttttgctgcattgtcatggaagcatggttggtgctgggactacactctcttcgaccatacacgcttctgtgaagcaaattgttgattccagcttcagattgttgcagggttctgtttccttatacgagggatcatatgagaaaggaaggaagcccacgattccgcagcttgcaggagcagtgtgggaagcatgttctaatttaaagaacgtgcctgaaacaaacatcaaagcgattggaagagcgatggcacatgtagctgtttctatgaaggatgtgcttagggagatgaaagaactgaagcctgcttcttcttcacctgatcataatgtttcgacaaactcggatgacgatgatttaggcgatgaactgtctcctgaagaatttgaagttgctaaaatggtagcagatattgtgtctgagacgctcgttgttataaaagagcttatccgtgctatcacatgcatgatcaagctggagaatccaaaggataatagtgagtttgtggattcgtttgagaagttactgaagttgtgtcaaggaattggtgtacagattgatgagcttggagcttgtgtttacccgccgcaagagtttggtctcatgaaacaaacagtggagaacatgagggaaagtattggtgagattgagtctgatgttaagagttccaagaattcttcatcagaagctttatcaggatcatgcagaaggctgcagagtttgattgaacatatggtaaccgagttggacacaagaatcgaagctgaagtagtttacaaaatgcagaatgttactctttag

SEQ ID NO: 91199 - protein, 351 aa, Arabidopsis thaliana
  peptide (1)..(351): Ceres Seq. ID no. 12726801
  misc_feature (1)..(351): Homolog of NCBI NO: 15223962 NR Description: unknown protein; protein id: At1g71150.1
  misc_feature (1)..(351): Homolog of NCBI NO: 15219987 NR Description: unknown protein; protein id: At1g22970.1,
  misc_feature (1)..(348): Homolog of NCBI NO: 18395185 NR Description: unknown protein; protein id: At1g22980.1
  misc_feature (56)..(348): Homolog of NCBI NO: 25372690 NR Description: F19G10.7 protein - Arabidopsis thaliana
MAKPNIDELNQILTSYQNTINDTLQLFEQVPSPTQDKLYWNDVLQISDHLSKQATIVGMLWITGEPPKAEAMKETMEAYFNALQGFLLHCHGSMVGAGTTLSSTIHASVKQIVDSSFRLLQGSVSLYEGSYEKGRKPTIPQLAGAVWEACSNLKNVPETNIKAIGRAMAHVAVSMKDVLREMKELKPASSSPDHNVSTNSDDDDLGDELSPEEFEVAKMVADIVSETLVVIKELIRAITCMIKLENPKDNSEFVDSFEKLLKLCQGIGVQIDELGACVYPPQEFGLMKQTVENMRESIGEIESDVKSSKNSSSEALSGSCRRLQSLIEHMVTELDTRIEAEVVYKMQNVTL

SEQ ID NO: 91200 - protein, 293 aa, Arabidopsis thaliana; identical to SEQ ID NO: 88757
  peptide (1)..(293): Ceres Seq. ID no. 12726802
  misc_feature (1)..(293): Homolog of NCBI NO: 15223962 NR Description: unknown protein; protein id: At1g71150.1
  misc_feature (1)..(293): Homolog of NCBI NO: 15219987 NR Description: unknown protein; protein id: At1g22970.1,
  misc_feature (1)..(290): Homolog of NCBI NO: 18395185 NR Description: unknown protein; protein id: At1g22980.1
  misc_feature (1)..(290): Homolog of NCBI NO: 25372690 NR Description: F19G10.7 protein - Arabidopsis thaliana

SEQ ID NO: 91201 - protein, 280 aa, Arabidopsis thaliana
  peptide (1)..(280): Ceres Seq. ID no. 12726803
  misc_feature (1)..(280): Homolog of NCBI NO: 15223962 NR Description: unknown protein; protein id: At1g71150.1
  misc_feature (1)..(280): Homolog of NCBI NO: 15219987 NR Description: unknown protein; protein id: At1g22970.1,
  misc_feature (1)..(277): Homolog of NCBI NO: 18395185 NR Description: unknown protein; protein id: At1g22980.1
  misc_feature (1)..(277): Homolog of NCBI NO: 25372690 NR Description: F19G10.7 protein - Arabidopsis thaliana
MKETMEAYFNALQGFLLHCHGSMVGAGTTLSSTIHASVKQIVDSSFRLLQGSVSLYEGSYEKGRKPTIPQLAGAVWEACSNLKNVPETNIKAIGRAMAHVAVSMKDVLREMKELKPASSSPDHNVSTNSDDDDLGDELSPEEFEVAKMVADIVSETLVVIKELIRAITCMIKLENPKDNSEFVDSFEKLLKLCQGIGVQIDELGACVYPPQEFGLMKQTVENMRESIGEIESDVKSSKNSSSEALSGSCRRLQSLIEHMVTELDTRIEAEVVYKMQNVTL

SEQ ID NO: 91202 - DNA, 1383 bp, Arabidopsis thaliana
  misc_feature (1)..(1383): Ceres Seq. ID no. 12726804
  misc_feature: MA Experiment ID: 20000265 Result: Up-regulated in Transcription
  misc_feature: MA Experiment 20000265 PARAMETER Experiment Name: At_Open_Flower_P Parameter: Age (day) Value: 21
  misc_feature: MA Experiment 20000265 PARAMETER Experiment Name: At_Open_Flower_P Parameter: Plant Line Value: WS
  misc_feature: MA Experiment 20000265 PARAMETER Experiment Name: At_Open_Flower_P Parameter: Tissue Value: Closed Flower vs. Whole Plant
  misc_feature: MA Experiment ID: 20000286 Result: Up-regulated in Transcription
  misc_feature: MA Experiment 20000286 PARAMETER Experiment Name: At_Open_Flower_P Parameter: Age (day) Value: 21
  misc_feature: MA Experiment 20000286 PARAMETER Experiment Name: At_Open_Flower_P Parameter: Plant Line Value: WS
  misc_feature: MA Experiment 20000286 PARAMETER Experiment Name: At_Open_Flower_P Parameter: Tissue Value: Half Open vs. Whole Plant
  misc_feature: MA Experiment ID: 20001910 Result: Down-regulated in Transcription
  misc_feature: MA Experiment 20001910 PARAMETER Experiment Name: At_Drought_Reproduction_P Parameter: Age (day) Value: 37
  misc_feature: MA Experiment 20001910 PARAMETER Experiment Name: At_Drought_Reproduction_P Parameter: Organism Value: A. thaliana
  misc_feature: MA Experiment 20001910 PARAMETER Experiment Name: At_Drought_Reproduction_P Parameter: Plant Line Value: WS
  misc_feature: MA Experiment 20001910 PARAMETER Experiment Name: At_Drought_Reproduction_P Parameter: Timepoint (day) Value: 7
  misc_feature: MA Experiment 20001910 PARAMETER Experiment Name: At_Drought_Reproduction_P Parameter: Tissue Value: Flowers
  misc_feature: MA Experiment 20001910 PARAMETER Experiment Name: At_Drought_Reproduction_P Parameter: Treatment Value: Drought vs. No Drought
atggaatcgagctttcatttcatcaatgaagctctccttatcactcagacctttatcacttttcaccaattcctggtagcatcagcctgtgttctcatagctgtctttggttactatttcttcaaaccaagatgtattatatacctcattgacttctcatgttatcaacctcctgacttcttgcgagctccggtctctaatttcattgagcatcttaccatttccggtgtttttgatcaagaaagtcttgatctccagcagaagattttagagcgatcagggattagtgatgacgcgagcgtgcctgcgacagtccatgagattccaccaaacgcttctatctctgcagctagagaagaaactcatgagatcctcttcgctattgtccaagatcttttctcaaagcatgagatagatccaaagagtattgacatccttgtgtctaactgcagcctattctgtccttctccatccataacttctatgatcattaacaagtttggcatgaggagtgacataaagagcttcagtttgagcggtatgggctgcagcgccgggattctttcggttaatctcgtaaaagatcttatgaagattcatggtgattctttggccctagtgttgagtatggaagctgttagtccaaatggttacagagggaagtgtaagtcgatgctcattgccaacactatcttcagaatgggtggggctgcgattcttctttccaataggaagcaagattcgcataaggcgaaatacaaactccagcatattatcagaactcatgttggttcagacactgaatcgtacgagagtgtaatgcagcaagttgatgaagaaggaaaagtgggagtagcattgtccaagcagcttgtgagggtagcatcaaaggccttaaagatcaacgtggtgcagttaggccctcgagtgctaccttattcagagcagctcaaatacataatctcattcatccaaagaaaatggggaatgcacaaggagatatacacaccaaacttcaagaaagcttttgagcatttctgtatacatgccggaggaagggcgataattgaaggcgtggagaagcatctgaagctggacaaggaagacgtagaagcttcaaggtcaactctatatcgttatgggaacacatcttcgtcttcgttgtggtatgagctgcaatacctggaagcaaaaggtagaatgaaaatgggagataaagtatggcagattgggtttggaagtggctttaaggctaacagtgctgtctggaaatgcatctccgagatcgattcaagaggcaggaatgcatggtctgatcgaatccatttgtatcctgtctgtggagatacttcaagtgcattgaagacagagcttctttcttga

SEQ ID NO: 91203 - protein, 460 aa, Arabidopsis thaliana
  peptide (1)..(460): Ceres Seq. ID no. 12726805
  misc_feature (283)..(427): Pfam Name: Chalcone and stilbene synthases, C-terminal domain Pfam Description: Chalcone and stilbene synthases, C-terminal
  misc_feature (1)..(460): Homolog of NCBI NO: 15223964 NR Description: putative ketoacyl-CoA synthase; protein id:
  misc_feature (25)..(446): Homolog of NCBI NO: 15222592 NR Description: fatty acid condensing enzyme CUT1, putative; id: At1g25450.1, supported by cDNA: 99793. [Arabidopsis thaliana]
  misc_feature (25)..(446): Homolog of NCBI NO: 21618184 NR Description: fatty acid condensing enzyme CUT1, putative
  misc_feature (25)..(446): Homolog of NCBI NO: 28393607 NR Description: putative fatty acid condensing enzyme CUT1
  misc_feature (23)..(446): Homolog of NCBI NO: 17979464 NR Description: At1g68530/T26J14_10 [Arabidopsis thaliana]
  misc_feature (23)..(446): Homolog of NCBI NO: 15221431 NR Description: very-long-chain fatty acid condensing enzyme protein id: At1g68530.1, supported by cDNA: 36276. [Arabidopsis
  misc_feature (23)..(446): Homolog of NCBI NO: 21593111 NR Description: very-long-chain fatty acid condensing enzyme CUT1
  misc_feature (14)..(446): Homolog of NCBI NO: 15223556 NR Description: very-long-chain fatty acid condensing enzyme putative; protein id: At1g19440.1, supported by cDNA: 158882.
  misc_feature (29)..(446): Homolog of NCBI NO: 15239786 NR Description: fatty acid elongase; beta-ketoacyl-CoA
  misc_feature (24)..(446): Homolog of NCBI NO: 15226724 NR Description: putative beta-ketoacyl-CoA synthase; protein id:
MESSFHFINEALLITQTFITFHQFLVASACVLIAVFGYYFFKPRCIIYLIDFSCYQPPDFLRAPVSNFIEHLTISGVFDQESLDLQQKILERSGISDDASVPATVHEIPPNASISAAREETHEILFAIVQDLFSKHEIDPKSIDILVSNCSLFCPSPSITSMIINKFGMRSDIKSFSLSGMGCSAGILSVNLVKDLMKIHGDSLALVLSMEAVSPNGYRGKCKSMLIANTIFRMGGAAILLSNRKQDSHKAKYKLQHIIRTHVGSDTESYESVMQQVDEEGKVGVALSKQLVRVASKALKINVVQLGPRVLPYSEQLKYIISFIQRKWGMHKEIYTPNFKKAFEHFCIHAGGRAIIEGVEKHLKLDKEDVEASRSTLYRYGNTSSSSLWYELQYLEAKGRMKMGDKVWQIGFGSGFKANSAVWKCISEIDSRGRNAWSDRIHLYPVCGDTSSALKTELLS

SEQ ID NO: 91204 - protein, 299 aa, Arabidopsis thaliana
  peptide (1)..(299): Ceres Seq. ID no. 12726806
  misc_feature (122)..(266): Pfam Name: Chalcone and stilbene synthases, C-terminal domain Pfam Description: Chalcone and stilbene synthases, C-terminal
  misc_feature (1)..(299): Homolog of NCBI NO: 15223964 NR Description: putative ketoacyl-CoA synthase; protein id:
  misc_feature (1)..(285): Homolog of NCBI NO: 15222592 NR Description: fatty acid condensing enzyme CUT1, putative; id: At1g25450.1, supported by cDNA: 99793. [Arabidopsis thaliana]
  misc_feature (1)..(285): Homolog of NCBI NO: 21618184 NR Description: fatty acid condensing enzyme CUT1, putative
  misc_feature (1)..(285): Homolog of NCBI NO: 28393607 NR Description: putative fatty acid condensing enzyme CUT1
  misc_feature (1)..(285): Homolog of NCBI NO: 17979464 NR Description: At1g68530/T26J14_10 [Arabidopsis thaliana]
  misc_feature (1)..(285): Homolog of NCBI NO: 15221431 NR Description: very-long-chain fatty acid condensing enzyme protein id: At1g68530.1, supported by cDNA: 36276. [Arabidopsis
  misc_feature (1)..(285): Homolog of NCBI NO: 21593111 NR Description: very-long-chain fatty acid condensing enzyme CUT1
  misc_feature (1)..(285): Homolog of NCBI NO: 15223556 NR Description: very-long-chain fatty acid condensing enzyme putative; protein id: At1g19440.1, supported by cDNA: 158882.
  misc_feature (1)..(285): Homolog of NCBI NO: 15239786 NR Description: fatty acid elongase; beta-ketoacyl-CoA
  misc_feature (1)..(285): Homolog of NCBI NO: 15226724 NR Description: putative beta-ketoacyl-CoA synthase; protein id:
MIINKFGMRSDIKSFSLSGMGCSAGILSVNLVKDLMKIHGDSLALVLSMEAVSPNGYRGKCKSMLIANTIFRMGGAAILLSNRKQDSHKAKYKLQHIIRTHVGSDTESYESVMQQVDEEGKVGVALSKQLVRVASKALKINVVQLGPRVLPYSEQLKYIISFIQRKWGMHKEIYTPNFKKAFEHFCIHAGGRAIIEGVEKHLKLDKEDVEASRSTLYRYGNTSSSSLWYELQYLEAKGRMKMGDKVWQIGFGSGFKANSAVWKCISEIDSRGRNAWSDRIHLYPVCGDTSSALKTELLS

SEQ ID NO: 91205 - protein, 292 aa, Arabidopsis thaliana
  peptide (1)..(292): Ceres Seq. ID no. 12726807
  misc_feature (115)..(259): Pfam Name: Chalcone and stilbene synthases, C-terminal domain Pfam Description: Chalcone and stilbene synthases, C-terminal
  misc_feature (1)..(292): Homolog of NCBI NO: 15223964 NR Description: putative ketoacyl-CoA synthase; protein id:
  misc_feature (1)..(278): Homolog of NCBI NO: 15222592 NR Description: fatty acid condensing enzyme CUT1, putative; id: At1g25450.1, supported by cDNA: 99793. [Arabidopsis thaliana]
  misc_feature (1)..(278): Homolog of NCBI NO: 21618184 NR Description: fatty acid condensing enzyme CUT1, putative
  misc_feature (1)..(278): Homolog of NCBI NO: 28393607 NR Description: putative fatty acid condensing enzyme CUT1
  misc_feature (1)..(278): Homolog of NCBI NO: 17979464 NR Description: At1g68530/T26J14_10 [Arabidopsis thaliana]
  misc_feature (1)..(278): Homolog of NCBI NO: 15221431 NR Description: very-long-chain fatty acid condensing enzyme protein id: At1g68530.1, supported by cDNA: 36276. [Arabidopsis
  misc_feature (1)..(278): Homolog of NCBI NO: 21593111 NR Description: very-long-chain fatty acid condensing enzyme CUT1
  misc_feature (1)..(278): Homolog of NCBI NO: 15223556 NR Description: very-long-chain fatty acid condensing enzyme putative; protein id: At1g19440.1, supported by cDNA: 158882.
  misc_feature (1)..(278): Homolog of NCBI NO: 15239786 NR Description: fatty acid elongase; beta-ketoacyl-CoA
  misc_feature (1)..(278): Homolog of NCBI NO: 15226724 NR Description: putative beta-ketoacyl-CoA synthase; protein id:
MRSDIKSFSLSGMGCSAGILSVNLVKDLMKIHGDSLALVLSMEAVSPNGYRGKCKSMLIANTIFRMGGAAILLSNRKQDSHKAKYKLQHIIRTHVGSDTESYESVMQQVDEEGKVGVALSKQLVRVASKALKINVVQLGPRVLPYSEQLKYIISFIQRKWGMHKEIYTPNFKKAFEHFCIHAGGRAIIEGVEKHLKLDKEDVEASRSTLYRYGNTSSSSLWYELQYLEAKGRMKMGDKVWQIGFGSGFKANSAVWKCISEIDSRGRNAWSDRIHLYPVCGDTSSALKTELLS

SEQ ID NO: 91206 - DNA, 1016 bp, Arabidopsis thaliana
  misc_feature (1)..(1016): Ceres Seq. ID no. 12726812
  misc_feature: MA Experiment ID: 20000173 Result: Down-regulated in Transcription
  misc_feature: MA Experiment 20000173 PARAMETER Experiment Name: At_42deg_Heat_P Parameter: Age (day) Value: 14
  misc_feature: MA Experiment 20000173 PARAMETER Experiment Name: At_42deg_Heat_P Parameter: Organism Value: A. thaliana
  misc_feature: MA Experiment 20000173 PARAMETER Experiment Name: At_42deg_Heat_P Parameter: Plant Line Value: WS
  misc_feature: MA Experiment 20000173 PARAMETER Experiment Name: At_42deg_Heat_P Parameter: Temperature (deg C) Value: 42 vs. 22
  misc_feature: MA Experiment 20000173 PARAMETER Experiment Name: At_42deg_Heat_P Parameter: Timepoint (hr) Value: 6
  misc_feature: MA Experiment 20000173 PARAMETER Experiment Name: At_42deg_Heat_P Parameter: Tissue Value: Aerial
  misc_feature: MA Experiment ID: 20000227 Result: Down-regulated in Transcription
  misc_feature: MA Experiment 20000227 PARAMETER Experiment Name: At_Root-Tips-vs-Tops_P Parameter: Tissue Value: Root Tips vs. Root Tops
  misc_feature: MA Experiment ID: 20001560 Result: Down-regulated in Transcription
  misc_feature: MA Experiment 20001560 PARAMETER Experiment Name: At_Drought_Soil_Dry_P Parameter: Age (day) Value: 28
  misc_feature: MA Experiment 20001560 PARAMETER Experiment Name: At_Drought_Soil_Dry_P Parameter: Organism Value: A. thaliana
  misc_feature: MA Experiment 20001560 PARAMETER Experiment Name: At_Drought_Soil_Dry_P Parameter: Plant Line Value: WS
  misc_feature: MA Experiment 20001560 PARAMETER Experiment Name: At_Drought_Soil_Dry_P Parameter: Post Timepoint (hr) Value: None
  misc_feature: MA Experiment 20001560 PARAMETER Experiment Name: At_Drought_Soil_Dry_P Parameter: Post-Treatment Value: None
  misc_feature: MA Experiment 20001560 PARAMETER Experiment Name: At_Drought_Soil_Dry_P Parameter: Timepoint (day) Value: 14
  misc_feature: MA Experiment 20001560 PARAMETER Experiment Name: At_Drought_Soil_Dry_P Parameter: Treatment Value: Drought vs. No Drought
atgaagaagcgaacgatgtccgcgtggggatcggcgattttaatcttcataatacttatgatcgtcactcccacaatccctcaatctcaggcttaccacaatttcgccgatcaacgctccttcctcgggattccaaattttttaaacgtcatctccaacttccctttcctcatcatcggccttattggtcttatcctctgcttttacccagaagattactttagctttagtttgcgaggtgagaaaataggatggacttgcttttacatcggtgtagctgctgttgcttttggatcttcttactatcatcttcacccaaacgatgctactctcctctgggatcgtcttcccatgactattgctttcacatcaatcatggctatatttgtaatcgagaggattgatgagcataagggtacttactccattgctcctttacttcttgctggtcttgttagcattttgtattggaggtttttcgatgaccttaggccatatgctttggttcagtttgttccttgcattgtgattccgttgatggctattttattgcctccaatgtatacacattccacttattggctatgggctgcagggttctatctcttagccaaggtggaagaagctgcggataagcctatatatagctggactcatcatattattagtgggcattctctgaagcatctgtgtgccgctatggtccctgtcttccttaccctcatgcttgcgaaaagaaccgttcaaactgagaggattagcttgtataagacatggaagaaaggatccgaggaagaacggttcgagcatagctactccaacgttgcagtcgaagagactcggtagattattttgttgactcgtaaaatgtaagatgatctttttcttttgatagtttgtgtgtttacggttactggctaatagaattagatatagaaggtacagatttatgatccagttggaaactaatgttagcgatctgtaatcttatcaaaatgctgcactctaccattcat

SEQ ID NO: 91207 - protein, 281 aa, Arabidopsis thaliana
  peptide (1)..(281): Ceres Seq. ID no. 12726813
  misc_feature (1)..(281): Homolog of NCBI NO: 15223970 NR Description: unknown protein; protein id: At1g71190.1
  misc_feature (2)..(280): Homolog of NCBI NO: 34905818 NR Description: P0483G10.13 [Oryza sativa (japonica
  misc_feature (2)..(252): Homolog of NCBI NO: 15239801 NR Description: putative protein; protein id: At5g11870.1
  misc_feature (13)..(246): Homolog of NCBI NO: 29653854 NR Description: membrane protein, putative [Coxiella burnetii RSA >gi|29541117|gb|AAO90060.1| membrane protein, putative [Coxiella
  misc_feature (10)..(251): Homolog of NCBI NO: 23029224 NR Description: hypothetical protein [Microbulbifer degradans
  misc_feature (12)..(241): Homolog of NCBI NO: 27376099 NR Description: blr0988 [Bradyrhizobium japonicum]
  misc_feature (145)..(249): Homolog of NCBI NO: 34903592 NR Description: P0419B01.9 [Oryza sativa (japonica
  misc_feature (2)..(103): Homolog of NCBI NO: 34903592 NR Description: P0419B01.9 [Oryza sativa (japonica
MKKRTMSAWGSAILIFIILMIVTPTIPQSQAYHNFADQRSFLGIPNFLNVISNFPFLIIGLIGLILCFYPEDYFSFSLRGEKIGWTCFYIGVAAVAFGSSYYHLHPNDATLLWDRLPMTIAFTSIMAIFVIERIDEHKGTYSIAPLLLAGLVSILYWRFFDDLRPYALVQFVPCIVIPLMAILLPPMYTHSTYWLWAAGFYLLAKVEEAADKPIYSWTHHIISGHSLKHLCAAMVPVFLTLMLAKRTVQTERISLYKTWKKGSEEERFEHSYSNVAVEETR

SEQ ID NO: 91208 - protein, 276 aa, Arabidopsis thaliana
  peptide (1)..(276): Ceres Seq. ID no. 12726814
  misc_feature (1)..(276): Homolog of NCBI NO: 15223970 NR Description: unknown protein; protein id: At1g71190.1
  misc_feature (1)..(275): Homolog of NCBI NO: 34905818 NR Description: P0483G10.13 [Oryza sativa (japonica
  misc_feature (1)..(247): Homolog of NCBI NO: 15239801 NR Description: putative protein; protein id: At5g11870.1
  misc_feature (8)..(241): Homolog of NCBI NO: 29653854 NR Description: membrane protein, putative [Coxiella burnetii RSA >gi|29541117|gb|AAO90060.1| membrane protein, putative [Coxiella
  misc_feature (5)..(246): Homolog of NCBI NO: 23029224 NR Description: hypothetical protein [Microbulbifer degradans
  misc_feature (7)..(236): Homolog of NCBI NO: 27376099 NR Description: blr0988 [Bradyrhizobium japonicum]
  misc_feature (140)..(244): Homolog of NCBI NO: 34903592 NR Description: P0419B01.9 [Oryza sativa (japonica
  misc_feature (1)..(98): Homolog of NCBI NO: 34903592 NR Description: P0419B01.9 [Oryza sativa (japonica
MSAWGSAILIFIILMIVTPTIPQSQAYHNFADQRSFLGIPNFLNVISNFPFLIIGLIGLILCFYPEDYFSFSLRGEKIGWTCFYIGVAAVAFGSSYYHLHPNDATLLWDRLPMTIAFTSIMAIFVIERIDEHKGTYSIAPLLLAGLVSILYWRFFDDLRPYALVQFVPCIVIPLMAILLPPMYTHSTYWLWAAGFYLLAKVEEAADKPIYSWTHHIISGHSLKHLCAAMVPVFLTLMLAKRTVQTERISLYKTWKKGSEEERFEHSYSNVAVEETR

SEQ ID NO: 91209 - protein, 262 aa, Arabidopsis thaliana
  peptide (1)..(262): Ceres Seq. ID no. 12726815
  misc_feature (1)..(262): Homolog of NCBI NO: 15223970 NR Description: unknown protein; protein id: At1g71190.1
  misc_feature (1)..(261): Homolog of NCBI NO: 34905818 NR Description: P0483G10.13 [Oryza sativa (japonica
  misc_feature (1)..(233): Homolog of NCBI NO: 15239801 NR Description: putative protein; protein id: At5g11870.1
  misc_feature (1)..(227): Homolog of NCBI NO: 29653854 NR Description: membrane protein, putative [Coxiella burnetii RSA >gi|29541117|gb|AAO90060.1| membrane protein, putative [Coxiella
  misc_feature (1)..(232): Homolog of NCBI NO: 23029224 NR Description: hypothetical protein [Microbulbifer degradans
  misc_feature (1)..(222): Homolog of NCBI NO: 27376099 NR Description: blr0988 [Bradyrhizobium japonicum]
  misc_feature (126)..(230): Homolog of NCBI NO: 34903592 NR Description: P0419B01.9 [Oryza sativa (japonica
  misc_feature (1)..(84): Homolog of NCBI NO: 34903592 NR Description: P0419B01.9 [Oryza sativa (japonica
MIVTPTIPQSQAYHNFADQRSFLGIPNFLNVISNFPFLIIGLIGLILCFYPEDYFSFSLRGEKIGWTCFYIGVAAVAFGSSYYHLHPNDATLLWDRLPMTIAFTSIMAIFVIERIDEHKGTYSIAPLLLAGLVSILYWRFFDDLRPYALVQFVPCIVIPLMAILLPPMYTHSTYWLWAAGFYLLAKVEEAADKPIYSWTHHIISGHSLKHLCAAMVPVFLTLMLAKRTVQTERISLYKTWKKGSEEERFEHSYSNVAVEETR

SEQ ID NO: 91210 - DNA, 957 bp, Arabidopsis thaliana
  misc_feature (1)..(957): Ceres Seq. ID no. 12726819
  misc_feature: MA Experiment ID: 108579 Result: Down-regulated in Transcription
  misc_feature: MA Experiment 108579 PARAMETER Experiment Name: At_4deg_Cold_cDNA_P Parameter: Temperature (deg C) Value: 4 vs. 22
  misc_feature: MA Experiment 108579 PARAMETER Experiment Name: At_4deg_Cold_cDNA_P Parameter: Timepoint (hr) Value: 6
  misc_feature: MA Experiment 108579 PARAMETER Experiment Name: At_4deg_Cold_cDNA_P Parameter: Tissue Value: Aerial
atgttctaccaatcgtcgtcgtctctcacgcaaattcttcattcgttctgtggaaacacagaaatggagactccatatccgaaactcatcgatccttcaaagactcgaataggatggattggcatcgggataatgggatcggccatggtttctcatattatcgccgcaggctattctgtcacagtttacgctcgcgacctccggaaaacaaaagatctgcaaaccaaaggagctcgcatagccaatagccccaaagagttagcggagatgagcgacgttgtgttcacgattgttggaaacttcaacgatgtccgatcattgcttctcggtgacgatggtgtactctctggtcttacgcccggtggagtaacagtggacatgactagtagcaaaccaggattggcgcgtgaaatacacgcagaagcgaggcgtaggaattgttgggcggtggatgcgccggtatcaggtggagacgctggagcacgagaggggacgttagggattttcgccggcggagattcagagattgtggagtggttgtccccggtgatgaagaatatagggactgttacttatatgggagaagcagggagtgggcaaagctgcaagatagggaatcagattgctggtgcgagcaacctggttggacttgctgaagggatagtgttcgctgagaaagcgggtttagatacagtgaaatggctcgaggcggtgaaggatggtgcagctggatcggcggttatgcggctgtttggggagatgattgtgaagagggattatagggcgactggctttgcggagtatatggtgaaagatttgggaatggctgcagaggcggcgatgcctggtgctgctctgagcaagcagttgttcactggaatggtggctaatggagatggcaagttaggtattcaaggcgtcgtctctgttattagaagacttaacggcatatcctga

SEQ ID NO: 91211 - protein, 318 aa, Arabidopsis thaliana; identical to SEQ ID NO: 77113
  peptide (1)..(318): Ceres Seq. ID no. 12726820
  misc_feature (34)..(195): Pfam Name: NAD binding domain of 6-phosphogluconate dehydrogenase Pfam Description: NAD binding domain of 6-phosphogluconate
  misc_feature (1)..(318): Homolog of NCBI NO: 18409781 NR Description: putative dehydrogenase; protein id: At1g71180.1, by cDNA: gi_15293142, supported by cDNA: gi_21281067 [Arabidopsis >gi|15293143|gb|AAK93682.1| putative dehydrogenase dehydrogenase
  misc_feature (22)..(318): Homolog of NCBI NO: 25283629 NR Description: probable dehydrogenase F23N20.17 [imported] -
  misc_feature (22)..(318): Homolog of NCBI NO: 30698779 NR Description: dehydrogenase -related [Arabidopsis thaliana]
  misc_feature (29)..(318): Homolog of NCBI NO: 15233455 NR Description: putative protein; protein id: At4g29120.1, by cDNA: gi_13877868, supported by cDNA: gi_17065607 [Arabidopsis
  misc_feature (30)..(315): Homolog of NCBI NO: 34909392 NR Description: putative dehydrogenase [Oryza sativa (japonica group)] >gi|20521418|dbj|BAB91928.1| putative dehydrogenase
  misc_feature (35)..(307): Homolog of NCBI NO: 15896585 NR Description: Dehydrogenase related to 3-hydroxyisobutyrate YKWC B.subtilis ortholog [Clostridium acetobutylicum]
  misc_feature (37)..(305): Homolog of NCBI NO: 30022129 NR Description: 3-hydroxyisobutyrate dehydrogenase [Bacillus
  misc_feature (36)..(312): Homolog of NCBI NO: 16803045 NR Description: similar to 3-hydroxyisobutyrate dehydrogenase (B.
  misc_feature (34)..(307): Homolog of NCBI NO: 16078460 NR Description: similar to 3-hydroxyisobutyrate dehydrogenase subtilis] >gi|3183454|sp|O34948|YKWC_BACSU Hypothetical
  misc_feature (36)..(314): Homolog of NCBI NO: 15898379 NR Description: Oxidoreductase [Sulfolobus solfataricus]

SEQ ID NO: 91212 - protein, 297 aa, Arabidopsis thaliana; identical to SEQ ID NO: 77114
  peptide (1)..(297): Ceres Seq. ID no. 12726821
  misc_feature (13)..(174): Pfam Name: NAD binding domain of 6-phosphogluconate dehydrogenase Pfam Description: NAD binding domain of 6-phosphogluconate
  misc_feature (1)..(297): Homolog of NCBI NO: 18409781 NR Description: putative dehydrogenase; protein id: At1g71180.1, by cDNA: gi_15293142, supported by cDNA: gi_21281067 [Arabidopsis >gi|15293143|gb|AAK93682.1| putative dehydrogenase dehydrogenase
  misc_feature (1)..(297): Homolog of NCBI NO: 25283629 NR Description: probable dehydrogenase F23N20.17 [imported] -
  misc_feature (1)..(297): Homolog of NCBI NO: 30698779 NR Description: dehydrogenase -related [Arabidopsis thaliana]
  misc_feature (8)..(297): Homolog of NCBI NO: 15233455 NR Description: putative protein; protein id: At4g29120.1, by cDNA: gi_13877868, supported by cDNA: gi_17065607 [Arabidopsis
  misc_feature (9)..(294): Homolog of NCBI NO: 34909392 NR Description: putative dehydrogenase [Oryza sativa (japonica group)] >gi|20521418|dbj|BAB91928.1| putative dehydrogenase
  misc_feature (14)..(286): Homolog of NCBI NO: 15896585 NR Description: Dehydrogenase related to 3-hydroxyisobutyrate YKWC B.subtilis ortholog [Clostridium acetobutylicum]
  misc_feature (16)..(284): Homolog of NCBI NO: 30022129 NR Description: 3-hydroxyisobutyrate dehydrogenase [Bacillus
  misc_feature (15)..(291): Homolog of NCBI NO: 16803045 NR Description: similar to 3-hydroxyisobutyrate dehydrogenase (B.
  misc_feature (13)..(286): Homolog of NCBI NO: 16078460 NR Description: similar to 3-hydroxyisobutyrate dehydrogenase subtilis] >gi|3183454|sp|O34948|YKWC_BACSU Hypothetical
  misc_feature (15)..(293): Homolog of NCBI NO: 15898379 NR Description: Oxidoreductase [Sulfolobus solfataricus]

SEQ ID NO: 91213 - protein, 274 aa, Arabidopsis thaliana; identical to SEQ ID NO: 77115
  peptide (1)..(274): Ceres Seq. ID no. 12726822
  misc_feature (1)..(151): Pfam Name: NAD binding domain of 6-phosphogluconate dehydrogenase Pfam Description: NAD binding domain of 6-phosphogluconate
  misc_feature (1)..(274): Homolog of NCBI NO: 18409781 NR Description: putative dehydrogenase; protein id: At1g71180.1, by cDNA: gi_15293142, supported by cDNA: gi_21281067 [Arabidopsis >gi|15293143|gb|AAK93682.1| putative dehydrogenase dehydrogenase
  misc_feature (1)..(274): Homolog of NCBI NO: 25283629 NR Description: probable dehydrogenase F23N20.17 [imported] -
  misc_feature (1)..(274): Homolog of NCBI NO: 30698779 NR Description: dehydrogenase -related [Arabidopsis thaliana]
  misc_feature (1)..(274): Homolog of NCBI NO: 15233455 NR Description: putative protein; protein id: At4g29120.1, by cDNA: gi_13877868, supported by cDNA: gi_17065607 [Arabidopsis
  misc_feature (1)..(271): Homolog of NCBI NO: 34909392 NR Description: putative dehydrogenase [Oryza sativa (japonica group)] >gi|20521418|dbj|BAB91928.1| putative dehydrogenase
  misc_feature (1)..(263): Homolog of NCBI NO: 15896585 NR Description: Dehydrogenase related to 3-hydroxyisobutyrate YKWC B.subtilis ortholog [Clostridium acetobutylicum]
  misc_feature (1)..(261): Homolog of NCBI NO: 30022129 NR Description: 3-hydroxyisobutyrate dehydrogenase [Bacillus
  misc_feature (1)..(268): Homolog of NCBI NO: 16803045 NR Description: similar to 3-hydroxyisobutyrate dehydrogenase (B.
  misc_feature (1)..(263): Homolog of NCBI NO: 16078460 NR Description: similar to 3-hydroxyisobutyrate dehydrogenase subtilis] >gi|3183454|sp|O34948|YKWC_BACSU Hypothetical
  misc_feature (1)..(270): Homolog of NCBI NO: 15898379 NR Description: Oxidoreductase [Sulfolobus solfataricus]

SEQ ID NO: 91214 - DNA, 959 bp, Arabidopsis thaliana
  misc_feature (1)..(959): Ceres Seq. ID no. 12726846
  misc_feature: MA Experiment ID: 20000180 Result: Down-regulated in Transcription
  misc_feature: MA Experiment 20000180 PARAMETER Experiment Name: At_Germinating_Seeds_P Parameter: Age (hr) Value: 24 vs. 0
  misc_feature: MA Experiment 20000180 PARAMETER Experiment Name: At_Germinating_Seeds_P Parameter: Tissue Value: Germinating Seeds
  misc_feature: MA Experiment ID: 20001451 Result: Down-regulated in Transcription
  misc_feature: MA Experiment 20001451 PARAMETER Experiment Name: At_Far-red-induction_P Parameter: Age (day) Value: 7
  misc_feature: MA Experiment 20001451 PARAMETER Experiment Name: At_Far-red-induction_P Parameter: Light Value: Far-red vs. White
  misc_feature: MA Experiment 20001451 PARAMETER Experiment Name: At_Far-red-induction_P Parameter: Organism Value: A. thaliana
  misc_feature: MA Experiment 20001451 PARAMETER Experiment Name: At_Far-red-induction_P Parameter: Plant Line Value: Columbia
  misc_feature: MA Experiment 20001451 PARAMETER Experiment Name: At_Far-red-induction_P Parameter: Timepoint (hr) Value: 24
  misc_feature: MA Experiment 20001451 PARAMETER Experiment Name: At_Far-red-induction_P Parameter: Tissue Value: Whole Plant
atcaaaaagatcaatcaaaatcaacaatcatcttcttctgatttctcacctctttcttctacttctcatcataattctgttagttctttgataagcccatttcgtgcctatcagacgacaactaaaccctacacgcttacataaaaacgcgacctttgagaattttgtccggcgacagaaatggcggggttagggttacggctaaaggcggcaaaatggacgttgaggagcggatcaggtgctgtatcgagagaatggtcgtcggagatggggaaaggtgttcgtcgattctctactgaaacagagaacgatgttccaacttcaggaatcagtagaccactcgctgagattctcaaggagcttaacaaaaaggttccagattcagtcatccgaactcgagttgaagatgggtgctccatcaaatacatcccttggcacattgtgaatcggatcatgaatatgcatgctccagaatggtcaggagaagttcgaagtgtcacttactctcctgatggcaacactgttactgtggcttatcgtgtgactctctacggcactgatgctgagatatttagggaatcaacaggtaccacatctgtagatgacaaaggctatggtgatgctgtgcaaaaggcggaagcaatggcatttcgccgtgcgtgtgcaagatttggattagggcttcatctttatcacgaggatgctttgtaaagggtaatctttctttaaccatgggaaagtatattattttggtgttcccactgcctagtagtagtagtctttgaaggtaaaactcagggaagcttaagtttttggtatcttagatatgtatcagctgatattgatcgctttatgatttgaaatcggttaatgaaatgaccttcagaggactctttgttgcatttctgtaacttaacttgaggttgcaactttaaccagtaaaagttatctgtttgtgg

SEQ ID NO: 91215 - protein, 176 aa, Arabidopsis thaliana
  peptide (1)..(176): Ceres Seq. ID no. 12726847
  misc_feature (1)..(176): Homolog of NCBI NO: 15224018 NR Description: hypothetical protein; protein id: At1g71310.1
  misc_feature (40)..(174): Homolog of NCBI NO: 34907336 NR Description: putative SnRK1-interacting protein 1 [Oryza
  misc_feature (45)..(174): Homolog of NCBI NO: 9367245 NR Description: SnRK1-interacting protein 1 [Hordeum vulgare
  misc_feature (47)..(173): Homolog of NCBI NO: 15238827 NR Description: putative protein; protein id: At5g47870.1, by cDNA: 38345. [Arabidopsis thaliana] gb|AAF26028.1~gene_id:MCA23.21~similar to unknown protein
  misc_feature (47)..(173): Homolog of NCBI NO: 21593360 NR Description: unknown [Arabidopsis thaliana]
  misc_feature (44)..(130): Homolog of NCBI NO: 27573357 NR Description: hypothetical protein [Oryza sativa (japonica
  misc_feature (54)..(174): Homolog of NCBI NO: 38505854 NR Description: slr6029 [Synechocystis sp. PCC 6803] slr6088 [Synechocystis sp. PCC 6803] >gi|38423878|dbj|BAD02086.1| [Synechocystis sp. PCC 6803] >gi|38423937|dbj|BAD02145.1| slr6088
  misc_feature (112)..(174): Homolog of NCBI NO: 38505607 NR Description: sll5072 [Synechocystis sp. PCC 6803]
MAGLGLRLKAAKWTLRSGSGAVSREWSSEMGKGVRRFSTETENDVPTSGISRPLAEILKELNKKVPDSVIRTRVEDGCSIKYIPWHIVNRIMNMHAPEWSGEVRSVTYSPDGNTVTVAYRVTLYGTDAEIFRESTGTTSVDDKGYGDAVQKAEAMAFRRACARFGLGLHLYHEDAL

SEQ ID NO: 91216 - protein, 147 aa, Arabidopsis thaliana
  peptide (1)..(147): Ceres Seq. ID no. 12726848
  misc_feature (1)..(147): Homolog of NCBI NO: 15224018 NR Description: hypothetical protein; protein id: At1g71310.1
  misc_feature (11)..(145): Homolog of NCBI NO: 34907336 NR Description: putative SnRK1-interacting protein 1 [Oryza
  misc_feature (16)..(145): Homolog of NCBI NO: 9367245 NR Description: SnRK1-interacting protein 1 [Hordeum vulgare
  misc_feature (18)..(144): Homolog of NCBI NO: 15238827 NR Description: putative protein; protein id: At5g47870.1, by cDNA: 38345. [Arabidopsis thaliana] gb|AAF26028.1~gene_id:MCA23.21~similar to unknown protein
  misc_feature (18)..(144): Homolog of NCBI NO: 21593360 NR Description: unknown [Arabidopsis thaliana]
  misc_feature (15)..(101): Homolog of NCBI NO: 27573357 NR Description: hypothetical protein [Oryza sativa (japonica
  misc_feature (25)..(145): Homolog of NCBI NO: 38505854 NR Description: slr6029 [Synechocystis sp. PCC 6803] slr6088 [Synechocystis sp. PCC 6803] >gi|38423878|dbj|BAD02086.1| [Synechocystis sp. PCC 6803] >gi|38423937|dbj|BAD02145.1| slr6088
  misc_feature (83)..(145): Homolog of NCBI NO: 38505607 NR Description: sll5072 [Synechocystis sp. PCC 6803]
MGKGVRRFSTETENDVPTSGISRPLAEILKELNKKVPDSVIRTRVEDGCSIKYIPWHIVNRIMNMHAPEWSGEVRSVTYSPDGNTVTVAYRVTLYGTDAEIFRESTGTTSVDDKGYGDAVQKAEAMAFRRACARFGLGLHLYHEDAL

SEQ ID NO: 91217 - DNA, 2070 bp, Arabidopsis thaliana
  misc_feature (1)..(2070): Ceres Seq. ID no. 12726871
  misc_feature: MA Experiment ID: 20000185 Result: Down-regulated in Transcription
  misc_feature: MA Experiment 20000185 PARAMETER Experiment Name: At_Roots__P Parameter: Age (day) Value: 7 vs. 21
  misc_feature: MA Experiment 20000185 PARAMETER Experiment Name: At_Roots__P Parameter: Organism Value: A. thaliana
  misc_feature: MA Experiment 20000185 PARAMETER Experiment Name: At_Roots__P Parameter: Tissue Value: Roots vs. Whole Plant
  misc_feature: MA Experiment ID: 20001451 Result: Down-regulated in Transcription
  misc_feature: MA Experiment 20001451 PARAMETER Experiment Name: At_Far-red-induction_P Parameter: Age (day) Value: 7
  misc_feature: MA Experiment 20001451 PARAMETER Experiment Name: At_Far-red-induction_P Parameter: Light Value: Far-red vs. White
  misc_feature: MA Experiment 20001451 PARAMETER Experiment Name: At_Far-red-induction_P Parameter: Organism Value: A. thaliana
  misc_feature: MA Experiment 20001451 PARAMETER Experiment Name: At_Far-red-induction_P Parameter: Plant Line Value: Columbia
  misc_feature: MA Experiment 20001451 PARAMETER Experiment Name: At_Far-red-induction_P Parameter: Timepoint (hr) Value: 24
  misc_feature: MA Experiment 20001451 PARAMETER Experiment Name: At_Far-red-induction_P Parameter: Tissue Value: Whole Plant
atggaagtagtgtcgtctctcggaatccgagacctcccggcgtccctctccgtgacgacgagtctcaaccaccgtcctcatcgttccgataaagatggcgctccggcgaaatctccgattagaccaagcagaactagacgaccttccacttctcccgccaaaaagccgaaaccttttagggaaagagatgctttcccttcttctcttcctctccactccaagaacccctacattatccacagagatattcaaatttttgcgaggcagaacaatctcgaagtcgctctcacgattcttgattatctcgaacagagagggattcctgtaaatgcgacaactttctctgctcttttagaggcgtgtgttcgccggaagtcgttgcttcacggtaaacaagtccatgttcatatacgtattaatgggttggagagtaatgagtttctaaggaccaagcttgttcatatgtatactgcttgtggttcggttaaagatgcacagaaggtgttcgatgaaagtactagctcaaatgtttactcttggaatgcgttgcttagagggactgttatatcagggaagaagcggtatcaagatgttctttctacgtttacagaaatgagagagcttggtgttgatttgaatgtttatagtttatctaatgtgtttaagagttttgctggtgcatctgctttgagacagggattgaagacgcatgcacttgcgattaagaatggtttgtttaatagtgtctttcttaagacttctcttgttgatatgtattttaagtgtggtaaagtagggcttgcacgtcgagtttttgatgagattgtagagagagatatagttgtttggggggcgatgattgctggattggctcacaataaaaggcagtgggaagcgttgggactgtttaggacgatgattagtgaagaaaagatatatccaaactcagttatacttacaacgattcttcccgtacttggggatgttaaggcactgaaactggggaaggaggtccatgcccatgtattgaaatcgaagaattacgtggaacagccgtttgttcactctggtttgattgatttatactgcaagtgtggggatatggcttctgggagacgtgtgttctatggatccaaacagaggaatgccatatcttggactgcattgatgtctggatacgcagccaacggtagatttgatcaagctttgaggtcgattgtttggatgcagcaggaaggttttaggccagatgttgttacaattgctactgttcttcctgtttgcgcagagctgagggctataaagcaaggaaaggagattcattgttatgctttaaagaatctcttcttgccgaatgtatccctggtcacttccttgatggtgatgtactcaaagtgcggtgttccagagtatcctatcagactgtttgacaggttggaacaaaggaatgtgaaagcatggaccgctatgattgactgctatgtggaaaattgtgatttaagagcagggattgaggtattcagattgatgctgttatcaaaacacaggccagattctgttacgatgggtagggttttgactgtttgcagtgatctcaaagcattaaagttggggaaagagcttcatgggcacattctgaaaaaggaatttgagtcgatcccatttgtttctgcaagaatcatcaagatgtatggaaaatgtggagatctcagaagtgctaatttctctttcgatgctgttgctgtcaagggctctctgacatggaccgccattatagaggcttatggatgcaatgaactcttcagggatgcaataaactgttttgagcaaatggtatcaagagggtttactcccaacaccttcacatttacagcagttttatctatttgcagtcaagccggatttgttgatgaagcttatcgcttcttcaacttgatgctccggatgtacaatttgcagccatcagaagagcattattcactggtcattgaacttctcaatcggtgtggtcgtgttgaagaggcacaaagacttgcggtcatgagttcctcgtcatccctacagacctga

SEQ ID NO: 91218 - protein, 689 aa, Arabidopsis thaliana
  peptide (1)..(689): Ceres Seq. ID no. 12726872
  misc_feature (586)..(620): Pfam Name: PPR repeat Pfam Description: PPR repeat
  misc_feature (86)..(677): Homolog of NCBI NO: 15234006 NR Description: putative protein; protein id: At4g18750.1
  misc_feature (113)..(680): Homolog of NCBI NO: 34897084 NR Description: hypothetical protein [Oryza sativa (japonica group)] >gi|12957718|gb|AAK09236.1| hypothetical protein [Oryza
  misc_feature (88)..(681): Homolog of NCBI NO: 30694644 NR Description: pentatricopeptide (PPR) repeat-containing protein
  misc_feature (88)..(681): Homolog of NCBI NO: 30794008 NR Description: unknown protein [Arabidopsis thaliana]
  misc_feature (106)..(675): Homolog of NCBI NO: 34903762 NR Description: unnamed protein product [Oryza sativa (japonica group)] >gi|7340873|dbj|BAA92963.1| unnamed protein product
  misc_feature (145)..(677): Homolog of NCBI NO: 15236277 NR Description: putative protein; protein id: At4g35130.1
  misc_feature (106)..(681): Homolog of NCBI NO: 11281371 NR Description: hypothetical protein T8H10.30 - Arabidopsis >gi|6706414|emb|CAB66100.1| putative protein [Arabidopsis
  misc_feature (13)..(675): Homolog of NCBI NO: 15233292 NR Description: hypothetical protein; protein id: At3g22150.1
  misc_feature (123)..(676): Homolog of NCBI NO: 15226150 NR Description: hypothetical protein; protein id: At2g33680.1
  misc_feature (101)..(675): Homolog of NCBI NO: 15220337 NR Description: hypothetical protein; protein id: At1g11290.1
MEVVSSLGIRDLPASLSVTTSLNHRPHRSDKDGAPAKSPIRPSRTRRPSTSPAKKPKPFRERDAFPSSLPLHSKNPYIIHRDIQIFARQNNLEVALTILDYLEQRGIPVNATTFSALLEACVRRKSLLHGKQVHVHIRINGLESNEFLRTKLVHMYTACGSVKDAQKVFDESTSSNVYSWNALLRGTVISGKKRYQDVLSTFTEMRELGVDLNVYSLSNVFKSFAGASALRQGLKTHALAIKNGLFNSVFLKTSLVDMYFKCGKVGLARRVFDEIVERDIVVWGAMIAGLAHNKRQWEALGLFRTMISEEKIYPNSVILTTILPVLGDVKALKLGKEVHAHVLKSKNYVEQPFVHSGLIDLYCKCGDMASGRRVFYGSKQRNAISWTALMSGYAANGRFDQALRSIVWMQQEGFRPDVVTIATVLPVCAELRAIKQGKEIHCYALKNLFLPNVSLVTSLMVMYSKCGVPEYPIRLFDRLEQRNVKAWTAMIDCYVENCDLRAGIEVFRLMLLSKHRPDSVTMGRVLTVCSDLKALKLGKELHGHILKKEFESIPFVSARIIKMYGKCGDLRSANFSFDAVAVKGSLTWTAIIEAYGCNELFRDAINCFEQMVSRGFTPNTFTFTAVLSICSQAGFVDEAYRFFNLMLRMYNLQPSEEHYSLVIELLNRCGRVEEAQRLAVMSSSSSLQT

SEQ ID NO: 91219 - protein, 535 aa, Arabidopsis thaliana
  peptide (1)..(535): Ceres Seq. ID no. 12726873
  misc_feature (432)..(466): Pfam Name: PPR repeat Pfam Description: PPR repeat
  misc_feature (1)..(523): Homolog of NCBI NO: 15234006 NR Description: putative protein; protein id: At4g18750.1
  misc_feature (1)..(526): Homolog of NCBI NO: 34897084 NR Description: hypothetical protein [Oryza sativa (japonica group)] >gi|12957718|gb|AAK09236.1| hypothetical protein [Oryza
  misc_feature (1)..(527): Homolog of NCBI NO: 30694644 NR Description: pentatricopeptide (PPR) repeat-containing protein
  misc_feature (1)..(527): Homolog of NCBI NO: 30794008 NR Description: unknown protein [Arabidopsis thaliana]
  misc_feature (1)..(521): Homolog of NCBI NO: 34903762 NR Description: unnamed protein product [Oryza sativa (japonica group)] >gi|7340873|dbj|BAA92963.1| unnamed protein product
  misc_feature (1)..(523): Homolog of NCBI NO: 15236277 NR Description: putative protein; protein id: At4g35130.1
  misc_feature (1)..(527): Homolog of NCBI NO: 11281371 NR Description: hypothetical protein T8H10.30 - Arabidopsis >gi|6706414|emb|CAB66100.1| putative protein [Arabidopsis
  misc_feature (1)..(521): Homolog of NCBI NO: 15233292 NR Description: hypothetical protein; protein id: At3g22150.1
  misc_feature (1)..(522): Homolog of NCBI NO: 15226150 NR Description: hypothetical protein; protein id: At2g33680.1
  misc_feature (1)..(521): Homolog of NCBI NO: 15220337 NR Description: hypothetical protein; protein id: At1g11290.1
MYTACGSVKDAQKVFDESTSSNVYSWNALLRGTVISGKKRYQDVLSTFTEMRELGVDLNVYSLSNVFKSFAGASALRQGLKTHALAIKNGLFNSVFLKTSLVDMYFKCGKVGLARRVFDEIVERDIVVWGAMIAGLAHNKRQWEALGLFRTMISEEKIYPNSVILTTILPVLGDVKALKLGKEVHAHVLKSKNYVEQPFVHSGLIDLYCKCGDMASGRRVFYGSKQRNAISWTALMSGYAANGRFDQALRSIVWMQQEGFRPDVVTIATVLPVCAELRAIKQGKEIHCYALKNLFLPNVSLVTSLMVMYSKCGVPEYPIRLFDRLEQRNVKAWTAMIDCYVENCDLRAGIEVFRLMLLSKHRPDSVTMGRVLTVCSDLKALKLGKELHGHILKKEFESIPFVSARIIKMYGKCGDLRSANFSFDAVAVKGSLTWTAIIEAYGCNELFRDAINCFEQMVSRGFTPNTFTFTAVLSICSQAGFVDEAYRFFNLMLRMYNLQPSEEHYSLVIELLNRCGRVEEAQRLAVMSSSSSLQT

SEQ ID NO: 91220 - protein, 485 aa, Arabidopsis thaliana
  peptide (1)..(485): Ceres Seq. ID no. 12726874
  misc_feature (382)..(416): Pfam Name: PPR repeat Pfam Description: PPR repeat
  misc_feature (1)..(473): Homolog of NCBI NO: 15234006 NR Description: putative protein; protein id: At4g18750.1
  misc_feature (1)..(476): Homolog of NCBI NO: 34897084 NR Description: hypothetical protein [Oryza sativa (japonica group)] >gi|12957718|gb|AAK09236.1| hypothetical protein [Oryza
  misc_feature (1)..(477): Homolog of NCBI NO: 30694644 NR Description: pentatricopeptide (PPR) repeat-containing protein
  misc_feature (1)..(477): Homolog of NCBI NO: 30794008 NR Description: unknown protein [Arabidopsis thaliana]
  misc_feature (1)..(471): Homolog of NCBI NO: 34903762 NR Description: unnamed protein product [Oryza sativa (japonica group)] >gi|7340873|dbj|BAA92963.1| unnamed protein product
  misc_feature (1)..(473): Homolog of NCBI NO: 15236277 NR Description: putative protein; protein id: At4g35130.1
  misc_feature (1)..(477): Homolog of NCBI NO: 11281371 NR Description: hypothetical protein T8H10.30 - Arabidopsis >gi|6706414|emb|CAB66100.1| putative protein [Arabidopsis
  misc_feature (1)..(471): Homolog of NCBI NO: 15233292 NR Description: hypothetical protein; protein id: At3g22150.1
  misc_feature (1)..(472): Homolog of NCBI NO: 15226150 NR Description: hypothetical protein; protein id: At2g33680.1
  misc_feature (1)..(471): Homolog of NCBI NO: 15220337 NR Description: hypothetical protein; protein id: At1g11290.1
MRELGVDLNVYSLSNVFKSFAGASALRQGLKTHALAIKNGLFNSVFLKTSLVDMYFKCGKVGLARRVFDEIVERDIVVWGAMIAGLAHNKRQWEALGLFRTMISEEKIYPNSVILTTILPVLGDVKALKLGKEVHAHVLKSKNYVEQPFVHSGLIDLYCKCGDMASGRRVFYGSKQRNAISWTALMSGYAANGRFDQALRSIVWMQQEGFRPDVVTIATVLPVCAELRAIKQGKEIHCYALKNLFLPNVSLVTSLMVMYSKCGVPEYPIRLFDRLEQRNVKAWTAMIDCYVENCDLRAGIEVFRLMLLSKHRPDSVTMGRVLTVCSDLKALKLGKELHGHILKKEFESIPFVSARIIKMYGKCGDLRSANFSFDAVAVKGSLTWTAIIEAYGCNELFRDAINCFEQMVSRGFTPNTFTFTAVLSICSQAGFVDEAYRFFNLMLRMYNLQPSEEHYSLVIELLNRCGRVEEAQRLAVMSSSSSLQT

SEQ ID NO: 91221 - DNA, 888 bp, Arabidopsis thaliana
  misc_feature (1)..(888): Ceres Seq. ID no. 12726881
  misc_feature: MA Experiment ID: 20000234 Result: Up-regulated in Transcription
  misc_feature: MA Experiment 20000234 PARAMETER Experiment Name: At_Siliques_P Parameter: Age (day) Value: 21
  misc_feature: MA Experiment 20000234 PARAMETER Experiment Name: At_Siliques_P Parameter: Organism Value: A. thaliana
  misc_feature: MA Experiment 20000234 PARAMETER Experiment Name: At_Siliques_P Parameter: Plant Line Value: WS
  misc_feature: MA Experiment 20000234 PARAMETER Experiment Name: At_Siliques_P Parameter: Tissue Value: Less Than 5mm Siliques vs. Whole Plant
  misc_feature: MA Experiment ID: 20000235 Result: Up-regulated in Transcription
  misc_feature: MA Experiment 20000235 PARAMETER Experiment Name: At_Siliques_P Parameter: Age (day) Value: 21
  misc_feature: MA Experiment 20000235 PARAMETER Experiment Name: At_Siliques_P Parameter: Organism Value: A. thaliana
  misc_feature: MA Experiment 20000235 PARAMETER Experiment Name: At_Siliques_P Parameter: Plant Line Value: WS
  misc_feature: MA Experiment 20000235 PARAMETER Experiment Name: At_Siliques_P Parameter: Tissue Value: 5-10mm Siliques vs. Whole Plant
  misc_feature: MA Experiment ID: 20000439 Result: Down-regulated in Transcription
  misc_feature: MA Experiment 20000439 PARAMETER Experiment Name: At_Roots__P Parameter: Age (day) Value: 14 vs. 21
  misc_feature: MA Experiment 20000439 PARAMETER Experiment Name: At_Roots__P Parameter: Organism Value: A. thaliana
  misc_feature: MA Experiment 20000439 PARAMETER Experiment Name: At_Roots__P Parameter: Tissue Value: Roots vs. Whole Plant
  misc_feature: MA Experiment ID: 20001910 Result: Up-regulated in Transcription
  misc_feature: MA Experiment 20001910 PARAMETER Experiment Name: At_Drought_Reproduction_P Parameter: Age (day) Value: 37
  misc_feature: MA Experiment 20001910 PARAMETER Experiment Name: At_Drought_Reproduction_P Parameter: Organism Value: A. thaliana
  misc_feature: MA Experiment 20001910 PARAMETER Experiment Name: At_Drought_Reproduction_P Parameter: Plant Line Value: WS
  misc_feature: MA Experiment 20001910 PARAMETER Experiment Name: At_Drought_Reproduction_P Parameter: Timepoint (day) Value: 7
  misc_feature: MA Experiment 20001910 PARAMETER Experiment Name: At_Drought_Reproduction_P Parameter: Tissue Value: Flowers
  misc_feature: MA Experiment 20001910 PARAMETER Experiment Name: At_Drought_Reproduction_P Parameter: Treatment Value: Drought vs. No Drought
atgacgacttatctcccatttccgatgaccacgagactcatactctctagcttcgtctctctcgtcgtactcactctcttcttcatcaccagaaccggtttctcaccgtcatcttcatttcatcagcctctgaacaacactctccggatctccacttcctccaccggcagtaaattacagagtccaagaagttgtaataagatccctccttccctcgccgatgctctcgtccactatgcctcctccaatgtcactccccagcaaactctctccgaaatctccgtcaccaagaaggaattagagaagaaatctccgtgcaacttcttggtatttggtcttggtcacgatagcttgatgtgggcgacgttaaatcacggaggaagaaccatcttcttagacgaggacgagtcatggattcaccaaatcgctgagaaattcccgtctcttgaatcgtaccacgtccggtacaagaccaaggtaagagacgcggaagctctcatggctgctacgaaagacagagaagaatgccgccgcgtgtcaactgatcttagggtttccacttgcgagcttgcgttgaagggcttaccggaggtggtttacgagacagagtgggatctaatcatggtggatgctccgacggggtttcatgaagaagctccgggacggatgtcggcgatttacacggcggggatgatcgcgaggagacggaaggatgaggaagagacaacggctgtgtttgtgcatgatgtggataggaaagtggaggatgagttctcaatggagtttttgtgtagagattacatgacgaagcaagagggaagactccgtcatttcacggtgcctagtcaccgtaactatggtgtctccggcgttaaattctgtccttaa

SEQ ID NO: 91222 - protein, 295 aa, Arabidopsis thaliana
  peptide (1)..(295): Ceres Seq. ID no. 12726882
  misc_feature (53)..(294): Pfam Name: Protein of unknown function (DUF579) Pfam Description: Protein of unknown function (DUF579)
  misc_feature (1)..(295): Homolog of NCBI NO: 18409879 NR Description: hypothetical protein; protein id: At1g71690.1
  misc_feature (9)..(295): Homolog of NCBI NO: 25354648 NR Description: hypothetical protein F14O23.3 [imported] - thaliana >gi|7239492|gb|AAF43218.1|AC012654_2 EST gb|AI999169
  misc_feature (1)..(295): Homolog of NCBI NO: 18398986 NR Description: expressed protein; protein id: At1g33800.1, by cDNA: 114466., supported by cDNA: gi_17979548, supported by gi_20453344 [Arabidopsis thaliana] >gi|25354651|pir||E86461
  misc_feature (20)..(295): Homolog of NCBI NO: 15234881 NR Description: putative protein; protein id: At4g09990.1
  misc_feature (14)..(295): Homolog of NCBI NO: 15217566 NR Description: unknown protein; protein id: At1g09610.1
  misc_feature (25)..(295): Homolog of NCBI NO: 25402555 NR Description: hypothetical protein [imported] - Arabidopsis >gi|3482933|gb|AAC33218.1| Similar to cdc2 protein kinases
  misc_feature (38)..(294): Homolog of NCBI NO: 18396558 NR Description: expressed protein; protein id: At1g27930.1, by cDNA: 1367., supported by cDNA: gi_15215712 [Arabidopsis
  misc_feature (38)..(294): Homolog of NCBI NO: 21537399 NR Description: unknown [Arabidopsis thaliana]
  misc_feature (38)..(294): Homolog of NCBI NO: 15220402 NR Description: unknown protein; protein id: At1g67330.1 thaliana] >gi|9828617|gb|AAG00240.1|AC002130_5 F1N21.15
  misc_feature (134)..(295): Homolog of NCBI NO: 27754730 NR Description: unknown protein [Arabidopsis thaliana]
MTTYLPFPMTTRLILSSFVSLVVLTLFFITRTGFSPSSSFHQPLNNTLRISTSSTGSKLQSPRSCNKIPPSLADALVHYASSNVTPQQTLSEISVTKKELEKKSPCNFLVFGLGHDSLMWATLNHGGRTIFLDEDESWIHQIAEKFPSLESYHVRYKTKVRDAEALMAATKDREECRRVSTDLRVSTCELALKGLPEVVYETEWDLIMVDAPTGFHEEAPGRMSAIYTAGMIARRRKDEEETTAVFVHDVDRKVEDEFSMEFLCRDYMTKQEGRLRHFTVPSHRNYGVSGVKFCP

SEQ ID NO: 91223 - protein, 287 aa, Arabidopsis thaliana
  peptide (1)..(287): Ceres Seq. ID no. 12726883
  misc_feature (45)..(286): Pfam Name: Protein of unknown function (DUF579) Pfam Description: Protein of unknown function (DUF579)
  misc_feature (1)..(287): Homolog of NCBI NO: 18409879 NR Description: hypothetical protein; protein id: At1g71690.1
  misc_feature (1)..(287): Homolog of NCBI NO: 25354648 NR Description: hypothetical protein F14O23.3 [imported] - thaliana >gi|7239492|gb|AAF43218.1|AC012654_2 EST gb|AI999169
  misc_feature (1)..(287): Homolog of NCBI NO: 18398986 NR Description: expressed protein; protein id: At1g33800.1, by cDNA: 114466., supported by cDNA: gi_17979548, supported by gi_20453344 [Arabidopsis thaliana] >gi|25354651|pir||E86461
  misc_feature (12)..(287): Homolog of NCBI NO: 15234881 NR Description: putative protein; protein id: At4g09990.1
  misc_feature (6)..(287): Homolog of NCBI NO: 15217566 NR Description: unknown protein; protein id: At1g09610.1
  misc_feature (17)..(287): Homolog of NCBI NO: 25402555 NR Description: hypothetical protein [imported] - Arabidopsis >gi|3482933|gb|AAC33218.1| Similar to cdc2 protein kinases
  misc_feature (30)..(286): Homolog of NCBI NO: 18396558 NR Description: expressed protein; protein id: At1g27930.1, by cDNA: 1367., supported by cDNA: gi_15215712 [Arabidopsis
  misc_feature (30)..(286): Homolog of NCBI NO: 21537399 NR Description: unknown [Arabidopsis thaliana]
  misc_feature (30)..(286): Homolog of NCBI NO: 15220402 NR Description: unknown protein; protein id: At1g67330.1 thaliana] >gi|9828617|gb|AAG00240.1|AC002130_5 F1N21.15
  misc_feature (126)..(287): Homolog of NCBI NO: 27754730 NR Description: unknown protein [Arabidopsis thaliana]
MTTRLILSSFVSLVVLTLFFITRTGFSPSSSFHQPLNNTLRISTSSTGSKLQSPRSCNKIPPSLADALVHYASSNVTPQQTLSEISVTKKELEKKSPCNFLVFGLGHDSLMWATLNHGGRTIFLDEDESWIHQIAEKFPSLESYHVRYKTKVRDAEALMAATKDREECRRVSTDLRVSTCELALKGLPEVVYETEWDLIMVDAPTGFHEEAPGRMSAIYTAGMIARRRKDEEETTAVFVHDVDRKVEDEFSMEFLCRDYMTKQEGRLRHFTVPSHRNYGVSGVKFCP

SEQ ID NO: 91224 - protein, 177 aa, Arabidopsis thaliana
  peptide (1)..(177): Ceres Seq. ID no. 12726884
  misc_feature (1)..(176): Pfam Name: Protein of unknown function (DUF579) Pfam Description: Protein of unknown function (DUF579)
  misc_feature (1)..(177): Homolog of NCBI NO: 18409879 NR Description: hypothetical protein; protein id: At1g71690.1
  misc_feature (1)..(177): Homolog of NCBI NO: 25354648 NR Description: hypothetical protein F14O23.3 [imported] - thaliana >gi|7239492|gb|AAF43218.1|AC012654_2 EST gb|AI999169
  misc_feature (1)..(177): Homolog of NCBI NO: 18398986 NR Description: expressed protein; protein id: At1g33800.1, by cDNA: 114466., supported by cDNA: gi_17979548, supported by gi_20453344 [Arabidopsis thaliana] >gi|25354651|pir||E86461
  misc_feature (1)..(177): Homolog of NCBI NO: 15234881 NR Description: putative protein; protein id: At4g09990.1
  misc_feature (1)..(177): Homolog of NCBI NO: 15217566 NR Description: unknown protein; protein id: At1g09610.1
  misc_feature (1)..(177): Homolog of NCBI NO: 25402555 NR Description: hypothetical protein [imported] - Arabidopsis >gi|3482933|gb|AAC33218.1| Similar to cdc2 protein kinases
  misc_feature (1)..(176): Homolog of NCBI NO: 18396558 NR Description: expressed protein; protein id: At1g27930.1, by cDNA: 1367., supported by cDNA: gi_15215712 [Arabidopsis
  misc_feature (1)..(176): Homolog of NCBI NO: 21537399 NR Description: unknown [Arabidopsis thaliana]
  misc_feature (1)..(176): Homolog of NCBI NO: 15220402 NR Description: unknown protein; protein id: At1g67330.1 thaliana] >gi|9828617|gb|AAG00240.1|AC002130_5 F1N21.15
  misc_feature (16)..(177): Homolog of NCBI NO: 27754730 NR Description: unknown protein [Arabidopsis thaliana]
MWATLNHGGRTIFLDEDESWIHQIAEKFPSLESYHVRYKTKVRDAEALMAATKDREECRRVSTDLRVSTCELALKGLPEVVYETEWDLIMVDAPTGFHEEAPGRMSAIYTAGMIARRRKDEEETTAVFVHDVDRKVEDEFSMEFLCRDYMTKQEGRLRHFTVPSHRNYGVSGVKFCP

SEQ ID NO: 91225 - DNA, 2273 bp, Arabidopsis thaliana
  misc_feature (1)..(2273): Ceres Seq. ID no. 12726893
  misc_feature: MA Experiment ID: 20000234 Result: Down-regulated in Transcription
  misc_feature: MA Experiment 20000234 PARAMETER Experiment Name: At_Siliques_P Parameter: Age (day) Value: 21
  misc_feature: MA Experiment 20000234 PARAMETER Experiment Name: At_Siliques_P Parameter: Organism Value: A. thaliana
  misc_feature: MA Experiment 20000234 PARAMETER Experiment Name: At_Siliques_P Parameter: Plant Line Value: WS
  misc_feature: MA Experiment 20000234 PARAMETER Experiment Name: At_Siliques_P Parameter: Tissue Value: Less Than 5mm Siliques vs. Whole Plant
  misc_feature: MA Experiment ID: 20000495 Result: Down-regulated in Transcription
  misc_feature: MA Experiment 20000495 PARAMETER Experiment Name: At_Guard_Cells_P Parameter: Harvest Date Value: 8/2/2002
  misc_feature: MA Experiment 20000495 PARAMETER Experiment Name: At_Guard_Cells_P Parameter: Organism Value: A. thaliana
  misc_feature: MA Experiment 20000495 PARAMETER Experiment Name: At_Guard_Cells_P Parameter: Tissue Value: Guard Cells vs. Leaves
  misc_feature: MA Experiment ID: 20000794 Result: Up-regulated in Transcription
  misc_feature: MA Experiment 20000794 PARAMETER Experiment Name: At_Petals_P Parameter: Age (day) Value: 23-25 days
  misc_feature: MA Experiment 20000794 PARAMETER Experiment Name: At_Petals_P Parameter: Plant Line Value: WS
  misc_feature: MA Experiment 20000794 PARAMETER Experiment Name: At_Petals_P Parameter: Tissue Value: Petals vs. Whole plant
aaaataaaataaattctctctttctggtctgaagaaaattacgattattttcttatgtctccagttgaacccgccggtataatgaagaaatctcatcgtcagaaatctcagagattatgggcaaagctagtgatgagaaagtggttgaacataagtggtagagatcctgagtatggtgctgatactgataacgaatccgaaaacgaagatgctcgtgaagacaacgatgactctagctccgatgaagaaggtggtagtggctcgagaggaagagaatcaaaagtttatgagaacgcggaggacgcaatcgcagccgcttcagccgttgtagacgcagcagcagcagcggcggagtttattagcaatgatgctccaatgaagttaagaagaaggaattcagaaacattaagagcacagtacattaacaacaaagaaataagagtttgtgttggtacgtggaacgttggaggaatctcaccaccatctgatcttgacattgacgactggattgaaattaaccaaccagctgatatctacgttcttgggttacaagagattgttcctttaaatgctggaaacattcttggagctgaagatgatcgtcctgttgctaaatgggaagaagtgattagagaagcattgaacagagttagaccaaaactctccggggttaagagttatagtgatccaccatctccgggtaggtttaaaccttttgaggaaacacatgatattatagaggaagaagtagcttttgagagtgatagtgatgctggtgttgagattcatccgattgacgaggaggaagaagaggaaaccgatagactttgggcgttaaaacatgacggtggagttatcggcgaagttaagactcttgttgacccgaataccggtttgccggttgttgagatcaagagacagttttcgattcctaagaagctagacagacaactttgtttacgtgctgatagctttaaggggataagcgacgatgattctactcaaaccggtatgaaaacgataaaccggatgttaagcgggaaagaacggatcggtttgagttggcctgagccaccattgaacatgttaggaccttgtgttctcgatagacagccgtcgataaagacagtgaagtctttaaaaacagccaagtctttcaaggcttatagttcgtttaagtctgtagccggaaacaacaacgggattccccctgaggttttagctctagcggaaatggacctgaagttgctaatggagaggaaacgaagaccggcttatgtgaggctagtgagtaaacaaatggttgggattcttttgaccatttgggttaaacgaagcttgcggaaacatattcaaaacgtacgagtctctactgttggtgttggcgttatgggatatattggtaacaagggagctgtgtctgtgagcatgtcgataaaccagacgttcttttgtttcataaacacgcatttaacggcaggagaaagagaggttgatcagataaagaggaatgctgatgtacacgagatacataaaagaacagtctttcactctgtctcagctcttggacttcccaagcttatctatgatcacgaaagaataatctggctaggtgatctcaactatcggcttagttcatcgtatgagaaaaccagagacctcatttccaagagagaatggtctaaattacttgaatatgaccagctggtaaaggaatacagaaaaggtagagcatttgatggatggtcagaaggaactctacattttccaccaacttataagtaccaagcgaattccgatgagtacaccgcaaacgatggaaaggcgccgaaaagaacaccagcttggtgtgacagagtactatcctacgggaaaggaatgaggttggttcattacaggagaaccgaacagaaattctcagatcatcgtccggttacagcgatatacatggctgaagtcgaagtgttttctgcgaggaaacttcagcgagcgttgacatttacggatgcagagattgaagacgagggacttgtagccgttctcgtttaaaagaagagatttggtgcttgtttgtttgtttgatcttgcatatgaagtattggcgaaagagacattctctttctacggataggtttttgaatctcatgtcgttatactgatgcatcacactgagaaaacgttcatattcttatagtttttatcttcttgttttgtgtgttggtttactcttgtaaatttagttgatatatataatgaaatcaagaacattttac

SEQ ID NO: 91226 - protein, 664 aa, Arabidopsis thaliana
  peptide (1)..(664): Ceres Seq. ID no. 12726894
  misc_feature (130)..(631): Pfam Name: Endonuclease/Exonuclease/phosphatase family Pfam Description: Endonuclease/Exonuclease/phosphatase family
  misc_feature (114)..(664): Homolog of NCBI NO: 12323727 NR Description: putative inositol polyphosphate phosphatase, 5'
  misc_feature (396)..(655): Homolog of NCBI NO: 10444261 NR Description: inositol polyphosphate 5-phosphatase I
  misc_feature (396)..(655): Homolog of NCBI NO: 18399139 NR Description: inositol polyphosphate 5-phosphatase II, protein id: At1g34120.1, supported by cDNA: gi_10444260
  misc_feature (103)..(359): Homolog of NCBI NO: 10444261 NR Description: inositol polyphosphate 5-phosphatase I
  misc_feature (103)..(359): Homolog of NCBI NO: 18399139 NR Description: inositol polyphosphate 5-phosphatase II, protein id: At1g34120.1, supported by cDNA: gi_10444260
  misc_feature (19)..(62): Homolog of NCBI NO: 10444261 NR Description: inositol polyphosphate 5-phosphatase I
  misc_feature (19)..(62): Homolog of NCBI NO: 18399139 NR Description: inositol polyphosphate 5-phosphatase II, protein id: At1g34120.1, supported by cDNA: gi_10444260
  misc_feature (396)..(655): Homolog of NCBI NO: 30693006 NR Description: inositol polyphosphate 5-phosphatase I (IP5PI)
  misc_feature (109)..(359): Homolog of NCBI NO: 30693006 NR Description: inositol polyphosphate 5-phosphatase I (IP5PI)
  misc_feature (19)..(62): Homolog of NCBI NO: 30693006 NR Description: inositol polyphosphate 5-phosphatase I (IP5PI)
MSPVEPAGIMKKSHRQKSQRLWAKLVMRKWLNISGRDPEYGADTDNESENEDAREDNDDSSSDEEGGSGSRGRESKVYENAEDAIAAASAVVDAAAAAAEFISNDAPMKLRRRNSETLRAQYINNKEIRVCVGTWNVGGISPPSDLDIDDWIEINQPADIYVLGLQEIVPLNAGNILGAEDDRPVAKWEEVIREALNRVRPKLSGVKSYSDPPSPGRFKPFEETHDIIEEEVAFESDSDAGVEIHPIDEEEEEETDRLWALKHDGGVIGEVKTLVDPNTGLPVVEIKRQFSIPKKLDRQLCLRADSFKGISDDDSTQTGMKTINRMLSGKERIGLSWPEPPLNMLGPCVLDRQPSIKTVKSLKTAKSFKAYSSFKSVAGNNNGIPPEVLALAEMDLKLLMERKRRPAYVRLVSKQMVGILLTIWVKRSLRKHIQNVRVSTVGVGVMGYIGNKGAVSVSMSINQTFFCFINTHLTAGEREVDQIKRNADVHEIHKRTVFHSVSALGLPKLIYDHERIIWLGDLNYRLSSSYEKTRDLISKREWSKLLEYDQLVKEYRKGRAFDGWSEGTLHFPPTYKYQANSDEYTANDGKAPKRTPAWCDRVLSYGKGMRLVHYRRTEQKFSDHRPVTAIYMAEVEVFSARKLQRALTFTDAEIEDEGLVAVLV

SEQ ID NO: 91227 - protein, 655 aa, Arabidopsis thaliana
  peptide (1)..(655): Ceres Seq. ID no. 12726895
  misc_feature (121)..(622): Pfam Name: Endonuclease/Exonuclease/phosphatase family Pfam Description: Endonuclease/Exonuclease/phosphatase family
  misc_feature (105)..(655): Homolog of NCBI NO: 12323727 NR Description: putative inositol polyphosphate phosphatase, 5'
  misc_feature (387)..(646): Homolog of NCBI NO: 10444261 NR Description: inositol polyphosphate 5-phosphatase I
  misc_feature (387)..(646): Homolog of NCBI NO: 18399139 NR Description: inositol polyphosphate 5-phosphatase II, protein id: At1g34120.1, supported by cDNA: gi_10444260
  misc_feature (94)..(350): Homolog of NCBI NO: 10444261 NR Description: inositol polyphosphate 5-phosphatase I
  misc_feature (94)..(350): Homolog of NCBI NO: 18399139 NR Description: inositol polyphosphate 5-phosphatase II, protein id: At1g34120.1, supported by cDNA: gi_10444260
  misc_feature (10)..(53): Homolog of NCBI NO: 10444261 NR Description: inositol polyphosphate 5-phosphatase I
  misc_feature (10)..(53): Homolog of NCBI NO: 18399139 NR Description: inositol polyphosphate 5-phosphatase II, protein id: At1g34120.1, supported by cDNA: gi_10444260
  misc_feature (387)..(646): Homolog of NCBI NO: 30693006 NR Description: inositol polyphosphate 5-phosphatase I (IP5PI)
  misc_feature (100)..(350): Homolog of NCBI NO: 30693006 NR Description: inositol polyphosphate 5-phosphatase I (IP5PI)
  misc_feature (10)..(53): Homolog of NCBI NO: 30693006 NR Description: inositol polyphosphate 5-phosphatase I (IP5PI)
MKKSHRQKSQRLWAKLVMRKWLNISGRDPEYGADTDNESENEDAREDNDDSSSDEEGGSGSRGRESKVYENAEDAIAAASAVVDAAAAAAEFISNDAPMKLRRRNSETLRAQYINNKEIRVCVGTWNVGGISPPSDLDIDDWIEINQPADIYVLGLQEIVPLNAGNILGAEDDRPVAKWEEVIREALNRVRPKLSGVKSYSDPPSPGRFKPFEETHDIIEEEVAFESDSDAGVEIHPIDEEEEEETDRLWALKHDGGVIGEVKTLVDPNTGLPVVEIKRQFSIPKKLDRQLCLRADSFKGISDDDSTQTGMKTINRMLSGKERIGLSWPEPPLNMLGPCVLDRQPSIKTVKSLKTAKSFKAYSSFKSVAGNNNGIPPEVLALAEMDLKLLMERKRRPAYVRLVSKQMVGILLTIWVKRSLRKHIQNVRVSTVGVGVMGYIGNKGAVSVSMSINQTFFCFINTHLTAGEREVDQIKRNADVHEIHKRTVFHSVSALGLPKLIYDHERIIWLGDLNYRLSSSYEKTRDLISKREWSKLLEYDQLVKEYRKGRAFDGWSEGTLHFPPTYKYQANSDEYTANDGKAPKRTPAWCDRVLSYGKGMRLVHYRRTEQKFSDHRPVTAIYMAEVEVFSARKLQRALTFTDAEIEDEGLVAVLV

SEQ ID NO: 91228 - protein, 638 aa, Arabidopsis thaliana
  peptide (1)..(638): Ceres Seq. ID no. 12726896
  misc_feature (104)..(605): Pfam Name: Endonuclease/Exonuclease/phosphatase family Pfam Description: Endonuclease/Exonuclease/phosphatase family
  misc_feature (88)..(638): Homolog of NCBI NO: 12323727 NR Description: putative inositol polyphosphate phosphatase, 5'
  misc_feature (370)..(629): Homolog of NCBI NO: 10444261 NR Description: inositol polyphosphate 5-phosphatase I
  misc_feature (370)..(629): Homolog of NCBI NO: 18399139 NR Description: inositol polyphosphate 5-phosphatase II, protein id: At1g34120.1, supported by cDNA: gi_10444260
  misc_feature (77)..(333): Homolog of NCBI NO: 10444261 NR Description: inositol polyphosphate 5-phosphatase I
  misc_feature (77)..(333): Homolog of NCBI NO: 18399139 NR Description: inositol polyphosphate 5-phosphatase II, protein id: At1g34120.1, supported by cDNA: gi_10444260
  misc_feature (1)..(36): Homolog of NCBI NO: 10444261 NR Description: inositol polyphosphate 5-phosphatase I
  misc_feature (1)..(36): Homolog of NCBI NO: 18399139 NR Description: inositol polyphosphate 5-phosphatase II, protein id: At1g34120.1, supported by cDNA: gi_10444260
  misc_feature (370)..(629): Homolog of NCBI NO: 30693006 NR Description: inositol polyphosphate 5-phosphatase I (IP5PI)
  misc_feature (83)..(333): Homolog of NCBI NO: 30693006 NR Description: inositol polyphosphate 5-phosphatase I (IP5PI)
  misc_feature (1)..(36): Homolog of NCBI NO: 30693006 NR Description: inositol polyphosphate 5-phosphatase I (IP5PI)
MRKWLNISGRDPEYGADTDNESENEDAREDNDDSSSDEEGGSGSRGRESKVYENAEDAIAAASAVVDAAAAAAEFISNDAPMKLRRRNSETLRAQYINNKEIRVCVGTWNVGGISPPSDLDIDDWIEINQPADIYVLGLQEIVPLNAGNILGAEDDRPVAKWEEVIREALNRVRPKLSGVKSYSDPPSPGRFKPFEETHDIIEEEVAFESDSDAGVEIHPIDEEEEEETDRLWALKHDGGVIGEVKTLVDPNTGLPVVEIKRQFSIPKKLDRQLCLRADSFKGISDDDSTQTGMKTINRMLSGKERIGLSWPEPPLNMLGPCVLDRQPSIKTVKSLKTAKSFKAYSSFKSVAGNNNGIPPEVLALAEMDLKLLMERKRRPAYVRLVSKQMVGILLTIWVKRSLRKHIQNVRVSTVGVGVMGYIGNKGAVSVSMSINQTFFCFINTHLTAGEREVDQIKRNADVHEIHKRTVFHSVSALGLPKLIYDHERIIWLGDLNYRLSSSYEKTRDLISKREWSKLLEYDQLVKEYRKGRAFDGWSEGTLHFPPTYKYQANSDEYTANDGKAPKRTPAWCDRVLSYGKGMRLVHYRRTEQKFSDHRPVTAIYMAEVEVFSARKLQRALTFTDAEIEDEGLVAVLV

SEQ ID NO: 91229 - DNA, 1386 bp, Arabidopsis thaliana
  misc_feature (1)..(1386): Ceres Seq. ID no. 12726903
  misc_feature: MA Experiment ID: 20000173 Result: Down-regulated in Transcription
  misc_feature: MA Experiment 20000173 PARAMETER Experiment Name: At_42deg_Heat_P Parameter: Age (day) Value: 14
  misc_feature: MA Experiment 20000173 PARAMETER Experiment Name: At_42deg_Heat_P Parameter: Organism Value: A. thaliana
  misc_feature: MA Experiment 20000173 PARAMETER Experiment Name: At_42deg_Heat_P Parameter: Plant Line Value: WS
  misc_feature: MA Experiment 20000173 PARAMETER Experiment Name: At_42deg_Heat_P Parameter: Temperature (deg C) Value: 42 vs. 22
  misc_feature: MA Experiment 20000173 PARAMETER Experiment Name: At_42deg_Heat_P Parameter: Timepoint (hr) Value: 6
  misc_feature: MA Experiment 20000173 PARAMETER Experiment Name: At_42deg_Heat_P Parameter: Tissue Value: Aerial
  misc_feature: MA Experiment ID: 20000184 Result: Down-regulated in Transcription
  misc_feature: MA Experiment 20000184 PARAMETER Experiment Name: At_Shoots__P Parameter: Age (day) Value: 7
  misc_feature: MA Experiment 20000184 PARAMETER Experiment Name: At_Shoots__P Parameter: Tissue Value: Shoots vs. Whole Plant
  misc_feature: MA Experiment ID: 20001451 Result: Down-regulated in Transcription
  misc_feature: MA Experiment 20001451 PARAMETER Experiment Name: At_Far-red-induction_P Parameter: Age (day) Value: 7
  misc_feature: MA Experiment 20001451 PARAMETER Experiment Name: At_Far-red-induction_P Parameter: Light Value: Far-red vs. White
  misc_feature: MA Experiment 20001451 PARAMETER Experiment Name: At_Far-red-induction_P Parameter: Organism Value: A. thaliana
  misc_feature: MA Experiment 20001451 PARAMETER Experiment Name: At_Far-red-induction_P Parameter: Plant Line Value: Columbia
  misc_feature: MA Experiment 20001451 PARAMETER Experiment Name: At_Far-red-induction_P Parameter: Timepoint (hr) Value: 24
  misc_feature: MA Experiment 20001451 PARAMETER Experiment Name: At_Far-red-induction_P Parameter: Tissue Value: Whole Plant
atggcttcatcatcatcccaacgacgctgcgtttttgttgggaacattccttacgacgcgaccgaggaacaacttagagaaatttgtggagaagttggacctgttgtctcgtttagattagttacggatagagaaactggtaaaccaaaaggctacggattttgtgagtataaagacgaagaaacagcattaagtgctcgtcgtaatcttcagagttatgaaatcaatggtcgtcaattaagagttgattttgctgagaatgacaaaggcactgacaaaacccgtgatcagagtcaaggaggacctggtttgccatctactactactgtgacagagtctcaaaagcagattggagggccagtagattcaaatatgcatcagccagttggtctccaccttgctacaacagctgcatctgttatagcgggtgcgctaggtggtcctcaggtcggttcgcagtttacgcaaagtaatctgcaggttccagctagtgatcccctggctcttcatctagccaagatgtcaagaagtcagcttactgaaattatatcgtccattaagttaatggctacacaaaataaggaacatgctagacagttgttggtttcaagacctcagttgctaaaagctgttttcctggcgcaggtaatgcttgggattgtgagtccgcaagtgttacagtcgccaaatattgttcaggccccaagtcatatgacagggtcttcaattcaagatgcgcaattatctggtcaaaaccttttaccgccactggcacaaaggtcacagcagctaagtcgtgctccccatagtcagtatcctgtccagcaatcttctaaacaaccttttagtcagattccacaactagtagcacaaccaggtccttcttctgtgaatcctcctcctagatcccaagttaaagtcgaaaacgctccattccaacgccagcaagtggttccagcttccaccaacataggttatagtagtcagaattcagttccgaataatgctatccagccatctcaagtaccccaccaagcattaccaaattctgtgatgcagcaaggtgggcaaacggtatcattaaattttggcaaaagaataaacgagggtcctcctcatcaatcaatgaacagaccatcaaagatgatgaaagtggaggataggagaactacttcactccctggaggtcatgtgtctaattcaatgcttccgaatcaagcacaagctccccagacacatatctctcccgatgttcagtcaacattgctccagcaagtaatgaaccttacgccagaacagttgagattactgactccagagcaacaacaagaggtcttaaagctgcaacaagccctcaagcaagaccacatgatgcagccttcatag

SEQ ID NO: 91230 - protein, 461 aa, Arabidopsis thaliana
  peptide (1)..(461): Ceres Seq. ID no. 12726904
  misc_feature (11)..(82): Pfam Name: RNA recognition motif. (a.k.a. RRM, RBD, or RNP domain) Pfam Description: RNA recognition motif. (a.k.a. RRM, RBD, or RNP
  misc_feature (1)..(461): Homolog of NCBI NO: 22330574 NR Description: cleavage stimulation factor, putative; protein At1g71800.1 [Arabidopsis thaliana] >gi|25406120|pir||E96740
  misc_feature (1)..(461): Homolog of NCBI NO: 21591633 NR Description: cleavage stimulation factor 64 [Arabidopsis
  misc_feature (146)..(374): Homolog of NCBI NO: 21619877 NR Description: Similar to cleavage stimulation factor, 3'
  misc_feature (9)..(106): Homolog of NCBI NO: 21619877 NR Description: Similar to cleavage stimulation factor, 3'
  misc_feature (367)..(454): Homolog of NCBI NO: 21619877 NR Description: Similar to cleavage stimulation factor, 3'
  misc_feature (146)..(371): Homolog of NCBI NO: 27735464 NR Description: Similar to cleavage stimulation factor, 3'
  misc_feature (9)..(106): Homolog of NCBI NO: 27735464 NR Description: Similar to cleavage stimulation factor, 3'
  misc_feature (372)..(454): Homolog of NCBI NO: 27735464 NR Description: Similar to cleavage stimulation factor, 3'
  misc_feature (146)..(403): Homolog of NCBI NO: 632500 NR Description: polyadenylation factor 64 kDa subunit
  misc_feature (9)..(106): Homolog of NCBI NO: 632500 NR Description: polyadenylation factor 64 kDa subunit
MASSSSQRRCVFVGNIPYDATEEQLREICGEVGPVVSFRLVTDRETGKPKGYGFCEYKDEETALSARRNLQSYEINGRQLRVDFAENDKGTDKTRDQSQGGPGLPSTTTVTESQKQIGGPVDSNMHQPVGLHLATTAASVIAGALGGPQVGSQFTQSNLQVPASDPLALHLAKMSRSQLTEIISSIKLMATQNKEHARQLLVSRPQLLKAVFLAQVMLGIVSPQVLQSPNIVQAPSHMTGSSIQDAQLSGQNLLPPLAQRSQQLSRAPHSQYPVQQSSKQPFSQIPQLVAQPGPSSVNPPPRSQVKVENAPFQRQQVVPASTNIGYSSQNSVPNNAIQPSQVPHQALPNSVMQQGGQTVSLNFGKRINEGPPHQSMNRPSKMMKVEDRRTTSLPGGHVSNSMLPNQAQAPQTHISPDVQSTLLQQVMNLTPEQLRLLTPEQQQEVLKLQQALKQDHMMQPS

SEQ ID NO: 91231 - protein, 337 aa, Arabidopsis thaliana
  peptide (1)..(337): Ceres Seq. ID no. 12726905
  misc_feature (1)..(337): Homolog of NCBI NO: 22330574 NR Description: cleavage stimulation factor, putative; protein At1g71800.1 [Arabidopsis thaliana] >gi|25406120|pir||E96740
  misc_feature (1)..(337): Homolog of NCBI NO: 21591633 NR Description: cleavage stimulation factor 64 [Arabidopsis
  misc_feature (22)..(250): Homolog of NCBI NO: 21619877 NR Description: Similar to cleavage stimulation factor, 3'
  misc_feature (243)..(330): Homolog of NCBI NO: 21619877 NR Description: Similar to cleavage stimulation factor, 3'
  misc_feature (22)..(247): Homolog of NCBI NO: 27735464 NR Description: Similar to cleavage stimulation factor, 3'
  misc_feature (248)..(330): Homolog of NCBI NO: 27735464 NR Description: Similar to cleavage stimulation factor, 3'
  misc_feature (22)..(279): Homolog of NCBI NO: 632500 NR Description: polyadenylation factor 64 kDa subunit
  misc_feature (264)..(330): Homolog of NCBI NO: 632500 NR Description: polyadenylation factor 64 kDa subunit
  misc_feature (22)..(183): Homolog of NCBI NO: 4557493 NR Description: cleavage stimulation factor subunit 2; cleavage
  misc_feature (243)..(330): Homolog of NCBI NO: 4557493 NR Description: cleavage stimulation factor subunit 2; cleavage
MHQPVGLHLATTAASVIAGALGGPQVGSQFTQSNLQVPASDPLALHLAKMSRSQLTEIISSIKLMATQNKEHARQLLVSRPQLLKAVFLAQVMLGIVSPQVLQSPNIVQAPSHMTGSSIQDAQLSGQNLLPPLAQRSQQLSRAPHSQYPVQQSSKQPFSQIPQLVAQPGPSSVNPPPRSQVKVENAPFQRQQVVPASTNIGYSSQNSVPNNAIQPSQVPHQALPNSVMQQGGQTVSLNFGKRINEGPPHQSMNRPSKMMKVEDRRTTSLPGGHVSNSMLPNQAQAPQTHISPDVQSTLLQQVMNLTPEQLRLLTPEQQQEVLKLQQALKQDHMMQPS

SEQ ID NO: 91232 - protein, 288 aa, Arabidopsis thaliana
  peptide (1)..(288): Ceres Seq. ID no. 12726906
  misc_feature (1)..(288): Homolog of NCBI NO: 22330574 NR Description: cleavage stimulation factor, putative; protein At1g71800.1 [Arabidopsis thaliana] >gi|25406120|pir||E96740
  misc_feature (1)..(288): Homolog of NCBI NO: 21591633 NR Description: cleavage stimulation factor 64 [Arabidopsis
  misc_feature (1)..(201): Homolog of NCBI NO: 21619877 NR Description: Similar to cleavage stimulation factor, 3'
  misc_feature (194)..(281): Homolog of NCBI NO: 21619877 NR Description: Similar to cleavage stimulation factor, 3'
  misc_feature (1)..(198): Homolog of NCBI NO: 27735464 NR Description: Similar to cleavage stimulation factor, 3'
  misc_feature (199)..(281): Homolog of NCBI NO: 27735464 NR Description: Similar to cleavage stimulation factor, 3'
  misc_feature (1)..(230): Homolog of NCBI NO: 632500 NR Description: polyadenylation factor 64 kDa subunit
  misc_feature (215)..(281): Homolog of NCBI NO: 632500 NR Description: polyadenylation factor 64 kDa subunit
  misc_feature (1)..(134): Homolog of NCBI NO: 4557493 NR Description: cleavage stimulation factor subunit 2; cleavage
  misc_feature (194)..(281): Homolog of NCBI NO: 4557493 NR Description: cleavage stimulation factor subunit 2; cleavage
MSRSQLTEIISSIKLMATQNKEHARQLLVSRPQLLKAVFLAQVMLGIVSPQVLQSPNIVQAPSHMTGSSIQDAQLSGQNLLPPLAQRSQQLSRAPHSQYPVQQSSKQPFSQIPQLVAQPGPSSVNPPPRSQVKVENAPFQRQQVVPASTNIGYSSQNSVPNNAIQPSQVPHQALPNSVMQQGGQTVSLNFGKRINEGPPHQSMNRPSKMMKVEDRRTTSLPGGHVSNSMLPNQAQAPQTHISPDVQSTLLQQVMNLTPEQLRLLTPEQQQEVLKLQQALKQDHMMQPS

SEQ ID NO: 91233 - DNA, 2388 bp, Arabidopsis thaliana
  misc_feature (1)..(2388): Ceres Seq. ID no. 12726907
  misc_feature: MA Experiment ID: 20000265 Result: Up-regulated in Transcription
  misc_feature: MA Experiment 20000265 PARAMETER Experiment Name: At_Open_Flower_P Parameter: Age (day) Value: 21
  misc_feature: MA Experiment 20000265 PARAMETER Experiment Name: At_Open_Flower_P Parameter: Plant Line Value: WS
  misc_feature: MA Experiment 20000265 PARAMETER Experiment Name: At_Open_Flower_P Parameter: Tissue Value: Closed Flower vs. Whole Plant
  misc_feature: MA Experiment ID: 20001248 Result: Down-regulated in Transcription
  misc_feature: MA Experiment 20001248 PARAMETER Experiment Name: At_Far-red-induction_P Parameter: Age (day) Value: 7
  misc_feature: MA Experiment 20001248 PARAMETER Experiment Name: At_Far-red-induction_P Parameter: Light Value: Far-red vs. White
  misc_feature: MA Experiment 20001248 PARAMETER Experiment Name: At_Far-red-induction_P Parameter: Organism Value: A. thaliana
  misc_feature: MA Experiment 20001248 PARAMETER Experiment Name: At_Far-red-induction_P Parameter: Plant Line Value: Columbia
  misc_feature: MA Experiment 20001248 PARAMETER Experiment Name: At_Far-red-induction_P Parameter: Timepoint (hr) Value: 4
  misc_feature: MA Experiment 20001248 PARAMETER Experiment Name: At_Far-red-induction_P Parameter: Tissue Value: Whole Plant
agtagagaaccatattatttgccatttcttagaagaatccactgcatgatattcaaaatctcaccaacaaccattggcgaagaagaaaagaaaaagaagataactctgtagattttgaaagagatgcttcggcttccttcttctatgccaatcgtttcttttcccgccaatcccaatctgctgattaatccacaaccatcttggccgtcgcgaagaggaaactccgccgttgttgtctccgctgcgtctagagatgtagatagtttcactagtaaatccggttatttgttcagtctcagtgccgatgaggctgattctttgtcggagtacaattttcccaggattgatgggatgtataagaagaaacctctgattctgcttcgtagattagctcagatcggaactacgtttagttattggtttgggcttcgcttagctgatgaggctttggaacgctctgatcaaatgttcaaggtacgagcagcggagcttaggaaattgcttgtggagctaggtccggcgtacgtcaaaatcgctcaagctgtttcatctcgtcctgatttgatacctcctatatacttggatgaactctccctgctacaagatcaaataactccgttttcaaccgaagttgctttcaatatgattgaggatgaacttggtcttcctatagatgagcttttctctgagatttctcctgagcctgttgctgcagcgtcccttggacaggtatatcaagctaggctccgtagaagtggaaaggttgttgctgtcaaagtgcagcgccctggtgtacgagctgcaattgctttggacacattaattcttcggtatatagcgggtttgattaaaaaggctggaagattcaactctgatctcgaggcagttgttgatgaatgggcaacaagtctgtttaaggagatggattacttgaatgaagctcaaaacggaataaaatttaggaagttgtatggtggcatcaaagatgtcttggttccaaagatgtacacagagtacagtaccagcaaagttcttgtaatggaatgggtggagggtcagaagcttaatgaagttaatgacctttatttagttgaggttggcgtttactgttcgtttaatcaacttctggagtatggattttaccatgccgatccccaccctgggaattttcttcgcacgtatgatgggcaacttgcatacttagattttggtatgatgggggactttaggccagaattacgtgatggattcatggaagcatgtcttcatcttgtaaatcgtgacttcaaagcgctggctaaagactttgtaactctggggcttcttccaccaacagcagaaaagagcgctgtgacaaaggctttaaccgatgtttttcaagatgcaatttctagaggagttcgcaatataagcttcggtgacctgcttggcgacttgggaaaaacaatgtaccgattcaaattcagaatacccccttatttttctctagttatccgcagtcttgctgttttggagggcattgccatcggtataagcccaaactacaaggttctaggcagtacatacccttggattgctagaaagattctaaccgacagctctccacaactgaaaagctctctgcaaaatcttttatatgaggaaggtgttttccgaattgaccgtcttgagtctttgctttctgagtctcttaggacagagacagcattagttcagaaaccagtggtggggacagaatctaatattgccatgaagcaaatgcttgcttttactttcacggaacagggttcttttgtaagagaaatccttcttcgagaattcgctaagggtcttgatgcatatggattggcaactttggactcttttacattttctggttcaggaccatcgagttccttgacagaagaagacatgacaaaccttagaactttctatcgcctcatctcattgttctcagggatgcaaaaggctaaaagccaagtaaaagcggtgagtaaatatggtgaggcgctcacgcctctagacgaagcatcactggtcatgtatcagcttccatcagcacaagagatgcttccgattctctccatattacctgagcttccacaggaatcacaacagaggttgcttcagttgccaggtgacttggttggaagattggtgactcgggcttttgctagaaccattcgcaggatttttctttgatgtccgattacaaataaaaacttgcagattttagacaagactactgtgatttgagttatttataatttttacataaacttgaagagaatcagaggaatggctgttttgatcccacaacagcatatttataaaagaaaagcatcaacatcttcttcatcaaataaaacaatctcagtttttgttttg

SEQ ID NO: 91234 - protein, 692 aa, Arabidopsis thaliana
  peptide (1)..(692): Ceres Seq. ID no. 12726908
  misc_feature (177)..(295): Pfam Name: ABC1 family Pfam Description: ABC1 family
  misc_feature (1)..(442): Homolog of NCBI NO: 25406121 NR Description: hypothetical protein F14O23.19 [imported] - thaliana >gi|7239508|gb|AAF43234.1|AC012654_18 EST gb|AI998820
  misc_feature (515)..(692): Homolog of NCBI NO: 25406121 NR Description: hypothetical protein F14O23.19 [imported] - thaliana >gi|7239508|gb|AAF43234.1|AC012654_18 EST gb|AI998820
  misc_feature (460)..(555): Homolog of NCBI NO: 25406121 NR Description: hypothetical protein F14O23.19 [imported] - thaliana >gi|7239508|gb|AAF43234.1|AC012654_18 EST gb|AI998820
  misc_feature (23)..(692): Homolog of NCBI NO: 38344898 NR Description: OSJNBb0079B02.1 [Oryza sativa (japonica
  misc_feature (265)..(692): Homolog of NCBI NO: 19698835 NR Description: unknown protein [Arabidopsis thaliana]
  misc_feature (78)..(583): Homolog of NCBI NO: 17232452 NR Description: hypothetical protein [Nostoc sp. PCC 7120]
  misc_feature (43)..(578): Homolog of NCBI NO: 23042448 NR Description: hypothetical protein [Trichodesmium erythraeum
  misc_feature (61)..(578): Homolog of NCBI NO: 22298493 NR Description: ORF_ID:tll0950~hypothetical protein
  misc_feature (23)..(577): Homolog of NCBI NO: 16331408 NR Description: ABC1-like [Synechocystis sp. PCC 6803]
  misc_feature (62)..(580): Homolog of NCBI NO: 33862270 NR Description: possible protein kinase:ABC1 family marinus subsp. pastoris str. CCMP1378] possible protein kinase:ABC1 family [Prochlorococcus marinus
MLRLPSSMPIVSFPANPNLLINPQPSWPSRRGNSAVVVSAASRDVDSFTSKSGYLFSLSADEADSLSEYNFPRIDGMYKKKPLILLRRLAQIGTTFSYWFGLRLADEALERSDQMFKVRAAELRKLLVELGPAYVKIAQAVSSRPDLIPPIYLDELSLLQDQITPFSTEVAFNMIEDELGLPIDELFSEISPEPVAAASLGQVYQARLRRSGKVVAVKVQRPGVRAAIALDTLILRYIAGLIKKAGRFNSDLEAVVDEWATSLFKEMDYLNEAQNGIKFRKLYGGIKDVLVPKMYTEYSTSKVLVMEWVEGQKLNEVNDLYLVEVGVYCSFNQLLEYGFYHADPHPGNFLRTYDGQLAYLDFGMMGDFRPELRDGFMEACLHLVNRDFKALAKDFVTLGLLPPTAEKSAVTKALTDVFQDAISRGVRNISFGDLLGDLGKTMYRFKFRIPPYFSLVIRSLAVLEGIAIGISPNYKVLGSTYPWIARKILTDSSPQLKSSLQNLLYEEGVFRIDRLESLLSESLRTETALVQKPVVGTESNIAMKQMLAFTFTEQGSFVREILLREFAKGLDAYGLATLDSFTFSGSGPSSSLTEEDMTNLRTFYRLISLFSGMQKAKSQVKAVSKYGEALTPLDEASLVMYQLPSAQEMLPILSILPELPQESQQRLLQLPGDLVGRLVTRAFARTIRRIFL

SEQ ID NO: 91235 - protein, 685 aa, Arabidopsis thaliana
  peptide (1)..(685): Ceres Seq. ID no. 12726909
  misc_feature (170)..(288): Pfam Name: ABC1 family Pfam Description: ABC1 family
  misc_feature (1)..(435): Homolog of NCBI NO: 25406121 NR Description: hypothetical protein F14O23.19 [imported] - thaliana >gi|7239508|gb|AAF43234.1|AC012654_18 EST gb|AI998820
  misc_feature (508)..(685): Homolog of NCBI NO: 25406121 NR Description: hypothetical protein F14O23.19 [imported] - thaliana >gi|7239508|gb|AAF43234.1|AC012654_18 EST gb|AI998820
  misc_feature (453)..(548): Homolog of NCBI NO: 25406121 NR Description: hypothetical protein F14O23.19 [imported] - thaliana >gi|7239508|gb|AAF43234.1|AC012654_18 EST gb|AI998820
  misc_feature (16)..(685): Homolog of NCBI NO: 38344898 NR Description: OSJNBb0079B02.1 [Oryza sativa (japonica
  misc_feature (258)..(685): Homolog of NCBI NO: 19698835 NR Description: unknown protein [Arabidopsis thaliana]
  misc_feature (71)..(576): Homolog of NCBI NO: 17232452 NR Description: hypothetical protein [Nostoc sp. PCC 7120]
  misc_feature (36)..(571): Homolog of NCBI NO: 23042448 NR Description: hypothetical protein [Trichodesmium erythraeum
  misc_feature (54)..(571): Homolog of NCBI NO: 22298493 NR Description: ORF_ID:tll0950~hypothetical protein
  misc_feature (16)..(570): Homolog of NCBI NO: 16331408 NR Description: ABC1-like [Synechocystis sp. PCC 6803]
  misc_feature (55)..(573): Homolog of NCBI NO: 33862270 NR Description: possible protein kinase:ABC1 family marinus subsp. pastoris str. CCMP1378] possible protein kinase:ABC1 family [Prochlorococcus marinus
MPIVSFPANPNLLINPQPSWPSRRGNSAVVVSAASRDVDSFTSKSGYLFSLSADEADSLSEYNFPRIDGMYKKKPLILLRRLAQIGTTFSYWFGLRLADEALERSDQMFKVRAAELRKLLVELGPAYVKIAQAVSSRPDLIPPIYLDELSLLQDQITPFSTEVAFNMIEDELGLPIDELFSEISPEPVAAASLGQVYQARLRRSGKVVAVKVQRPGVRAAIALDTLILRYIAGLIKKAGRFNSDLEAVVDEWATSLFKEMDYLNEAQNGIKFRKLYGGIKDVLVPKMYTEYSTSKVLVMEWVEGQKLNEVNDLYLVEVGVYCSFNQLLEYGFYHADPHPGNFLRTYDGQLAYLDFGMMGDFRPELRDGFMEACLHLVNRDFKALAKDFVTLGLLPPTAEKSAVTKALTDVFQDAISRGVRNISFGDLLGDLGKTMYRFKFRIPPYFSLVIRSLAVLEGIAIGISPNYKVLGSTYPWIARKILTDSSPQLKSSLQNLLYEEGVFRIDRLESLLSESLRTETALVQKPVVGTESNIAMKQMLAFTFTEQGSFVREILLREFAKGLDAYGLATLDSFTFSGSGPSSSLTEEDMTNLRTFYRLISLFSGMQKAKSQVKAVSKYGEALTPLDEASLVMYQLPSAQEMLPILSILPELPQESQQRLLQLPGDLVGRLVTRAFARTIRRIFL

SEQ ID NO: 91236 - protein, 616 aa, Arabidopsis thaliana
  peptide (1)..(616): Ceres Seq. ID no. 12726910
  misc_feature (101)..(219): Pfam Name: ABC1 family Pfam Description: ABC1 family
  misc_feature (1)..(366): Homolog of NCBI NO: 25406121 NR Description: hypothetical protein F14O23.19 [imported] - thaliana >gi|7239508|gb|AAF43234.1|AC012654_18 EST gb|AI998820
  misc_feature (439)..(616): Homolog of NCBI NO: 25406121 NR Description: hypothetical protein F14O23.19 [imported] - thaliana >gi|7239508|gb|AAF43234.1|AC012654_18 EST gb|AI998820
  misc_feature (384)..(479): Homolog of NCBI NO: 25406121 NR Description: hypothetical protein F14O23.19 [imported] - thaliana >gi|7239508|gb|AAF43234.1|AC012654_18 EST gb|AI998820
  misc_feature (1)..(616): Homolog of NCBI NO: 38344898 NR Description: OSJNBb0079B02.1 [Oryza sativa (japonica
  misc_feature (189)..(616): Homolog of NCBI NO: 19698835 NR Description: unknown protein [Arabidopsis thaliana]
  misc_feature (2)..(507): Homolog of NCBI NO: 17232452 NR Description: hypothetical protein [Nostoc sp. PCC 7120]
  misc_feature (1)..(502): Homolog of NCBI NO: 23042448 NR Description: hypothetical protein [Trichodesmium erythraeum
  misc_feature (1)..(502): Homolog of NCBI NO: 22298493 NR Description: ORF_ID:tll0950~hypothetical protein
  misc_feature (1)..(501): Homolog of NCBI NO: 16331408 NR Description: ABC1-like [Synechocystis sp. PCC 6803]
  misc_feature (1)..(504): Homolog of NCBI NO: 33862270 NR Description: possible protein kinase:ABC1 family marinus subsp. pastoris str. CCMP1378] possible protein kinase:ABC1 family [Prochlorococcus marinus
MYKKKPLILLRRLAQIGTTFSYWFGLRLADEALERSDQMFKVRAAELRKLLVELGPAYVKIAQAVSSRPDLIPPIYLDELSLLQDQITPFSTEVAFNMIEDELGLPIDELFSEISPEPVAAASLGQVYQARLRRSGKVVAVKVQRPGVRAAIALDTLILRYIAGLIKKAGRFNSDLEAVVDEWATSLFKEMDYLNEAQNGIKFRKLYGGIKDVLVPKMYTEYSTSKVLVMEWVEGQKLNEVNDLYLVEVGVYCSFNQLLEYGFYHADPHPGNFLRTYDGQLAYLDFGMMGDFRPELRDGFMEACLHLVNRDFKALAKDFVTLGLLPPTAEKSAVTKALTDVFQDAISRGVRNISFGDLLGDLGKTMYRFKFRIPPYFSLVIRSLAVLEGIAIGISPNYKVLGSTYPWIARKILTDSSPQLKSSLQNLLYEEGVFRIDRLESLLSESLRTETALVQKPVVGTESNIAMKQMLAFTFTEQGSFVREILLREFAKGLDAYGLATLDSFTFSGSGPSSSLTEEDMTNLRTFYRLISLFSGMQKAKSQVKAVSKYGEALTPLDEASLVMYQLPSAQEMLPILSILPELPQESQQRLLQLPGDLVGRLVTRAFARTIRRIFL

SEQ ID NO: 91237 - DNA, 2459 bp, Arabidopsis thaliana
  misc_feature (1)..(2459): Ceres Seq. ID no. 12726915
  misc_feature: MA Experiment ID: 20000185 Result: Up-regulated in Transcription
  misc_feature: MA Experiment 20000185 PARAMETER Experiment Name: At_Roots__P Parameter: Age (day) Value: 7 vs. 21
  misc_feature: MA Experiment 20000185 PARAMETER Experiment Name: At_Roots__P Parameter: Organism Value: A. thaliana
  misc_feature: MA Experiment 20000185 PARAMETER Experiment Name: At_Roots__P Parameter: Tissue Value: Roots vs. Whole Plant
  misc_feature: MA Experiment ID: 20000234 Result: Up-regulated in Transcription
  misc_feature: MA Experiment 20000234 PARAMETER Experiment Name: At_Siliques_P Parameter: Age (day) Value: 21
  misc_feature: MA Experiment 20000234 PARAMETER Experiment Name: At_Siliques_P Parameter: Organism Value: A. thaliana
  misc_feature: MA Experiment 20000234 PARAMETER Experiment Name: At_Siliques_P Parameter: Plant Line Value: WS
  misc_feature: MA Experiment 20000234 PARAMETER Experiment Name: At_Siliques_P Parameter: Tissue Value: Less Than 5mm Siliques vs. Whole Plant
  misc_feature: MA Experiment ID: 20000235 Result: Up-regulated in Transcription
  misc_feature: MA Experiment 20000235 PARAMETER Experiment Name: At_Siliques_P Parameter: Age (day) Value: 21
  misc_feature: MA Experiment 20000235 PARAMETER Experiment Name: At_Siliques_P Parameter: Organism Value: A. thaliana
  misc_feature: MA Experiment 20000235 PARAMETER Experiment Name: At_Siliques_P Parameter: Plant Line Value: WS
  misc_feature: MA Experiment 20000235 PARAMETER Experiment Name: At_Siliques_P Parameter: Tissue Value: 5-10mm Siliques vs. Whole Plant
  misc_feature: MA Experiment ID: 20000264 Result: Up-regulated in Transcription
  misc_feature: MA Experiment 20000264 PARAMETER Experiment Name: At_Open_Flower_P Parameter: Age (day) Value: 21
  misc_feature: MA Experiment 20000264 PARAMETER Experiment Name: At_Open_Flower_P Parameter: Plant Line Value: WS
  misc_feature: MA Experiment 20000264 PARAMETER Experiment Name: At_Open_Flower_P Parameter: Tissue Value: Open Flower vs. Whole Plant
  misc_feature: MA Experiment ID: 20000265 Result: Up-regulated in Transcription
  misc_feature: MA Experiment 20000265 PARAMETER Experiment Name: At_Open_Flower_P Parameter: Age (day) Value: 21
  misc_feature: MA Experiment 20000265 PARAMETER Experiment Name: At_Open_Flower_P Parameter: Plant Line Value: WS
  misc_feature: MA Experiment 20000265 PARAMETER Experiment Name: At_Open_Flower_P Parameter: Tissue Value: Closed Flower vs. Whole Plant
  misc_feature: MA Experiment ID: 20000286 Result: Up-regulated in Transcription
  misc_feature: MA Experiment 20000286 PARAMETER Experiment Name: At_Open_Flower_P Parameter: Age (day) Value: 21
  misc_feature: MA Experiment 20000286 PARAMETER Experiment Name: At_Open_Flower_P Parameter: Plant Line Value: WS
  misc_feature: MA Experiment 20000286 PARAMETER Experiment Name: At_Open_Flower_P Parameter: Tissue Value: Half Open vs. Whole Plant
  misc_feature: MA Experiment ID: 20000437 Result: Down-regulated in Transcription
  misc_feature: MA Experiment 20000437 PARAMETER Experiment Name: At_Drought_P Parameter: Age (day) Value: 8
  misc_feature: MA Experiment 20000437 PARAMETER Experiment Name: At_Drought_P Parameter: Organism Value: A. thaliana
  misc_feature: MA Experiment 20000437 PARAMETER Experiment Name: At_Drought_P Parameter: Plant Line Value: WS
  misc_feature: MA Experiment 20000437 PARAMETER Experiment Name: At_Drought_P Parameter: Timepoint (hr) Value: 24
  misc_feature: MA Experiment 20000437 PARAMETER Experiment Name: At_Drought_P Parameter: Tissue Value: Whole Plant
  misc_feature: MA Experiment 20000437 PARAMETER Experiment Name: At_Drought_P Parameter: Treatment Value: Drought vs. No Drought
  misc_feature: MA Experiment ID: 20000495 Result: Up-regulated in Transcription
  misc_feature: MA Experiment 20000495 PARAMETER Experiment Name: At_Guard_Cells_P Parameter: Harvest Date Value: 8/2/2002
  misc_feature: MA Experiment 20000495 PARAMETER Experiment Name: At_Guard_Cells_P Parameter: Organism Value: A. thaliana
  misc_feature: MA Experiment 20000495 PARAMETER Experiment Name: At_Guard_Cells_P Parameter: Tissue Value: Guard Cells vs. Leaves
  misc_feature: MA Experiment ID: 20000496 Result: Up-regulated in Transcription
  misc_feature: MA Experiment 20000496 PARAMETER Experiment Name: At_Guard_Cells_P Parameter: Harvest Date Value: 7/19/2002
  misc_feature: MA Experiment 20000496 PARAMETER Experiment Name: At_Guard_Cells_P Parameter: Organism Value: Canola
  misc_feature: MA Experiment 20000496 PARAMETER Experiment Name: At_Guard_Cells_P Parameter: Tissue Value: Guard Cells vs. Leaves
  misc_feature: MA Experiment ID: 20000794 Result: Up-regulated in Transcription
  misc_feature: MA Experiment 20000794 PARAMETER Experiment Name: At_Petals_P Parameter: Age (day) Value: 23-25 days
  misc_feature: MA Experiment 20000794 PARAMETER Experiment Name: At_Petals_P Parameter: Plant Line Value: WS
  misc_feature: MA Experiment 20000794 PARAMETER Experiment Name: At_Petals_P Parameter: Tissue Value: Petals vs. Whole plant
  misc_feature: MA Experiment ID: 20001451 Result: Up-regulated in Transcription
  misc_feature: MA Experiment 20001451 PARAMETER Experiment Name: At_Far-red-induction_P Parameter: Age (day) Value: 7
  misc_feature: MA Experiment 20001451 PARAMETER Experiment Name: At_Far-red-induction_P Parameter: Light Value: Far-red vs. White
  misc_feature: MA Experiment 20001451 PARAMETER Experiment Name: At_Far-red-induction_P Parameter: Organism Value: A. thaliana
  misc_feature: MA Experiment 20001451 PARAMETER Experiment Name: At_Far-red-induction_P Parameter: Plant Line Value: Columbia
  misc_feature: MA Experiment 20001451 PARAMETER Experiment Name: At_Far-red-induction_P Parameter: Timepoint (hr) Value: 24
  misc_feature: MA Experiment 20001451 PARAMETER Experiment Name: At_Far-red-induction_P Parameter: Tissue Value: Whole Plant
  misc_feature: MA Experiment ID: 20001757 Result: Down-regulated in Transcription
  misc_feature: MA Experiment 20001757 PARAMETER Experiment Name: At_50mM_NH4NO3_L-to-H_P Parameter: Timepoint (hr) Value: 6
  misc_feature: MA Experiment 20001757 PARAMETER Experiment Name: At_50mM_NH4NO3_L-to-H_P Parameter: Tissue Value: Leaf
  misc_feature: MA Experiment 20001757 PARAMETER Experiment Name: At_50mM_NH4NO3_L-to-H_P Parameter: Treatment Value: 50mM NH4NO3 vs 100mM Mannitol
  misc_feature: MA Experiment ID: 20001911 Result: Down-regulated in Transcription
  misc_feature: MA Experiment 20001911 PARAMETER Experiment Name: At_Drought_Reproduction_P Parameter: Age (day) Value: 40
  misc_feature: MA Experiment 20001911 PARAMETER Experiment Name: At_Drought_Reproduction_P Parameter: Organism Value: A. thaliana
  misc_feature: MA Experiment 20001911 PARAMETER Experiment Name: At_Drought_Reproduction_P Parameter: Plant Line Value: WS
  misc_feature: MA Experiment 20001911 PARAMETER Experiment Name: At_Drought_Reproduction_P Parameter: Timepoint (day) Value: 10
  misc_feature: MA Experiment 20001911 PARAMETER Experiment Name: At_Drought_Reproduction_P Parameter: Tissue Value: Flowers
  misc_feature: MA Experiment 20001911 PARAMETER Experiment Name: At_Drought_Reproduction_P Parameter: Treatment Value: Drought vs. No Drought
aacaacacactaatcatagtttctctggcaggcttgttgttgcggcttaataaaaagctcttttgttattattacttcacgtagattttccccaaaaagctcttatttttttgtttaaaaaaaaaagtttcatctttattcaacttttgttttacagtgtgtgtgtgagagagagagtgtggtttgattgaggaaagacgacgacgagaacgccggagaattaggattttgattttattttttactctttgtttgttttaatgctaatgggtttttaaaagggttatcgaaaaaatgagtgagtttgtgttgaggttgtctctgtaaagtgttaatggtggtgattttcggaagttagggttttctcggatctgaagagatcaaatcaagattcgaaatttagcattgttgtttgaaatggagtcgagttatgtggtgtttatcttactttcactgatcttacttccgaatcattcactgtggcttgcttctgctaatttggaaggtgatgctttgcatactttgagggttactctagttgatccaaacaatgtcttgcagagctgggatcctacgctagtgaatccttgcacatggttccatgtcacttgcaacaacgagaacagtgtcataagagttgatttggggaatgcagagttatctggccatttagttccagagcttggtgtgctcaagaatttgcagtatttggagctttacagtaacaacataactggcccgattcctagtaatcttggaaatctgacaaacttagtgagtttggatctttacttaaacagcttctccggtcctattccggaatcattgggaaagctttcaaagctgagatttctccggcttaacaacaacagtctcactgggtcaattcctatgtcactgaccaatattactacccttcaagtgttagatctatcaaataacagactctctggttcagttcctgacaatggctccttctcactcttcacacccatcagttttgctaataacttagacctatgtggacctgttacaagtcacccatgtcctggatctcccccgttttctcctccaccaccttttattcaacctcccccagtttccaccccgagtgggtatggtataactggagcaatagctggtggagttgctgcaggtgctgctttgctctttgctgctcctgcaatagcctttgcttggtggcgacgaagaaagccactagatattttcttcgatgtccctgccgaagaagatccagaagttcatctgggacagctcaagaggttttctttgcgggagctacaagtggcgagtgatgggtttagtaacaagaacattttgggcagaggtgggtttgggaaagtctacaagggacgcttggcagacggaactcttgttgctgtcaagagactgaaggaagagcgaactccaggtggagagctccagtttcaaacagaagtagagatgataagtatggcagttcatcgaaacctgttgagattacgaggtttctgtatgacaccgaccgagagattgcttgtgtatccttacatggccaatggaagtgttgcttcgtgtctcagagagaggccaccgtcacaacctccgcttgattggccaacgcggaagagaatcgcgctaggctcagctcgaggtttgtcttacctacatgatcactgcgatccgaagatcattcaccgtgacgtaaaagcagcaaacatcctcttagacgaagaattcgaagcggttgttggagatttcgggttggcaaagctaatggactataaagacactcacgtgacaacagcagtccgtggcaccatcggtcacatcgctccagaatatctctcaaccggaaaatcttcagagaaaaccgacgttttcggatacggaatcatgcttctagaactaatcacaggacaaagagctttcgatctcgctcggctagctaacgacgacgacgtcatgttacttgactgggtgaaaggattgttgaaggagaagaagctagagatgttagtggatccagatcttcaaacaaactacgaggagagagaactggaacaagtgatacaagtggcgttgctatgcacgcaaggatcaccaatggaaagaccaaagatgtctgaagttgtaaggatgctggaaggagatgggcttgcggagaaatgggacgaatggcaaaaagttgagattttgagggaagagattgatttgagtcctaatcctaactctgattggattcttgattctacttacaatttgcacgccgttgagttatctggtccaaggtaaaaaaaaaaaacataaaattattgaacaataacaaattttacaaggtaggtagtttttttacccgtaagttttcgttttttttaattgttaatgtaaaatgaaatctagcattcaaagatttgtgattttgtgctatggttcgattaaaagggaaaaaaattgta

SEQ ID NO: 91238 - protein, 625 aa, Arabidopsis thaliana
  peptide (1)..(625): Ceres Seq. ID no. 12726916
  misc_feature (10)..(625): Homolog of NCBI NO: 15218543 NR Description: somatic embryogenesis receptor-like kinase, protein id: At1g34210.1, supported by cDNA: gi_14573456
  misc_feature (10)..(625): Homolog of NCBI NO: 14573457 NR Description: somatic embryogenesis receptor-like kinase 2
  misc_feature (6)..(625): Homolog of NCBI NO: 24935324 NR Description: somatic embryogenesis receptor kinase 1 [Medicago >gi|24935326|gb|AAN64294.1| somatic embryogenesis receptor kinase
  misc_feature (5)..(625): Homolog of NCBI NO: 13897310 NR Description: SERK2 protein [Zea mays]
  misc_feature (5)..(625): Homolog of NCBI NO: 13897320 NR Description: somatic embryogenesis receptor-like kinase 2 [Zea
  misc_feature (26)..(625): Homolog of NCBI NO: 13897308 NR Description: SERK1 protein [Zea mays]
  misc_feature (98)..(625): Homolog of NCBI NO: 25406123 NR Description: hypothetical protein F14O23.21 [imported] - thaliana >gi|7239510|gb|AAF43236.1|AC012654_20 Contains
  misc_feature (1)..(625): Homolog of NCBI NO: 14573459 NR Description: somatic embryogenesis receptor-like kinase 3
  misc_feature (1)..(625): Homolog of NCBI NO: 15237242 NR Description: receptor protein kinase-like protein; protein id:
  misc_feature (7)..(585): Homolog of NCBI NO: 22329033 NR Description: receptor-like kinase homolog; protein id: supported by cDNA: gi_17979064, supported by cDNA: gi_20465456 thaliana] >gi|17979065|gb|AAL49800.1| putative receptor kinase
MESSYVVFILLSLILLPNHSLWLASANLEGDALHTLRVTLVDPNNVLQSWDPTLVNPCTWFHVTCNNENSVIRVDLGNAELSGHLVPELGVLKNLQYLELYSNNITGPIPSNLGNLTNLVSLDLYLNSFSGPIPESLGKLSKLRFLRLNNNSLTGSIPMSLTNITTLQVLDLSNNRLSGSVPDNGSFSLFTPISFANNLDLCGPVTSHPCPGSPPFSPPPPFIQPPPVSTPSGYGITGAIAGGVAAGAALLFAAPAIAFAWWRRRKPLDIFFDVPAEEDPEVHLGQLKRFSLRELQVASDGFSNKNILGRGGFGKVYKGRLADGTLVAVKRLKEERTPGGELQFQTEVEMISMAVHRNLLRLRGFCMTPTERLLVYPYMANGSVASCLRERPPSQPPLDWPTRKRIALGSARGLSYLHDHCDPKIIHRDVKAANILLDEEFEAVVGDFGLAKLMDYKDTHVTTAVRGTIGHIAPEYLSTGKSSEKTDVFGYGIMLLELITGQRAFDLARLANDDDVMLLDWVKGLLKEKKLEMLVDPDLQTNYEERELEQVIQVALLCTQGSPMERPKMSEVVRMLEGDGLAEKWDEWQKVEILREEIDLSPNPNSDWILDSTYNLHAVELSGPR

SEQ ID NO: 91239 - protein, 467 aa, Arabidopsis thaliana
  peptide (1)..(467): Ceres Seq. ID no. 12726917
  misc_feature (1)..(467): Homolog of NCBI NO: 15218543 NR Description: somatic embryogenesis receptor-like kinase, protein id: At1g34210.1, supported by cDNA: gi_14573456
  misc_feature (1)..(467): Homolog of NCBI NO: 14573457 NR Description: somatic embryogenesis receptor-like kinase 2
  misc_feature (1)..(467): Homolog of NCBI NO: 24935324 NR Description: somatic embryogenesis receptor kinase 1 [Medicago >gi|24935326|gb|AAN64294.1| somatic embryogenesis receptor kinase
  misc_feature (1)..(467): Homolog of NCBI NO: 13897310 NR Description: SERK2 protein [Zea mays]
  misc_feature (1)..(467): Homolog of NCBI NO: 13897320 NR Description: somatic embryogenesis receptor-like kinase 2 [Zea
  misc_feature (1)..(467): Homolog of NCBI NO: 13897308 NR Description: SERK1 protein [Zea mays]
  misc_feature (1)..(467): Homolog of NCBI NO: 25406123 NR Description: hypothetical protein F14O23.21 [imported] - thaliana >gi|7239510|gb|AAF43236.1|AC012654_20 Contains
  misc_feature (1)..(467): Homolog of NCBI NO: 14573459 NR Description: somatic embryogenesis receptor-like kinase 3
  misc_feature (1)..(467): Homolog of NCBI NO: 15237242 NR Description: receptor protein kinase-like protein; protein id:
  misc_feature (1)..(427): Homolog of NCBI NO: 22329033 NR Description: receptor-like kinase homolog; protein id: supported by cDNA: gi_17979064, supported by cDNA: gi_20465456 thaliana] >gi|17979065|gb|AAL49800.1| putative receptor kinase
MSLTNITTLQVLDLSNNRLSGSVPDNGSFSLFTPISFANNLDLCGPVTSHPCPGSPPFSPPPPFIQPPPVSTPSGYGITGAIAGGVAAGAALLFAAPAIAFAWWRRRKPLDIFFDVPAEEDPEVHLGQLKRFSLRELQVASDGFSNKNILGRGGFGKVYKGRLADGTLVAVKRLKEERTPGGELQFQTEVEMISMAVHRNLLRLRGFCMTPTERLLVYPYMANGSVASCLRERPPSQPPLDWPTRKRIALGSARGLSYLHDHCDPKIIHRDVKAANILLDEEFEAVVGDFGLAKLMDYKDTHVTTAVRGTIGHIAPEYLSTGKSSEKTDVFGYGIMLLELITGQRAFDLARLANDDDVMLLDWVKGLLKEKKLEMLVDPDLQTNYEERELEQVIQVALLCTQGSPMERPKMSEVVRMLEGDGLAEKWDEWQKVEILREEIDLSPNPNSDWILDSTYNLHAVELSGPR

SEQ ID NO: 91240 - DNA, 1413 bp, Arabidopsis thaliana
  misc_feature (1)..(1413): Ceres Seq. ID no. 12726922
  misc_feature: MA Experiment ID: 20000180 Result: Down-regulated in Transcription
  misc_feature: MA Experiment 20000180 PARAMETER Experiment Name: At_Germinating_Seeds_P Parameter: Age (hr) Value: 24 vs. 0
  misc_feature: MA Experiment 20000180 PARAMETER Experiment Name: At_Germinating_Seeds_P Parameter: Tissue Value: Germinating Seeds
  misc_feature: MA Experiment ID: 20000227 Result: Up-regulated in Transcription
  misc_feature: MA Experiment 20000227 PARAMETER Experiment Name: At_Root-Tips-vs-Tops_P Parameter: Tissue Value: Root Tips vs. Root Tops
  misc_feature: MA Experiment ID: 20000437 Result: Down-regulated in Transcription
  misc_feature: MA Experiment 20000437 PARAMETER Experiment Name: At_Drought_P Parameter: Age (day) Value: 8
  misc_feature: MA Experiment 20000437 PARAMETER Experiment Name: At_Drought_P Parameter: Organism Value: A. thaliana
  misc_feature: MA Experiment 20000437 PARAMETER Experiment Name: At_Drought_P Parameter: Plant Line Value: WS
  misc_feature: MA Experiment 20000437 PARAMETER Experiment Name: At_Drought_P Parameter: Timepoint (hr) Value: 24
  misc_feature: MA Experiment 20000437 PARAMETER Experiment Name: At_Drought_P Parameter: Tissue Value: Whole Plant
  misc_feature: MA Experiment 20000437 PARAMETER Experiment Name: At_Drought_P Parameter: Treatment Value: Drought vs. No Drought
  misc_feature: MA Experiment ID: 20001247 Result: Down-regulated in Transcription
  misc_feature: MA Experiment 20001247 PARAMETER Experiment Name: At_Far-red-induction_P Parameter: Age (day) Value: 7
  misc_feature: MA Experiment 20001247 PARAMETER Experiment Name: At_Far-red-induction_P Parameter: Light Value: Far-red vs. White
  misc_feature: MA Experiment 20001247 PARAMETER Experiment Name: At_Far-red-induction_P Parameter: Organism Value: A. thaliana
  misc_feature: MA Experiment 20001247 PARAMETER Experiment Name: At_Far-red-induction_P Parameter: Plant Line Value: Columbia
  misc_feature: MA Experiment 20001247 PARAMETER Experiment Name: At_Far-red-induction_P Parameter: Timepoint (hr) Value: 1
  misc_feature: MA Experiment 20001247 PARAMETER Experiment Name: At_Far-red-induction_P Parameter: Tissue Value: Whole Plant
  misc_feature: MA Experiment ID: 20001451 Result: Down-regulated in Transcription
  misc_feature: MA Experiment 20001451 PARAMETER Experiment Name: At_Far-red-induction_P Parameter: Age (day) Value: 7
  misc_feature: MA Experiment 20001451 PARAMETER Experiment Name: At_Far-red-induction_P Parameter: Light Value: Far-red vs. White
  misc_feature: MA Experiment 20001451 PARAMETER Experiment Name: At_Far-red-induction_P Parameter: Organism Value: A. thaliana
  misc_feature: MA Experiment 20001451 PARAMETER Experiment Name: At_Far-red-induction_P Parameter: Plant Line Value: Columbia
  misc_feature: MA Experiment 20001451 PARAMETER Experiment Name: At_Far-red-induction_P Parameter: Timepoint (hr) Value: 24
  misc_feature: MA Experiment 20001451 PARAMETER Experiment Name: At_Far-red-induction_P Parameter: Tissue Value: Whole Plant
  misc_feature: MA Experiment ID: 20001557 Result: Up-regulated in Transcription
  misc_feature: MA Experiment 20001557 PARAMETER Experiment Name: At_Drought_Soil_Dry_P Parameter: Age (day) Value: 27
  misc_feature: MA Experiment 20001557 PARAMETER Experiment Name: At_Drought_Soil_Dry_P Parameter: Organism Value: A. thaliana
  misc_feature: MA Experiment 20001557 PARAMETER Experiment Name: At_Drought_Soil_Dry_P Parameter: Plant Line Value: WS
  misc_feature: MA Experiment 20001557 PARAMETER Experiment Name: At_Drought_Soil_Dry_P Parameter: Post Timepoint (hr) Value: 3
  misc_feature: MA Experiment 20001557 PARAMETER Experiment Name: At_Drought_Soil_Dry_P Parameter: Post-Treatment Value: Re-Water vs. No Drought
  misc_feature: MA Experiment 20001557 PARAMETER Experiment Name: At_Drought_Soil_Dry_P Parameter: Timepoint (day) Value: 13
  misc_feature: MA Experiment 20001557 PARAMETER Experiment Name: At_Drought_Soil_Dry_P Parameter: Treatment Value: Drought vs. No Drought
  misc_feature: MA Experiment ID: 20001558 Result: Up-regulated in Transcription
  misc_feature: MA Experiment 20001558 PARAMETER Experiment Name: At_Drought_Soil_Dry_P Parameter: Age (day) Value: 27
  misc_feature: MA Experiment 20001558 PARAMETER Experiment Name: At_Drought_Soil_Dry_P Parameter: Organism Value: A. thaliana
  misc_feature: MA Experiment 20001558 PARAMETER Experiment Name: At_Drought_Soil_Dry_P Parameter: Plant Line Value: WS
  misc_feature: MA Experiment 20001558 PARAMETER Experiment Name: At_Drought_Soil_Dry_P Parameter: Post Timepoint (hr) Value: 6
  misc_feature: MA Experiment 20001558 PARAMETER Experiment Name: At_Drought_Soil_Dry_P Parameter: Post-Treatment Value: Re-Water vs. No Drought
  misc_feature: MA Experiment 20001558 PARAMETER Experiment Name: At_Drought_Soil_Dry_P Parameter: Timepoint (day) Value: 13
  misc_feature: MA Experiment 20001558 PARAMETER Experiment Name: At_Drought_Soil_Dry_P Parameter: Treatment Value: Drought vs. No Drought
  misc_feature: MA Experiment ID: 20001757 Result: Up-regulated in Transcription
  misc_feature: MA Experiment 20001757 PARAMETER Experiment Name: At_50mM_NH4NO3_L-to-H_P Parameter: Timepoint (hr) Value: 6
  misc_feature: MA Experiment 20001757 PARAMETER Experiment Name: At_50mM_NH4NO3_L-to-H_P Parameter: Tissue Value: Leaf
  misc_feature: MA Experiment 20001757 PARAMETER Experiment Name: At_50mM_NH4NO3_L-to-H_P Parameter: Treatment Value: 50mM NH4NO3 vs 100mM Mannitol
atgaaatccattttccgttccatttctatccgccgtcattccggccaccgaaccttcgccgatacgtcggcggtggaagatacctacaaattcgtaagagacagaggactcgaccacgcggtagaaagagagaagaatctcagaccacttctcagtatcaaagacctaatcagatcggagccagcaaaatcagttccgatctcagttatcacctcacagaaagattcactacgagttcctcttcgtccaatcgagttcatacgtagcttcccttccgttttccaagagtttctccccggaggaattggtattcatcctcacatcagcctcacgccggagattctaaaccacgatgccgatgagcaattggtttacggtagtgagacttataagcaaggattagctgataggcttttgaaattgctgatgattaataggattaacaaaattccattagagattctagatttgttgaaatgggatttaggtttacctaaggattatgttgaaactatggtacctgagtttcctgattactttagagttatcaaatcgaagttaagaggatgtagtggtgagctagagctggtttgttggagcaatgagcatgctgtatctgtgttggagaagaaagctagaacattacgtaaaggagagtatacgaaaggatcggcgattgcttttccgatgaagttttcgaatggttttgtggttgataagaagatgaagaaatggattgatgattggcagaagttgccgtatatttctccttatgagaatgcacttcatctgtctgcgactagcgatgagtctgataagtgggcggcggctgttttgcacgagatcatgaacctttttgtgtcgaagaaggttgagaaagatgctattttgcatcttggtgagtttatgggattgagatcgaggtttaagagagttctccataatcatcctggtatcttttacttgtctagtaagcttaggactcacactgtggttcttagagatggttacaagagggggatgttgatagagagtaatgaattggtgacaagcaggaaccgttacatgaaactcatgaatacagttaagaaagataacaaggcagtttcttcgagcagcaagaaagaagataaggggaaagtggaaggggaagtttgtgatactgatgcgaaggctgagaatgatgacatttctggttctgatgtcgaggatgatcgtcaaggagactttgttgatgatgacgaggacgatgatgaagtggatcaaaaccaggatctggagcgtggtcgtagaaattcaagtccaagatctggtaggaggagttttggaaactcaggttcaagagataaggcacaatcgaggcggagcaagatcagtttaaagactgagaagaagaggagtcggatgtattag

SEQ ID NO: 91241 - protein, 470 aa, Arabidopsis thaliana
  peptide (1)..(470): Ceres Seq. ID no. 12726923
  misc_feature (31)..(368): Pfam Name: Plant specific of unknown function (DUF860) Pfam Description: Plant specific of unknown function (DUF860)
  misc_feature (1)..(470): Homolog of NCBI NO: 15217597 NR Description: hypothetical protein; protein id: At1g71850.1
  misc_feature (1)..(470): Homolog of NCBI NO: 3413424 NR Description: hypothetical protein [Arabidopsis thaliana]
  misc_feature (30)..(385): Homolog of NCBI NO: 15233788 NR Description: putative protein; protein id: At4g24320.1
  misc_feature (2)..(409): Homolog of NCBI NO: 18410975 NR Description: putative protein; protein id: At3g58520.1, by cDNA: 112338., supported by cDNA: gi_15810015 [Arabidopsis >gi|15810016|gb|AAL06935.1| AT3g58520/F14P22_110 [Arabidopsis
  misc_feature (30)..(409): Homolog of NCBI NO: 11282335 NR Description: hypothetical protein F14P22.110 - Arabidopsis >gi|6735369|emb|CAB68190.1| putative protein [Arabidopsis
  misc_feature (30)..(409): Homolog of NCBI NO: 21536812 NR Description: unknown [Arabidopsis thaliana]
  misc_feature (30)..(401): Homolog of NCBI NO: 15238875 NR Description: putative protein; protein id: At5g48040.1 thaliana] >gi|10177755|dbj|BAB11068.1|
  misc_feature (8)..(389): Homolog of NCBI NO: 15225035 NR Description: hypothetical protein; protein id: At2g39120.1
  misc_feature (33)..(426): Homolog of NCBI NO: 34894384 NR Description: unnamed protein product [Oryza sativa (japonica group)] >gi|8468041|dbj|BAA96641.1| unnamed protein product
  misc_feature (33)..(415): Homolog of NCBI NO: 15224649 NR Description: hypothetical protein; protein id: At2g31290.1, by cDNA: gi_18377711, supported by cDNA: gi_20465406 [Arabidopsis >gi|25352258|pir||H84718 hypothetical protein At2g31290
MKSIFRSISIRRHSGHRTFADTSAVEDTYKFVRDRGLDHAVEREKNLRPLLSIKDLIRSEPAKSVPISVITSQKDSLRVPLRPIEFIRSFPSVFQEFLPGGIGIHPHISLTPEILNHDADEQLVYGSETYKQGLADRLLKLLMINRINKIPLEILDLLKWDLGLPKDYVETMVPEFPDYFRVIKSKLRGCSGELELVCWSNEHAVSVLEKKARTLRKGEYTKGSAIAFPMKFSNGFVVDKKMKKWIDDWQKLPYISPYENALHLSATSDESDKWAAAVLHEIMNLFVSKKVEKDAILHLGEFMGLRSRFKRVLHNHPGIFYLSSKLRTHTVVLRDGYKRGMLIESNELVTSRNRYMKLMNTVKKDNKAVSSSSKKEDKGKVEGEVCDTDAKAENDDISGSDVEDDRQGDFVDDDEDDDEVDQNQDLERGRRNSSPRSGRRSFGNSGSRDKAQSRRSKISLKTEKKRSRMY

SEQ ID NO: 91242 - protein, 328 aa, Arabidopsis thaliana
  peptide (1)..(328): Ceres Seq. ID no. 12726924
  misc_feature (1)..(226): Pfam Name: Plant specific of unknown function (DUF860) Pfam Description: Plant specific of unknown function (DUF860)
  misc_feature (1)..(328): Homolog of NCBI NO: 15217597 NR Description: hypothetical protein; protein id: At1g71850.1
  misc_feature (1)..(328): Homolog of NCBI NO: 3413424 NR Description: hypothetical protein [Arabidopsis thaliana]
  misc_feature (1)..(243): Homolog of NCBI NO: 15233788 NR Description: putative protein; protein id: At4g24320.1
  misc_feature (1)..(267): Homolog of NCBI NO: 18410975 NR Description: putative protein; protein id: At3g58520.1, by cDNA: 112338., supported by cDNA: gi_15810015 [Arabidopsis >gi|15810016|gb|AAL06935.1| AT3g58520/F14P22_110 [Arabidopsis
  misc_feature (1)..(267): Homolog of NCBI NO: 11282335 NR Description: hypothetical protein F14P22.110 - Arabidopsis >gi|6735369|emb|CAB68190.1| putative protein [Arabidopsis
  misc_feature (1)..(267): Homolog of NCBI NO: 21536812 NR Description: unknown [Arabidopsis thaliana]
  misc_feature (1)..(259): Homolog of NCBI NO: 15238875 NR Description: putative protein; protein id: At5g48040.1 thaliana] >gi|10177755|dbj|BAB11068.1|
  misc_feature (1)..(247): Homolog of NCBI NO: 15225035 NR Description: hypothetical protein; protein id: At2g39120.1
  misc_feature (1)..(284): Homolog of NCBI NO: 34894384 NR Description: unnamed protein product [Oryza sativa (japonica group)] >gi|8468041|dbj|BAA96641.1| unnamed protein product
  misc_feature (1)..(273): Homolog of NCBI NO: 15224649 NR Description: hypothetical protein; protein id: At2g31290.1, by cDNA: gi_18377711, supported by cDNA: gi_20465406 [Arabidopsis >gi|25352258|pir||H84718 hypothetical protein At2g31290
MINRINKIPLEILDLLKWDLGLPKDYVETMVPEFPDYFRVIKSKLRGCSGELELVCWSNEHAVSVLEKKARTLRKGEYTKGSAIAFPMKFSNGFVVDKKMKKWIDDWQKLPYISPYENALHLSATSDESDKWAAAVLHEIMNLFVSKKVEKDAILHLGEFMGLRSRFKRVLHNHPGIFYLSSKLRTHTVVLRDGYKRGMLIESNELVTSRNRYMKLMNTVKKDNKAVSSSSKKEDKGKVEGEVCDTDAKAENDDISGSDVEDDRQGDFVDDDEDDDEVDQNQDLERGRRNSSPRSGRRSFGNSGSRDKAQSRRSKISLKTEKKRSRMY

SEQ ID NO: 91243 - protein, 299 aa, Arabidopsis thaliana
  peptide (1)..(299): Ceres Seq. ID no. 12726925
  misc_feature (1)..(197): Pfam Name: Plant specific of unknown function (DUF860) Pfam Description: Plant specific of unknown function (DUF860)
  misc_feature (1)..(299): Homolog of NCBI NO: 15217597 NR Description: hypothetical protein; protein id: At1g71850.1
  misc_feature (1)..(299): Homolog of NCBI NO: 3413424 NR Description: hypothetical protein [Arabidopsis thaliana]
  misc_feature (1)..(214): Homolog of NCBI NO: 15233788 NR Description: putative protein; protein id: At4g24320.1
  misc_feature (1)..(238): Homolog of NCBI NO: 18410975 NR Description: putative protein; protein id: At3g58520.1, by cDNA: 112338., supported by cDNA: gi_15810015 [Arabidopsis >gi|15810016|gb|AAL06935.1| AT3g58520/F14P22_110 [Arabidopsis
  misc_feature (1)..(238): Homolog of NCBI NO: 11282335 NR Description: hypothetical protein F14P22.110 - Arabidopsis >gi|6735369|emb|CAB68190.1| putative protein [Arabidopsis
  misc_feature (1)..(238): Homolog of NCBI NO: 21536812 NR Description: unknown [Arabidopsis thaliana]
  misc_feature (1)..(230): Homolog of NCBI NO: 15238875 NR Description: putative protein; protein id: At5g48040.1 thaliana] >gi|10177755|dbj|BAB11068.1|
  misc_feature (1)..(218): Homolog of NCBI NO: 15225035 NR Description: hypothetical protein; protein id: At2g39120.1
  misc_feature (1)..(255): Homolog of NCBI NO: 34894384 NR Description: unnamed protein product [Oryza sativa (japonica group)] >gi|8468041|dbj|BAA96641.1| unnamed protein product
  misc_feature (1)..(244): Homolog of NCBI NO: 15224649 NR Description: hypothetical protein; protein id: At2g31290.1, by cDNA: gi_18377711, supported by cDNA: gi_20465406 [Arabidopsis >gi|25352258|pir||H84718 hypothetical protein At2g31290
MVPEFPDYFRVIKSKLRGCSGELELVCWSNEHAVSVLEKKARTLRKGEYTKGSAIAFPMKFSNGFVVDKKMKKWIDDWQKLPYISPYENALHLSATSDESDKWAAAVLHEIMNLFVSKKVEKDAILHLGEFMGLRSRFKRVLHNHPGIFYLSSKLRTHTVVLRDGYKRGMLIESNELVTSRNRYMKLMNTVKKDNKAVSSSSKKEDKGKVEGEVCDTDAKAENDDISGSDVEDDRQGDFVDDDEDDDEVDQNQDLERGRRNSSPRSGRRSFGNSGSRDKAQSRRSKISLKTEKKRSRMY

SEQ ID NO: 91244 - DNA, 1489 bp, Arabidopsis thaliana
  misc_feature (1)..(1489): Ceres Seq. ID no. 12726940
  misc_feature: MA Experiment ID: 20000171 Result: Down-regulated in Transcription
  misc_feature: MA Experiment 20000171 PARAMETER Experiment Name: At_42deg_Heat_P Parameter: Age (day) Value: 14
  misc_feature: MA Experiment 20000171 PARAMETER Experiment Name: At_42deg_Heat_P Parameter: Organism Value: A. thaliana
  misc_feature: MA Experiment 20000171 PARAMETER Experiment Name: At_42deg_Heat_P Parameter: Plant Line Value: WS
  misc_feature: MA Experiment 20000171 PARAMETER Experiment Name: At_42deg_Heat_P Parameter: Temperature (deg C) Value: 42 vs. 22
  misc_feature: MA Experiment 20000171 PARAMETER Experiment Name: At_42deg_Heat_P Parameter: Timepoint (hr) Value: 1
  misc_feature: MA Experiment 20000171 PARAMETER Experiment Name: At_42deg_Heat_P Parameter: Tissue Value: Aerial
  misc_feature: MA Experiment ID: 20000185 Result: Down-regulated in Transcription
  misc_feature: MA Experiment 20000185 PARAMETER Experiment Name: At_Roots__P Parameter: Age (day) Value: 7 vs. 21
  misc_feature: MA Experiment 20000185 PARAMETER Experiment Name: At_Roots__P Parameter: Organism Value: A. thaliana
  misc_feature: MA Experiment 20000185 PARAMETER Experiment Name: At_Roots__P Parameter: Tissue Value: Roots vs. Whole Plant
  misc_feature: MA Experiment ID: 20000227 Result: Down-regulated in Transcription
  misc_feature: MA Experiment 20000227 PARAMETER Experiment Name: At_Root-Tips-vs-Tops_P Parameter: Tissue Value: Root Tips vs. Root Tops
  misc_feature: MA Experiment ID: 20000234 Result: Down-regulated in Transcription
  misc_feature: MA Experiment 20000234 PARAMETER Experiment Name: At_Siliques_P Parameter: Age (day) Value: 21
  misc_feature: MA Experiment 20000234 PARAMETER Experiment Name: At_Siliques_P Parameter: Organism Value: A. thaliana
  misc_feature: MA Experiment 20000234 PARAMETER Experiment Name: At_Siliques_P Parameter: Plant Line Value: WS
  misc_feature: MA Experiment 20000234 PARAMETER Experiment Name: At_Siliques_P Parameter: Tissue Value: Less Than 5mm Siliques vs. Whole Plant
  misc_feature: MA Experiment ID: 20000264 Result: Down-regulated in Transcription
  misc_feature: MA Experiment 20000264 PARAMETER Experiment Name: At_Open_Flower_P Parameter: Age (day) Value: 21
  misc_feature: MA Experiment 20000264 PARAMETER Experiment Name: At_Open_Flower_P Parameter: Plant Line Value: WS
  misc_feature: MA Experiment 20000264 PARAMETER Experiment Name: At_Open_Flower_P Parameter: Tissue Value: Open Flower vs. Whole Plant
  misc_feature: MA Experiment ID: 20000265 Result: Down-regulated in Transcription
  misc_feature: MA Experiment 20000265 PARAMETER Experiment Name: At_Open_Flower_P Parameter: Age (day) Value: 21
  misc_feature: MA Experiment 20000265 PARAMETER Experiment Name: At_Open_Flower_P Parameter: Plant Line Value: WS
  misc_feature: MA Experiment 20000265 PARAMETER Experiment Name: At_Open_Flower_P Parameter: Tissue Value: Closed Flower vs. Whole Plant
  misc_feature: MA Experiment ID: 20000286 Result: Down-regulated in Transcription
  misc_feature: MA Experiment 20000286 PARAMETER Experiment Name: At_Open_Flower_P Parameter: Age (day) Value: 21
  misc_feature: MA Experiment 20000286 PARAMETER Experiment Name: At_Open_Flower_P Parameter: Plant Line Value: WS
  misc_feature: MA Experiment 20000286 PARAMETER Experiment Name: At_Open_Flower_P Parameter: Tissue Value: Half Open vs. Whole Plant
  misc_feature: MA Experiment ID: 20001905 Result: Down-regulated in Transcription
  misc_feature: MA Experiment 20001905 PARAMETER Experiment Name: At_Drought_Reproduction_P Parameter: Age (day) Value: 40
  misc_feature: MA Experiment 20001905 PARAMETER Experiment Name: At_Drought_Reproduction_P Parameter: Organism Value: A. thaliana
  misc_feature: MA Experiment 20001905 PARAMETER Experiment Name: At_Drought_Reproduction_P Parameter: Plant Line Value: WS
  misc_feature: MA Experiment 20001905 PARAMETER Experiment Name: At_Drought_Reproduction_P Parameter: Timepoint (day) Value: 10
  misc_feature: MA Experiment 20001905 PARAMETER Experiment Name: At_Drought_Reproduction_P Parameter: Tissue Value: Rosettes
  misc_feature: MA Experiment 20001905 PARAMETER Experiment Name: At_Drought_Reproduction_P Parameter: Treatment Value: Drought vs. No Drought
atagtttcttcctgcaatcacaccattcatatccacttgtttttatccttctcaatcattctctcttctctctccctctctgttctcaaactccattttagtagcaagcttagatctcctccttccacagtcactttctcttctttctctgcttttgtttcttcaatcgatttgcttcagatttccccagattatatagaattcgatgtcaagacacagaattcacatgggttttgtctaaaaatcataaaaatcatatctttttacggatttgaagatgaatcagaattcctctgttgcggaggcgacgcttcagcttaattccggtgaaaaaccatcgccgggatcgattccgtttatctcctctggtcaacacggaaacataagcacttcagcgacgagttcgacaagcacaagctcaggtagtgctcttgccgtagttaaatccgccgtgaaaaaaccaactaaagatcggcatactaaagtcgatggtcgtggacggcgaattcgtatgccggcgatgtgcgccgctagagtttttcagttaacaagagagttaggtcataaatctgatggagaaaccatcgagtggcttctccaacaagctgagccagctatcatcgcttctactggtactggtacgatcccggcgaatttctcaacacttaacgcttctttacgcagtggtggtggctccaccttgttttctcaggcgtcgaaatcttcttcttcgccactctcgtttcatagcactggaatgtctctttatgaagacaataacggtactaacggatcatcggtagatccttctaggaagttactgaattcagccgcaaacgcggctgttttcggttttcatcatcagatgtatccaccaataatgtcgacggagagaaatccgaacactttagtgaaaccttatagagaagattactttaaggagccgagttctgcagcggaaccaagcgagagttctcagaaagcgagtcagtttcaggagcaagagttagctcagggtcgtgggacggctaatgtggtgcctcaacctatgtgggcggttgcgccagggactacgaatggaggtagtgcgttctggatgcttccgatgagcggttcgggtgggcgggagcagatgcagcagcagcctggtcaccaaatgtgggcgtttaatccagggaattatccagttgggacaggacgagtagtaactgcaccaatggggtcaatgatgttgggaggtcaacagctaggattaggagtggcagagggcaacatggcggctgcaatgcgtggcagtagaggcgatggtttggccatgactctagatcaacatcagcatcagctccaacatcaagagccaaaccagagtcaagctagtgaaaatggtggtgatgacaaaaagtgatcaatccttttctctagttccacctcatgacattgtaatgaccacactcgagtttgaagattcgcaatctgcggtttggctatt

SEQ ID NO: 91245 - protein, 375 aa, Arabidopsis thaliana
  peptide (1)..(375): Ceres Seq. ID no. 12726941
  misc_feature (44)..(253): Pfam Name: TCP family transcription factor Pfam Description: TCP family transcription factor
  misc_feature (1)..(375): Homolog of NCBI NO: 15218305 NR Description: unknown protein; protein id: At1g72010.1, by cDNA: gi_19423971 [Arabidopsis thaliana]
  misc_feature (1)..(347): Homolog of NCBI NO: 15217857 NR Description: auxin-induced basic helix-loop-helix factor, putative; protein id: At1g58100.1, supported by cDNA:
  misc_feature (10)..(371): Homolog of NCBI NO: 20975251 NR Description: transcription factor PCF3 [Oryza sativa (japonica
  misc_feature (15)..(264): Homolog of NCBI NO: 15219640 NR Description: DNA binding protein, putative; protein id: supported by cDNA: gi_15912302, supported by cDNA: gi_19548006
  misc_feature (29)..(372): Homolog of NCBI NO: 11357581 NR Description: hypothetical protein F1P2.170 - Arabidopsis >gi|6522545|emb|CAB61988.1| putative protein [Arabidopsis
  misc_feature (29)..(372): Homolog of NCBI NO: 22331641 NR Description: putative protein; protein id: At3g47620.1, by cDNA: gi_16604510 [Arabidopsis thaliana] AT3g47620/F1P2_170 [Arabidopsis thaliana]
  misc_feature (146)..(364): Homolog of NCBI NO: 15219640 NR Description: DNA binding protein, putative; protein id: supported by cDNA: gi_15912302, supported by cDNA: gi_19548006
  misc_feature (39)..(197): Homolog of NCBI NO: 18409345 NR Description: expressed protein; protein id: At1g69690.1, by cDNA: gi_15912212, supported by cDNA: gi_19547990 [Arabidopsis
  misc_feature (21)..(237): Homolog of NCBI NO: 5731257 NR Description: auxin-induced basic helix-loop-helix
  misc_feature (28)..(175): Homolog of NCBI NO: 15237274 NR Description: unknown protein; protein id: At5g23280.1 thaliana] >gi|10177817|dbj|BAB11183.1| gene_id:MKD15.14~unknown
MNQNSSVAEATLQLNSGEKPSPGSIPFISSGQHGNISTSATSSTSTSSGSALAVVKSAVKKPTKDRHTKVDGRGRRIRMPAMCAARVFQLTRELGHKSDGETIEWLLQQAEPAIIASTGTGTIPANFSTLNASLRSGGGSTLFSQASKSSSSPLSFHSTGMSLYEDNNGTNGSSVDPSRKLLNSAANAAVFGFHHQMYPPIMSTERNPNTLVKPYREDYFKEPSSAAEPSESSQKASQFQEQELAQGRGTANVVPQPMWAVAPGTTNGGSAFWMLPMSGSGGREQMQQQPGHQMWAFNPGNYPVGTGRVVTAPMGSMMLGGQQLGLGVAEGNMAAAMRGSRGDGLAMTLDQHQHQLQHQEPNQSQASENGGDDKK

SEQ ID NO: 91246 - protein, 297 aa, Arabidopsis thaliana
  peptide (1)..(297): Ceres Seq. ID no. 12726942
  misc_feature (1)..(175): Pfam Name: TCP family transcription factor Pfam Description: TCP family transcription factor
  misc_feature (1)..(297): Homolog of NCBI NO: 15218305 NR Description: unknown protein; protein id: At1g72010.1, by cDNA: gi_19423971 [Arabidopsis thaliana]
  misc_feature (1)..(269): Homolog of NCBI NO: 15217857 NR Description: auxin-induced basic helix-loop-helix factor, putative; protein id: At1g58100.1, supported by cDNA:
  misc_feature (1)..(293): Homolog of NCBI NO: 20975251 NR Description: transcription factor PCF3 [Oryza sativa (japonica
  misc_feature (1)..(186): Homolog of NCBI NO: 15219640 NR Description: DNA binding protein, putative; protein id: supported by cDNA: gi_15912302, supported by cDNA: gi_19548006
  misc_feature (1)..(294): Homolog of NCBI NO: 11357581 NR Description: hypothetical protein F1P2.170 - Arabidopsis >gi|6522545|emb|CAB61988.1| putative protein [Arabidopsis
  misc_feature (1)..(294): Homolog of NCBI NO: 22331641 NR Description: putative protein; protein id: At3g47620.1, by cDNA: gi_16604510 [Arabidopsis thaliana] AT3g47620/F1P2_170 [Arabidopsis thaliana]
  misc_feature (68)..(286): Homolog of NCBI NO: 15219640 NR Description: DNA binding protein, putative; protein id: supported by cDNA: gi_15912302, supported by cDNA: gi_19548006
  misc_feature (1)..(119): Homolog of NCBI NO: 18409345 NR Description: expressed protein; protein id: At1g69690.1, by cDNA: gi_15912212, supported by cDNA: gi_19547990 [Arabidopsis
  misc_feature (1)..(159): Homolog of NCBI NO: 5731257 NR Description: auxin-induced basic helix-loop-helix
  misc_feature (1)..(97): Homolog of NCBI NO: 15237274 NR Description: unknown protein; protein id: At5g23280.1 thaliana] >gi|10177817|dbj|BAB11183.1| gene_id:MKD15.14~unknown
MPAMCAARVFQLTRELGHKSDGETIEWLLQQAEPAIIASTGTGTIPANFSTLNASLRSGGGSTLFSQASKSSSSPLSFHSTGMSLYEDNNGTNGSSVDPSRKLLNSAANAAVFGFHHQMYPPIMSTERNPNTLVKPYREDYFKEPSSAAEPSESSQKASQFQEQELAQGRGTANVVPQPMWAVAPGTTNGGSAFWMLPMSGSGGREQMQQQPGHQMWAFNPGNYPVGTGRVVTAPMGSMMLGGQQLGLGVAEGNMAAAMRGSRGDGLAMTLDQHQHQLQHQEPNQSQASENGGDDKK

SEQ ID NO: 91247 - protein, 294 aa, Arabidopsis thaliana
  peptide (1)..(294): Ceres Seq. ID no. 12726943
  misc_feature (1)..(172): Pfam Name: TCP family transcription factor Pfam Description: TCP family transcription factor
  misc_feature (1)..(294): Homolog of NCBI NO: 15218305 NR Description: unknown protein; protein id: At1g72010.1, by cDNA: gi_19423971 [Arabidopsis thaliana]
  misc_feature (1)..(266): Homolog of NCBI NO: 15217857 NR Description: auxin-induced basic helix-loop-helix factor, putative; protein id: At1g58100.1, supported by cDNA:
  misc_feature (1)..(290): Homolog of NCBI NO: 20975251 NR Description: transcription factor PCF3 [Oryza sativa (japonica
  misc_feature (1)..(183): Homolog of NCBI NO: 15219640 NR Description: DNA binding protein, putative; protein id: supported by cDNA: gi_15912302, supported by cDNA: gi_19548006
  misc_feature (1)..(291): Homolog of NCBI NO: 11357581 NR Description: hypothetical protein F1P2.170 - Arabidopsis >gi|6522545|emb|CAB61988.1| putative protein [Arabidopsis
  misc_feature (1)..(291): Homolog of NCBI NO: 22331641 NR Description: putative protein; protein id: At3g47620.1, by cDNA: gi_16604510 [Arabidopsis thaliana] AT3g47620/F1P2_170 [Arabidopsis thaliana]
  misc_feature (65)..(283): Homolog of NCBI NO: 15219640 NR Description: DNA binding protein, putative; protein id: supported by cDNA: gi_15912302, supported by cDNA: gi_19548006
  misc_feature (1)..(116): Homolog of NCBI NO: 18409345 NR Description: expressed protein; protein id: At1g69690.1, by cDNA: gi_15912212, supported by cDNA: gi_19547990 [Arabidopsis
  misc_feature (1)..(156): Homolog of NCBI NO: 5731257 NR Description: auxin-induced basic helix-loop-helix
  misc_feature (1)..(94): Homolog of NCBI NO: 15237274 NR Description: unknown protein; protein id: At5g23280.1 thaliana] >gi|10177817|dbj|BAB11183.1| gene_id:MKD15.14~unknown
MCAARVFQLTRELGHKSDGETIEWLLQQAEPAIIASTGTGTIPANFSTLNASLRSGGGSTLFSQASKSSSSPLSFHSTGMSLYEDNNGTNGSSVDPSRKLLNSAANAAVFGFHHQMYPPIMSTERNPNTLVKPYREDYFKEPSSAAEPSESSQKASQFQEQELAQGRGTANVVPQPMWAVAPGTTNGGSAFWMLPMSGSGGREQMQQQPGHQMWAFNPGNYPVGTGRVVTAPMGSMMLGGQQLGLGVAEGNMAAAMRGSRGDGLAMTLDQHQHQLQHQEPNQSQASENGGDDKK

SEQ ID NO: 91248 - DNA, 1500 bp, Arabidopsis thaliana
  misc_feature (1)..(1500): Ceres Seq. ID no. 12726951
  misc_feature: MA Experiment ID: 20000347 Result: Up-regulated in Transcription
  misc_feature: MA Experiment 20000347 PARAMETER Experiment Name: At_2mM_SA_Sub_P Parameter: Age (day) Value: 14
  misc_feature: MA Experiment 20000347 PARAMETER Experiment Name: At_2mM_SA_Sub_P Parameter: Organism Value: A. thaliana
  misc_feature: MA Experiment 20000347 PARAMETER Experiment Name: At_2mM_SA_Sub_P Parameter: Plant Line Value: WS
  misc_feature: MA Experiment 20000347 PARAMETER Experiment Name: At_2mM_SA_Sub_P Parameter: Timepoint (hr) Value: 6
  misc_feature: MA Experiment 20000347 PARAMETER Experiment Name: At_2mM_SA_Sub_P Parameter: Tissue Value: Aerial
  misc_feature: MA Experiment 20000347 PARAMETER Experiment Name: At_2mM_SA_Sub_P Parameter: Treatment Value: 2mM SA vs. No Treatment
atgtctttaagcctttacgacagtgcacattcactagacggtaagtctggttgggatactccggttttctccatgaaagactcaatggatcgtaacccgatggtcacagaagcttgggaggctctctgccagtctcaggtctacttccggggaaaaccggtaggaaccatcgccgcctacgaccatgcttcagaagaggtcttgaactatgatcaggtgttcgtacgtgattttgtaccgagtgctctagcatttctgatgaatggagagcctgaaattgtgaagaactttctcctgaagacacttcatattcagggacaagacaaaatgatcgacaagttcaagcttggtgacggcgcaatgccagcaagctttaaagttctacataatcctatcaagaagacggatacgattatcgctgactttggagaaagcgccatcgggagagtggctccagtcgactctggcttctggtggatcattctcctccgagcttacactaagtctacaggagatcattctctagcagagagaccagagtgccaaaagggaatgagactcatactttctttgtgtctctctgagggttttgatacttttccgactttgctttgcgcagatggttgctcgatggtcgatcgtagaatgggcatttacggctatccgattgagatccaagccctctttttcatggctcttcgatccgcactctcaatgctgaaacatgattctgagggtaaagagttcatggaaaagatagtgaagcggctgcacgcactaagcttccatatgagaagctacttttggctcgatttccagcagctcaatgacatttaccgttacaagacggaggagtactctcacaccgcggtaaacaagttcaacgtaatccctgactccatccctgattggatctttgacttcatgcctctccgaggtggctacttcgttggaaatgtcagtcccgcccgcatggacttcaggtggtttgcgttaggaaattgtatcgcaattctttcctcattggccacaccagagcagtccatggcgatcatggacctgattgaggcccggtgggaagaacttgtgggagagatgccgttgaagatatgttatccggcgatggagagtcacgagtgggggattgtcactggctgtgaccctaagaacacaaggtggagctaccacaacggaggctcttggccagtgcttctatggttactaacggcggcaagcataaagactggacggccacaaatagcacgacgggctatagagttggcggaggcacgactgttgaaggatggatggccggagtactacgacggaaagtctggaagattcatcggaaaacaggctaggaaatctcagacatggtcaatcgctggctatttggtcgccaagatgatgatggatgatccaacgcatgtgggaatgatctcaatggaagaagagaaacatatgaaacctcctcttagaagatcttcttcttggacttaa

SEQ ID NO: 91249 - protein, 499 aa, Arabidopsis thaliana
  peptide (1)..(499): Ceres Seq. ID no. 12726952
  misc_feature (26)..(493): Pfam Name: Plant neutral invertase Pfam Description: Plant neutral invertase
  misc_feature (1)..(499): Homolog of NCBI NO: 15218303 NR Description: neutral invertase, putative; protein id: [Arabidopsis thaliana] >gi|25354735|pir||A96743 probable neutral
  misc_feature (3)..(499): Homolog of NCBI NO: 18395144 NR Description: putative invertase; protein id: At1g22650.1,
  misc_feature (3)..(499): Homolog of NCBI NO: 21594008 NR Description: putative invertase [Arabidopsis thaliana]
  misc_feature (4)..(499): Homolog of NCBI NO: 18413234 NR Description: neutral invertase like protein; protein id:
  misc_feature (3)..(499): Homolog of NCBI NO: 7487359 NR Description: hypothetical protein T22J18.18 - Arabidopsis >gi|3287693|gb|AAC25521.1|AAC25521 Similar to LIM17 gene product from the genome of Synechocystis sp. gb|D90916. [Arabidopsis
  misc_feature (4)..(499): Homolog of NCBI NO: 25354737 NR Description: neutral invertase like protein [imported] - thaliana >gi|7267646|emb|CAB78074.1| neutral invertase like
  misc_feature (6)..(499): Homolog of NCBI NO: 15236209 NR Description: invertase - like protein; protein id: supported by cDNA: gi_15215775 [Arabidopsis thaliana]
  misc_feature (4)..(498): Homolog of NCBI NO: 30693221 NR Description: invertase -related [Arabidopsis thaliana]
  misc_feature (6)..(499): Homolog of NCBI NO: 38344939 NR Description: OSJNBa0084A10.15 [Oryza sativa (japonica
  misc_feature (19)..(485): Homolog of NCBI NO: 34894878 NR Description: putative neutral invertase [Oryza sativa cultivar- group)] >gi|14164543|dbj|BAB55792.1| putative neutral
MSLSLYDSAHSLDGKSGWDTPVFSMKDSMDRNPMVTEAWEALCQSQVYFRGKPVGTIAAYDHASEEVLNYDQVFVRDFVPSALAFLMNGEPEIVKNFLLKTLHIQGQDKMIDKFKLGDGAMPASFKVLHNPIKKTDTIIADFGESAIGRVAPVDSGFWWIILLRAYTKSTGDHSLAERPECQKGMRLILSLCLSEGFDTFPTLLCADGCSMVDRRMGIYGYPIEIQALFFMALRSALSMLKHDSEGKEFMEKIVKRLHALSFHMRSYFWLDFQQLNDIYRYKTEEYSHTAVNKFNVIPDSIPDWIFDFMPLRGGYFVGNVSPARMDFRWFALGNCIAILSSLATPEQSMAIMDLIEARWEELVGEMPLKICYPAMESHEWGIVTGCDPKNTRWSYHNGGSWPVLLWLLTAASIKTGRPQIARRAIELAEARLLKDGWPEYYDGKSGRFIGKQARKSQTWSIAGYLVAKMMMDDPTHVGMISMEEEKHMKPPLRRSSSWT

SEQ ID NO: 91250 - protein, 475 aa, Arabidopsis thaliana
  peptide (1)..(475): Ceres Seq. ID no. 12726953
  misc_feature (2)..(469): Pfam Name: Plant neutral invertase Pfam Description: Plant neutral invertase
  misc_feature (1)..(475): Homolog of NCBI NO: 15218303 NR Description: neutral invertase, putative; protein id: [Arabidopsis thaliana] >gi|25354735|pir||A96743 probable neutral
  misc_feature (1)..(475): Homolog of NCBI NO: 18395144 NR Description: putative invertase; protein id: At1g22650.1,
  misc_feature (1)..(475): Homolog of NCBI NO: 21594008 NR Description: putative invertase [Arabidopsis thaliana]
  misc_feature (1)..(475): Homolog of NCBI NO: 18413234 NR Description: neutral invertase like protein; protein id:
  misc_feature (1)..(475): Homolog of NCBI NO: 7487359 NR Description: hypothetical protein T22J18.18 - Arabidopsis >gi|3287693|gb|AAC25521.1|AAC25521 Similar to LIM17 gene product from the genome of Synechocystis sp. gb|D90916. [Arabidopsis
  misc_feature (1)..(475): Homolog of NCBI NO: 25354737 NR Description: neutral invertase like protein [imported] - thaliana >gi|7267646|emb|CAB78074.1| neutral invertase like
  misc_feature (1)..(475): Homolog of NCBI NO: 15236209 NR Description: invertase - like protein; protein id: supported by cDNA: gi_15215775 [Arabidopsis thaliana]
  misc_feature (1)..(474): Homolog of NCBI NO: 30693221 NR Description: invertase -related [Arabidopsis thaliana]
  misc_feature (1)..(475): Homolog of NCBI NO: 38344939 NR Description: OSJNBa0084A10.15 [Oryza sativa (japonica
  misc_feature (1)..(461): Homolog of NCBI NO: 34894878 NR Description: putative neutral invertase [Oryza sativa cultivar- group)] >gi|14164543|dbj|BAB55792.1| putative neutral
MKDSMDRNPMVTEAWEALCQSQVYFRGKPVGTIAAYDHASEEVLNYDQVFVRDFVPSALAFLMNGEPEIVKNFLLKTLHIQGQDKMIDKFKLGDGAMPASFKVLHNPIKKTDTIIADFGESAIGRVAPVDSGFWWIILLRAYTKSTGDHSLAERPECQKGMRLILSLCLSEGFDTFPTLLCADGCSMVDRRMGIYGYPIEIQALFFMALRSALSMLKHDSEGKEFMEKIVKRLHALSFHMRSYFWLDFQQLNDIYRYKTEEYSHTAVNKFNVIPDSIPDWIFDFMPLRGGYFVGNVSPARMDFRWFALGNCIAILSSLATPEQSMAIMDLIEARWEELVGEMPLKICYPAMESHEWGIVTGCDPKNTRWSYHNGGSWPVLLWLLTAASIKTGRPQIARRAIELAEARLLKDGWPEYYDGKSGRFIGKQARKSQTWSIAGYLVAKMMMDDPTHVGMISMEEEKHMKPPLRRSSSWT

SEQ ID NO: 91251 - protein, 471 aa, Arabidopsis thaliana
  peptide (1)..(471): Ceres Seq. ID no. 12726954
  misc_feature (1)..(465): Pfam Name: Plant neutral invertase Pfam Description: Plant neutral invertase
  misc_feature (1)..(471): Homolog of NCBI NO: 15218303 NR Description: neutral invertase, putative; protein id: [Arabidopsis thaliana] >gi|25354735|pir||A96743 probable neutral
  misc_feature (1)..(471): Homolog of NCBI NO: 18395144 NR Description: putative invertase; protein id: At1g22650.1,
  misc_feature (1)..(471): Homolog of NCBI NO: 21594008 NR Description: putative invertase [Arabidopsis thaliana]
  misc_feature (1)..(471): Homolog of NCBI NO: 18413234 NR Description: neutral invertase like protein; protein id:
  misc_feature (1)..(471): Homolog of NCBI NO: 7487359 NR Description: hypothetical protein T22J18.18 - Arabidopsis >gi|3287693|gb|AAC25521.1|AAC25521 Similar to LIM17 gene product from the genome of Synechocystis sp. gb|D90916. [Arabidopsis
  misc_feature (1)..(471): Homolog of NCBI NO: 25354737 NR Description: neutral invertase like protein [imported] - thaliana >gi|7267646|emb|CAB78074.1| neutral invertase like
  misc_feature (1)..(471): Homolog of NCBI NO: 15236209 NR Description: invertase - like protein; protein id: supported by cDNA: gi_15215775 [Arabidopsis thaliana]
  misc_feature (1)..(470): Homolog of NCBI NO: 30693221 NR Description: invertase -related [Arabidopsis thaliana]
  misc_feature (1)..(471): Homolog of NCBI NO: 38344939 NR Description: OSJNBa0084A10.15 [Oryza sativa (japonica
  misc_feature (1)..(457): Homolog of NCBI NO: 34894878 NR Description: putative neutral invertase [Oryza sativa cultivar- group)] >gi|14164543|dbj|BAB55792.1| putative neutral
MDRNPMVTEAWEALCQSQVYFRGKPVGTIAAYDHASEEVLNYDQVFVRDFVPSALAFLMNGEPEIVKNFLLKTLHIQGQDKMIDKFKLGDGAMPASFKVLHNPIKKTDTIIADFGESAIGRVAPVDSGFWWIILLRAYTKSTGDHSLAERPECQKGMRLILSLCLSEGFDTFPTLLCADGCSMVDRRMGIYGYPIEIQALFFMALRSALSMLKHDSEGKEFMEKIVKRLHALSFHMRSYFWLDFQQLNDIYRYKTEEYSHTAVNKFNVIPDSIPDWIFDFMPLRGGYFVGNVSPARMDFRWFALGNCIAILSSLATPEQSMAIMDLIEARWEELVGEMPLKICYPAMESHEWGIVTGCDPKNTRWSYHNGGSWPVLLWLLTAASIKTGRPQIARRAIELAEARLLKDGWPEYYDGKSGRFIGKQARKSQTWSIAGYLVAKMMMDDPTHVGMISMEEEKHMKPPLRRSSSWT

SEQ ID NO: 91252 - DNA, 1747 bp, Arabidopsis thaliana
  misc_feature (1)..(1747): Ceres Seq. ID no. 12726967
  misc_feature: MA Experiment ID: 20000315 Result: Down-regulated in Transcription
  misc_feature: MA Experiment 20000315 PARAMETER Experiment Name: At_14day_Shoots-Roots_Sub_P Parameter: Age (day) Value: 14
  misc_feature: MA Experiment 20000315 PARAMETER Experiment Name: At_14day_Shoots-Roots_Sub_P Parameter: Organism Value: A. thaliana
  misc_feature: MA Experiment 20000315 PARAMETER Experiment Name: At_14day_Shoots-Roots_Sub_P Parameter: Plant Line Value: WS
  misc_feature: MA Experiment 20000315 PARAMETER Experiment Name: At_14day_Shoots-Roots_Sub_P Parameter: Tissue Value: Shoots vs. Whole Plant
  misc_feature: MA Experiment ID: 20000328 Result: Down-regulated in Transcription
  misc_feature: MA Experiment 20000328 PARAMETER Experiment Name: At_42deg_Heat_Sub_P Parameter: Age (day) Value: 14
  misc_feature: MA Experiment 20000328 PARAMETER Experiment Name: At_42deg_Heat_Sub_P Parameter: Organism Value: A. thaliana
  misc_feature: MA Experiment 20000328 PARAMETER Experiment Name: At_42deg_Heat_Sub_P Parameter: Plant Line Value: WS
  misc_feature: MA Experiment 20000328 PARAMETER Experiment Name: At_42deg_Heat_Sub_P Parameter: Temperature (deg C) Value: 42 vs. 22
  misc_feature: MA Experiment 20000328 PARAMETER Experiment Name: At_42deg_Heat_Sub_P Parameter: Timepoint (hr) Value: 6
  misc_feature: MA Experiment 20000328 PARAMETER Experiment Name: At_42deg_Heat_Sub_P Parameter: Tissue Value: Aerial
  misc_feature: MA Experiment ID: 20000440 Result: Down-regulated in Transcription
  misc_feature: MA Experiment 20000440 PARAMETER Experiment Name: At_Closed-Flower__Sub_P Parameter: Tissue Value: Closed Flower vs. Whole Plant
aggaacaacaatcacagaacaagacggcacaagtaaaaaatggctgaagaacctactactaccactctcgttacaccggaaaagctaccttctccgagcctcacgccttctgaagtatctgaatctactcaagatgccctaccgacagagacagaaactctggagaaagtgactgagactaatccaccggaaactgcagataccaccaccaagccagaagaagaaaccgcggcagagcatcatccaccgacagtgacggaaacagaaactgcatcgacggagaaacaagaggttaaagacgaagcatcgcagaaagaagtagctgaagagaaaaagagtatgattccacagaatcttggttcattcaaagaagaaagcagcaaactttctgatctatctaattccgagaagaaatcactcgatgaactaaaacatctagttcgagaagctctagacaatcaccaattcaccaacacaccagaagaagtcaagatttgggggattccattacttgaagacgatagaagcgacgtcgttttgttaaaattcctaagagctagggagttcaaggtgaaagattcgtttgctatgctcaagaacacaatcaagtggagaaaggagttcaagatcgatgaattggtcgaggaagatcttgtggatgatcttgacaaggttgtgtttatgcatggacatgaccgagaaggtcaccctgtttgttacaatgtctatggtgagtttcagaacaaggagctttataataagacgttttctgatgaggaaaagaggaaacatttcttgaggactaggattcagttcttggagaggagtataaggaagctagattttagctctggtggggtttctactatttttcaggttaatgatatgaagaattctccggggttagggaagaaagagcttagatcagctactaagcaagctgttgagttgcttcaggacaattaccctgagtttgtcttcaaacaggcttttatcaatgttccttggtggtaccttgtgttttatactgtgattggtccgttcatgacaccaagatcaaagagcaagcttgtgtttgctggtccttcgcgttcagctgaaaccctattcaaatacatatcacccgagcaagttccagtacaatatggtggattgagtgttgatccttgcgactgcaatccagacttttcgttggaagattcagcctctgagatcactgttaagcccggaacaaaacaaactgttgagatcataatctatgagaaatgtgaacttgtgtgggagataagggtaactggatgggaagtgagctacaaggctgaatttgtgccggaagagaaagatgcttacacggtggttatacaaaaaccgaggaagatgagaccatccgatgaaccggtgttaacccatagcttcaaagtgaatgagcttggcaaggttttactcacagtagacaacccaacctctaagaagaagaagctcgtttacaggttcaatgtcaaacctctctaagttttaagaaccaaatgaaaaatgtttccaaactttgttttattttacaaaaaatgttgtttctagacttttgtttttcttgaaacagaagtgagatatcttatgtgtgtttgtatatgtgagtgtttactttatcatatcatataaattatgtgtggtttattttgctcttgtaatcaatcatttgtggagaatatattactacatgactttatgaaataaagatctttaaatc

SEQ ID NO: 91253 - protein, 490 aa, Arabidopsis thaliana
  peptide (1)..(490): Ceres Seq. ID no. 12726968
  misc_feature (214)..(381): Pfam Name: CRAL/TRIO domain Pfam Description: CRAL/TRIO domain
  misc_feature (1)..(490): Homolog of NCBI NO: 15218383 NR Description: cytosolic factor, putative; protein id: supported by cDNA: gi_15081613 [Arabidopsis thaliana]
  misc_feature (101)..(490): Homolog of NCBI NO: 15081614 NR Description: At1g72160/T9N14_8 [Arabidopsis thaliana]
  misc_feature (4)..(490): Homolog of NCBI NO: 30680992 NR Description: expressed protein [Arabidopsis thaliana]
  misc_feature (4)..(408): Homolog of NCBI NO: 25407487 NR Description: hypothetical protein AT4g09160 [imported] - thaliana >gi|7267559|emb|CAB78040.1| putative protein
  misc_feature (408)..(490): Homolog of NCBI NO: 25407487 NR Description: hypothetical protein AT4g09160 [imported] - thaliana >gi|7267559|emb|CAB78040.1| putative protein
  misc_feature (14)..(490): Homolog of NCBI NO: 8894548 NR Description: hypothetical protein [Cicer arietinum]
  misc_feature (1)..(488): Homolog of NCBI NO: 34907288 NR Description: contains ESTs
  misc_feature (3)..(484): Homolog of NCBI NO: 15219901 NR Description: unknown protein; protein id: At1g22530.1
  misc_feature (21)..(488): Homolog of NCBI NO: 15218382 NR Description: cytosolic factor, putative; protein id: supported by cDNA: gi_15028180, supported by cDNA: gi_21280860 thaliana] >gi|25406149|pir||H96744 probable cytosolic factor
  misc_feature (24)..(488): Homolog of NCBI NO: 18397616 NR Description: expressed protein; protein id: At1g30690.1, by cDNA: gi_14334977 [Arabidopsis thaliana]
MAEEPTTTTLVTPEKLPSPSLTPSEVSESTQDALPTETETLEKVTETNPPETADTTTKPEEETAAEHHPPTVTETETASTEKQEVKDEASQKEVAEEKKSMIPQNLGSFKEESSKLSDLSNSEKKSLDELKHLVREALDNHQFTNTPEEVKIWGIPLLEDDRSDVVLLKFLRAREFKVKDSFAMLKNTIKWRKEFKIDELVEEDLVDDLDKVVFMHGHDREGHPVCYNVYGEFQNKELYNKTFSDEEKRKHFLRTRIQFLERSIRKLDFSSGGVSTIFQVNDMKNSPGLGKKELRSATKQAVELLQDNYPEFVFKQAFINVPWWYLVFYTVIGPFMTPRSKSKLVFAGPSRSAETLFKYISPEQVPVQYGGLSVDPCDCNPDFSLEDSASEITVKPGTKQTVEIIIYEKCELVWEIRVTGWEVSYKAEFVPEEKDAYTVVIQKPRKMRPSDEPVLTHSFKVNELGKVLLTVDNPTSKKKKLVYRFNVKPL

SEQ ID NO: 91254 - protein, 390 aa, Arabidopsis thaliana
  peptide (1)..(390): Ceres Seq. ID no. 12726969
  misc_feature (114)..(281): Pfam Name: CRAL/TRIO domain Pfam Description: CRAL/TRIO domain
  misc_feature (1)..(390): Homolog of NCBI NO: 15218383 NR Description: cytosolic factor, putative; protein id: supported by cDNA: gi_15081613 [Arabidopsis thaliana]
  misc_feature (1)..(390): Homolog of NCBI NO: 15081614 NR Description: At1g72160/T9N14_8 [Arabidopsis thaliana]
  misc_feature (1)..(390): Homolog of NCBI NO: 30680992 NR Description: expressed protein [Arabidopsis thaliana]
  misc_feature (1)..(308): Homolog of NCBI NO: 25407487 NR Description: hypothetical protein AT4g09160 [imported] - thaliana >gi|7267559|emb|CAB78040.1| putative protein
  misc_feature (308)..(390): Homolog of NCBI NO: 25407487 NR Description: hypothetical protein AT4g09160 [imported] - thaliana >gi|7267559|emb|CAB78040.1| putative protein
  misc_feature (1)..(390): Homolog of NCBI NO: 8894548 NR Description: hypothetical protein [Cicer arietinum]
  misc_feature (1)..(388): Homolog of NCBI NO: 34907288 NR Description: contains ESTs
  misc_feature (1)..(384): Homolog of NCBI NO: 15219901 NR Description: unknown protein; protein id: At1g22530.1
  misc_feature (1)..(388): Homolog of NCBI NO: 15218382 NR Description: cytosolic factor, putative; protein id: supported by cDNA: gi_15028180, supported by cDNA: gi_21280860 thaliana] >gi|25406149|pir||H96744 probable cytosolic factor
  misc_feature (1)..(388): Homolog of NCBI NO: 18397616 NR Description: expressed protein; protein id: At1g30690.1, by cDNA: gi_14334977 [Arabidopsis thaliana]
MIPQNLGSFKEESSKLSDLSNSEKKSLDELKHLVREALDNHQFTNTPEEVKIWGIPLLEDDRSDVVLLKFLRAREFKVKDSFAMLKNTIKWRKEFKIDELVEEDLVDDLDKVVFMHGHDREGHPVCYNVYGEFQNKELYNKTFSDEEKRKHFLRTRIQFLERSIRKLDFSSGGVSTIFQVNDMKNSPGLGKKELRSATKQAVELLQDNYPEFVFKQAFINVPWWYLVFYTVIGPFMTPRSKSKLVFAGPSRSAETLFKYISPEQVPVQYGGLSVDPCDCNPDFSLEDSASEITVKPGTKQTVEIIIYEKCELVWEIRVTGWEVSYKAEFVPEEKDAYTVVIQKPRKMRPSDEPVLTHSFKVNELGKVLLTVDNPTSKKKKLVYRFNVKPL

SEQ ID NO: 91255 - protein, 307 aa, Arabidopsis thaliana
  peptide (1)..(307): Ceres Seq. ID no. 12726970
  misc_feature (31)..(198): Pfam Name: CRAL/TRIO domain Pfam Description: CRAL/TRIO domain
  misc_feature (1)..(307): Homolog of NCBI NO: 15218383 NR Description: cytosolic factor, putative; protein id: supported by cDNA: gi_15081613 [Arabidopsis thaliana]
  misc_feature (1)..(307): Homolog of NCBI NO: 15081614 NR Description: At1g72160/T9N14_8 [Arabidopsis thaliana]
  misc_feature (1)..(307): Homolog of NCBI NO: 30680992 NR Description: expressed protein [Arabidopsis thaliana]
  misc_feature (1)..(225): Homolog of NCBI NO: 25407487 NR Description: hypothetical protein AT4g09160 [imported] - thaliana >gi|7267559|emb|CAB78040.1| putative protein
  misc_feature (225)..(307): Homolog of NCBI NO: 25407487 NR Description: hypothetical protein AT4g09160 [imported] - thaliana >gi|7267559|emb|CAB78040.1| putative protein
  misc_feature (1)..(307): Homolog of NCBI NO: 8894548 NR Description: hypothetical protein [Cicer arietinum]
  misc_feature (1)..(305): Homolog of NCBI NO: 34907288 NR Description: contains ESTs
  misc_feature (1)..(301): Homolog of NCBI NO: 15219901 NR Description: unknown protein; protein id: At1g22530.1
  misc_feature (1)..(305): Homolog of NCBI NO: 15218382 NR Description: cytosolic factor, putative; protein id: supported by cDNA: gi_15028180, supported by cDNA: gi_21280860 thaliana] >gi|25406149|pir||H96744 probable cytosolic factor
  misc_feature (1)..(305): Homolog of NCBI NO: 18397616 NR Description: expressed protein; protein id: At1g30690.1, by cDNA: gi_14334977 [Arabidopsis thaliana]
MLKNTIKWRKEFKIDELVEEDLVDDLDKVVFMHGHDREGHPVCYNVYGEFQNKELYNKTFSDEEKRKHFLRTRIQFLERSIRKLDFSSGGVSTIFQVNDMKNSPGLGKKELRSATKQAVELLQDNYPEFVFKQAFINVPWWYLVFYTVIGPFMTPRSKSKLVFAGPSRSAETLFKYISPEQVPVQYGGLSVDPCDCNPDFSLEDSASEITVKPGTKQTVEIIIYEKCELVWEIRVTGWEVSYKAEFVPEEKDAYTVVIQKPRKMRPSDEPVLTHSFKVNELGKVLLTVDNPTSKKKKLVYRFNVKPL

SEQ ID NO: 91256 - DNA, 1902 bp, Arabidopsis thaliana
  misc_feature (1)..(1902): Ceres Seq. ID no. 12727018
  misc_feature: MA Experiment ID: 20000179 Result: Up-regulated in Transcription
  misc_feature: MA Experiment 20000179 PARAMETER Experiment Name: At_Germinating_Seeds_P Parameter: Age (hr) Value: 6 vs. 0
  misc_feature: MA Experiment 20000179 PARAMETER Experiment Name: At_Germinating_Seeds_P Parameter: Tissue Value: Germinating Seeds
  misc_feature: MA Experiment ID: 20000180 Result: Up-regulated in Transcription
  misc_feature: MA Experiment 20000180 PARAMETER Experiment Name: At_Germinating_Seeds_P Parameter: Age (hr) Value: 24 vs. 0
  misc_feature: MA Experiment 20000180 PARAMETER Experiment Name: At_Germinating_Seeds_P Parameter: Tissue Value: Germinating Seeds
  misc_feature: MA Experiment ID: 20000235 Result: Up-regulated in Transcription
  misc_feature: MA Experiment 20000235 PARAMETER Experiment Name: At_Siliques_P Parameter: Age (day) Value: 21
  misc_feature: MA Experiment 20000235 PARAMETER Experiment Name: At_Siliques_P Parameter: Organism Value: A. thaliana
  misc_feature: MA Experiment 20000235 PARAMETER Experiment Name: At_Siliques_P Parameter: Plant Line Value: WS
  misc_feature: MA Experiment 20000235 PARAMETER Experiment Name: At_Siliques_P Parameter: Tissue Value: 5-10mm Siliques vs. Whole Plant
  misc_feature: MA Experiment ID: 20000286 Result: Up-regulated in Transcription
  misc_feature: MA Experiment 20000286 PARAMETER Experiment Name: At_Open_Flower_P Parameter: Age (day) Value: 21
  misc_feature: MA Experiment 20000286 PARAMETER Experiment Name: At_Open_Flower_P Parameter: Plant Line Value: WS
  misc_feature: MA Experiment 20000286 PARAMETER Experiment Name: At_Open_Flower_P Parameter: Tissue Value: Half Open vs. Whole Plant
  misc_feature: MA Experiment ID: 20000794 Result: Up-regulated in Transcription
  misc_feature: MA Experiment 20000794 PARAMETER Experiment Name: At_Petals_P Parameter: Age (day) Value: 23-25 days
  misc_feature: MA Experiment 20000794 PARAMETER Experiment Name: At_Petals_P Parameter: Plant Line Value: WS
  misc_feature: MA Experiment 20000794 PARAMETER Experiment Name: At_Petals_P Parameter: Tissue Value: Petals vs. Whole plant
  misc_feature: MA Experiment ID: 20001557 Result: Up-regulated in Transcription
  misc_feature: MA Experiment 20001557 PARAMETER Experiment Name: At_Drought_Soil_Dry_P Parameter: Age (day) Value: 27
  misc_feature: MA Experiment 20001557 PARAMETER Experiment Name: At_Drought_Soil_Dry_P Parameter: Organism Value: A. thaliana
  misc_feature: MA Experiment 20001557 PARAMETER Experiment Name: At_Drought_Soil_Dry_P Parameter: Plant Line Value: WS
  misc_feature: MA Experiment 20001557 PARAMETER Experiment Name: At_Drought_Soil_Dry_P Parameter: Post Timepoint (hr) Value: 3
  misc_feature: MA Experiment 20001557 PARAMETER Experiment Name: At_Drought_Soil_Dry_P Parameter: Post-Treatment Value: Re-Water vs. No Drought
  misc_feature: MA Experiment 20001557 PARAMETER Experiment Name: At_Drought_Soil_Dry_P Parameter: Timepoint (day) Value: 13
  misc_feature: MA Experiment 20001557 PARAMETER Experiment Name: At_Drought_Soil_Dry_P Parameter: Treatment Value: Drought vs. No Drought
  misc_feature: MA Experiment ID: 20001560 Result: Up-regulated in Transcription
  misc_feature: MA Experiment 20001560 PARAMETER Experiment Name: At_Drought_Soil_Dry_P Parameter: Age (day) Value: 28
  misc_feature: MA Experiment 20001560 PARAMETER Experiment Name: At_Drought_Soil_Dry_P Parameter: Organism Value: A. thaliana
  misc_feature: MA Experiment 20001560 PARAMETER Experiment Name: At_Drought_Soil_Dry_P Parameter: Plant Line Value: WS
  misc_feature: MA Experiment 20001560 PARAMETER Experiment Name: At_Drought_Soil_Dry_P Parameter: Post Timepoint (hr) Value: None
  misc_feature: MA Experiment 20001560 PARAMETER Experiment Name: At_Drought_Soil_Dry_P Parameter: Post-Treatment Value: None
  misc_feature: MA Experiment 20001560 PARAMETER Experiment Name: At_Drought_Soil_Dry_P Parameter: Timepoint (day) Value: 14
  misc_feature: MA Experiment 20001560 PARAMETER Experiment Name: At_Drought_Soil_Dry_P Parameter: Treatment Value: Drought vs. No Drought
  misc_feature: MA Experiment ID: 20001905 Result: Up-regulated in Transcription
  misc_feature: MA Experiment 20001905 PARAMETER Experiment Name: At_Drought_Reproduction_P Parameter: Age (day) Value: 40
  misc_feature: MA Experiment 20001905 PARAMETER Experiment Name: At_Drought_Reproduction_P Parameter: Organism Value: A. thaliana
  misc_feature: MA Experiment 20001905 PARAMETER Experiment Name: At_Drought_Reproduction_P Parameter: Plant Line Value: WS
  misc_feature: MA Experiment 20001905 PARAMETER Experiment Name: At_Drought_Reproduction_P Parameter: Timepoint (day) Value: 10
  misc_feature: MA Experiment 20001905 PARAMETER Experiment Name: At_Drought_Reproduction_P Parameter: Tissue Value: Rosettes
  misc_feature: MA Experiment 20001905 PARAMETER Experiment Name: At_Drought_Reproduction_P Parameter: Treatment Value: Drought vs. No Drought
  misc_feature: MA Experiment ID: 20001911 Result: Down-regulated in Transcription
  misc_feature: MA Experiment 20001911 PARAMETER Experiment Name: At_Drought_Reproduction_P Parameter: Age (day) Value: 40
  misc_feature: MA Experiment 20001911 PARAMETER Experiment Name: At_Drought_Reproduction_P Parameter: Organism Value: A. thaliana
  misc_feature: MA Experiment 20001911 PARAMETER Experiment Name: At_Drought_Reproduction_P Parameter: Plant Line Value: WS
  misc_feature: MA Experiment 20001911 PARAMETER Experiment Name: At_Drought_Reproduction_P Parameter: Timepoint (day) Value: 10
  misc_feature: MA Experiment 20001911 PARAMETER Experiment Name: At_Drought_Reproduction_P Parameter: Tissue Value: Flowers
  misc_feature: MA Experiment 20001911 PARAMETER Experiment Name: At_Drought_Reproduction_P Parameter: Treatment Value: Drought vs. No Drought
atggaaccacatgaccaaactcacggcggcgacggaggagaaggagagaactgttcagtttccggattcgattcagctgaaaaagtcatcatccgatgggacgcgacggcgtcagaagaagcaagagagaagatgatattcaacgatccacaagaagttaacctttacctcaacgccgtcgatgaaatccagaaatatgtatcttccggcggagagattgagaatcgagctaattcagctatccagatagctatggctcgtcttgaagacgagttcaggaatattctcgtttctcatagttctccgatcaactctgattcgttaatgctgtcttcttcatcttcttctcaccttgaggttgatgaagatggaagtagtagtaataatggtaacgaagaagatgatcaacaagaggaagaagaaacggatcttctgaaacgatccggttcaagtgcaagtaccggttcagcgacggttcgattaccaaccggaagaggtagttacagtagatccaccagtagtatacgcgagatcgagctgattccgatcgaatcggtgattcatctgagctggattgctcggcgaatggtctccgccggttatctccgtgaatgtattcaagtctacggaagcgttcgcaaatccgccgtcgattcaagtttccgacggttagggatcgagaaactcagcatcggagatgttcagaggctaaattgggaagcgcttgagcagaagatccgtcgttggatccgagcagctaagatctgtgtgagagttgtgttcgcaagcgagaaattgctctgtgagcatgtttttgaaagcgttggagctgtcaatatccacgaagcttgtttcatggaaacagtcaaaggtccggcgattcagctttttaacttcgcggaggcgattagtatcagtcggagatcgccggagaagctttttaagatccttgatctacacgacgctttgattgagcttttgcctgatatcgagtcagttttcgatctgaaatcttcagattcgattagagttcaagcggcggagatattatcgagattagcggaagcggcgagagggatattatcggaattcgaaaacgccgttcttcgtgaaccttctagagttcctgttcctggaggtacgatacatccattgacgaggtatgtcatgaactacataagcttgatctcagagtatagaccaacgttgatcgatctcatcatgtcgaaaccatcgagaaacgcaacggattcaaacactccagatttcgatttctctgagttagagaataacaaaggtccattagcacttcatttgatttggatcatagtgatattgcaattcaatctcgaaggcaaatcaaagtactataaaaacgcagctttatcacatctctttatcatgaacaacgcacattacattgttcagaagattaaagggtcaccggagctacgggaaatgattggtgatctttacttgaggaagctaacgggtaagtttaggcaagctgcgacgtattaccaaagagctgcttgggttaaagtcttgtattgtttaagagatgaaggtttacatacgaaaggaagtttctcatcaggtgtttcgagaagtgcgttgagagagaggtttaaatcttttaatgctttgtttgaggaagttcatagggttcaatcacaatggttggttccggattctcagctgagggaagagttgaagatttcgatattggagaagcttagtcccgcttatagatcgtttcttgggaggttcaggagtcatatagagagcgggaaacatccggagaattacatcaagatctcagtcgaagatctagagaccgaggttcttgatttgttcgaggggtattctgcaactcagcatctgagaagacgatccgagtga

SEQ ID NO: 91257 - protein, 633 aa, Arabidopsis thaliana
  peptide (1)..(633): Ceres Seq. ID no. 12727019
  misc_feature (15)..(620): Pfam Name: Exo70 exocyst complex subunit Pfam Description: Exo70 exocyst complex subunit
  misc_feature (21)..(630): Homolog of NCBI NO: 15221040 NR Description: hypothetical protein; protein id: At1g54090.1, by cDNA: gi_20260593 [Arabidopsis thaliana]
  misc_feature (1)..(631): Homolog of NCBI NO: 30682979 NR Description: exocyst subunit EXO70 family [Arabidopsis >gi|9294634|dbj|BAB02973.1| gb|AAD25781.1~gene_id:MAG2.5~strong
  misc_feature (133)..(631): Homolog of NCBI NO: 23270388 NR Description: unknown protein [Arabidopsis thaliana]
  misc_feature (166)..(621): Homolog of NCBI NO: 19386798 NR Description: putative leucine zipper protein [Oryza sativa
  misc_feature (24)..(129): Homolog of NCBI NO: 19386798 NR Description: putative leucine zipper protein [Oryza sativa
  misc_feature (179)..(631): Homolog of NCBI NO: 38346639 NR Description: OSJNBa0072D21.9 [Oryza sativa (japonica
  misc_feature (23)..(127): Homolog of NCBI NO: 38346639 NR Description: OSJNBa0072D21.9 [Oryza sativa (japonica
  misc_feature (14)..(632): Homolog of NCBI NO: 9758920 NR Description: gb|AAD25781.1~gene_id:MXI22.10~strong similarity
  misc_feature (14)..(632): Homolog of NCBI NO: 30695880 NR Description: exocyst subunit EXO70 family [Arabidopsis
  misc_feature (180)..(629): Homolog of NCBI NO: 22326587 NR Description: putative protein; protein id: At5g03540.1, by cDNA: gi_18176063 [Arabidopsis thaliana]
MEPHDQTHGGDGGEGENCSVSGFDSAEKVIIRWDATASEEAREKMIFNDPQEVNLYLNAVDEIQKYVSSGGEIENRANSAIQIAMARLEDEFRNILVSHSSPINSDSLMLSSSSSSHLEVDEDGSSSNNGNEEDDQQEEEETDLLKRSGSSASTGSATVRLPTGRGSYSRSTSSIREIELIPIESVIHLSWIARRMVSAGYLRECIQVYGSVRKSAVDSSFRRLGIEKLSIGDVQRLNWEALEQKIRRWIRAAKICVRVVFASEKLLCEHVFESVGAVNIHEACFMETVKGPAIQLFNFAEAISISRRSPEKLFKILDLHDALIELLPDIESVFDLKSSDSIRVQAAEILSRLAEAARGILSEFENAVLREPSRVPVPGGTIHPLTRYVMNYISLISEYRPTLIDLIMSKPSRNATDSNTPDFDFSELENNKGPLALHLIWIIVILQFNLEGKSKYYKNAALSHLFIMNNAHYIVQKIKGSPELREMIGDLYLRKLTGKFRQAATYYQRAAWVKVLYCLRDEGLHTKGSFSSGVSRSALRERFKSFNALFEEVHRVQSQWLVPDSQLREELKISILEKLSPAYRSFLGRFRSHIESGKHPENYIKISVEDLETEVLDLFEGYSATQHLRRRSE

SEQ ID NO: 91258 - protein, 589 aa, Arabidopsis thaliana
  peptide (1)..(589): Ceres Seq. ID no. 12727020
  misc_feature (1)..(576): Pfam Name: Exo70 exocyst complex subunit Pfam Description: Exo70 exocyst complex subunit
  misc_feature (1)..(586): Homolog of NCBI NO: 15221040 NR Description: hypothetical protein; protein id: At1g54090.1, by cDNA: gi_20260593 [Arabidopsis thaliana]
  misc_feature (1)..(587): Homolog of NCBI NO: 30682979 NR Description: exocyst subunit EXO70 family [Arabidopsis >gi|9294634|dbj|BAB02973.1| gb|AAD25781.1~gene_id:MAG2.5~strong
  misc_feature (89)..(587): Homolog of NCBI NO: 23270388 NR Description: unknown protein [Arabidopsis thaliana]
  misc_feature (122)..(577): Homolog of NCBI NO: 19386798 NR Description: putative leucine zipper protein [Oryza sativa
  misc_feature (1)..(85): Homolog of NCBI NO: 19386798 NR Description: putative leucine zipper protein [Oryza sativa
  misc_feature (135)..(587): Homolog of NCBI NO: 38346639 NR Description: OSJNBa0072D21.9 [Oryza sativa (japonica
  misc_feature (1)..(83): Homolog of NCBI NO: 38346639 NR Description: OSJNBa0072D21.9 [Oryza sativa (japonica
  misc_feature (1)..(588): Homolog of NCBI NO: 9758920 NR Description: gb|AAD25781.1~gene_id:MXI22.10~strong similarity
  misc_feature (1)..(588): Homolog of NCBI NO: 30695880 NR Description: exocyst subunit EXO70 family [Arabidopsis
  misc_feature (136)..(585): Homolog of NCBI NO: 22326587 NR Description: putative protein; protein id: At5g03540.1, by cDNA: gi_18176063 [Arabidopsis thaliana]
MIFNDPQEVNLYLNAVDEIQKYVSSGGEIENRANSAIQIAMARLEDEFRNILVSHSSPINSDSLMLSSSSSSHLEVDEDGSSSNNGNEEDDQQEEEETDLLKRSGSSASTGSATVRLPTGRGSYSRSTSSIREIELIPIESVIHLSWIARRMVSAGYLRECIQVYGSVRKSAVDSSFRRLGIEKLSIGDVQRLNWEALEQKIRRWIRAAKICVRVVFASEKLLCEHVFESVGAVNIHEACFMETVKGPAIQLFNFAEAISISRRSPEKLFKILDLHDALIELLPDIESVFDLKSSDSIRVQAAEILSRLAEAARGILSEFENAVLREPSRVPVPGGTIHPLTRYVMNYISLISEYRPTLIDLIMSKPSRNATDSNTPDFDFSELENNKGPLALHLIWIIVILQFNLEGKSKYYKNAALSHLFIMNNAHYIVQKIKGSPELREMIGDLYLRKLTGKFRQAATYYQRAAWVKVLYCLRDEGLHTKGSFSSGVSRSALRERFKSFNALFEEVHRVQSQWLVPDSQLREELKISILEKLSPAYRSFLGRFRSHIESGKHPENYIKISVEDLETEVLDLFEGYSATQHLRRRSE

SEQ ID NO: 91259 - protein, 549 aa, Arabidopsis thaliana
  peptide (1)..(549): Ceres Seq. ID no. 12727021
  misc_feature (1)..(536): Pfam Name: Exo70 exocyst complex subunit Pfam Description: Exo70 exocyst complex subunit
  misc_feature (1)..(546): Homolog of NCBI NO: 15221040 NR Description: hypothetical protein; protein id: At1g54090.1, by cDNA: gi_20260593 [Arabidopsis thaliana]
  misc_feature (1)..(547): Homolog of NCBI NO: 30682979 NR Description: exocyst subunit EXO70 family [Arabidopsis >gi|9294634|dbj|BAB02973.1| gb|AAD25781.1~gene_id:MAG2.5~strong
  misc_feature (49)..(547): Homolog of NCBI NO: 23270388 NR Description: unknown protein [Arabidopsis thaliana]
  misc_feature (82)..(537): Homolog of NCBI NO: 19386798 NR Description: putative leucine zipper protein [Oryza sativa
  misc_feature (1)..(45): Homolog of NCBI NO: 19386798 NR Description: putative leucine zipper protein [Oryza sativa
  misc_feature (95)..(547): Homolog of NCBI NO: 38346639 NR Description: OSJNBa0072D21.9 [Oryza sativa (japonica
  misc_feature (1)..(43): Homolog of NCBI NO: 38346639 NR Description: OSJNBa0072D21.9 [Oryza sativa (japonica
  misc_feature (1)..(548): Homolog of NCBI NO: 9758920 NR Description: gb|AAD25781.1~gene_id:MXI22.10~strong similarity
  misc_feature (1)..(548): Homolog of NCBI NO: 30695880 NR Description: exocyst subunit EXO70 family [Arabidopsis
  misc_feature (96)..(545): Homolog of NCBI NO: 22326587 NR Description: putative protein; protein id: At5g03540.1, by cDNA: gi_18176063 [Arabidopsis thaliana]
MARLEDEFRNILVSHSSPINSDSLMLSSSSSSHLEVDEDGSSSNNGNEEDDQQEEEETDLLKRSGSSASTGSATVRLPTGRGSYSRSTSSIREIELIPIESVIHLSWIARRMVSAGYLRECIQVYGSVRKSAVDSSFRRLGIEKLSIGDVQRLNWEALEQKIRRWIRAAKICVRVVFASEKLLCEHVFESVGAVNIHEACFMETVKGPAIQLFNFAEAISISRRSPEKLFKILDLHDALIELLPDIESVFDLKSSDSIRVQAAEILSRLAEAARGILSEFENAVLREPSRVPVPGGTIHPLTRYVMNYISLISEYRPTLIDLIMSKPSRNATDSNTPDFDFSELENNKGPLALHLIWIIVILQFNLEGKSKYYKNAALSHLFIMNNAHYIVQKIKGSPELREMIGDLYLRKLTGKFRQAATYYQRAAWVKVLYCLRDEGLHTKGSFSSGVSRSALRERFKSFNALFEEVHRVQSQWLVPDSQLREELKISILEKLSPAYRSFLGRFRSHIESGKHPENYIKISVEDLETEVLDLFEGYSATQHLRRRSE

SEQ ID NO: 91260 - DNA, 567 bp, Arabidopsis thaliana
  misc_feature (1)..(567): Ceres Seq. ID no. 12727022
  misc_feature: MA Experiment ID: 20000495 Result: Up-regulated in Transcription
  misc_feature: MA Experiment 20000495 PARAMETER Experiment Name: At_Guard_Cells_P Parameter: Harvest Date Value: 8/2/2002
  misc_feature: MA Experiment 20000495 PARAMETER Experiment Name: At_Guard_Cells_P Parameter: Organism Value: A. thaliana
  misc_feature: MA Experiment 20000495 PARAMETER Experiment Name: At_Guard_Cells_P Parameter: Tissue Value: Guard Cells vs. Leaves
  misc_feature: MA Experiment ID: 20000496 Result: Up-regulated in Transcription
  misc_feature: MA Experiment 20000496 PARAMETER Experiment Name: At_Guard_Cells_P Parameter: Harvest Date Value: 7/19/2002
  misc_feature: MA Experiment 20000496 PARAMETER Experiment Name: At_Guard_Cells_P Parameter: Organism Value: Canola
  misc_feature: MA Experiment 20000496 PARAMETER Experiment Name: At_Guard_Cells_P Parameter: Tissue Value: Guard Cells vs. Leaves
  misc_feature: MA Experiment ID: 20001451 Result: Up-regulated in Transcription
  misc_feature: MA Experiment 20001451 PARAMETER Experiment Name: At_Far-red-induction_P Parameter: Age (day) Value: 7
  misc_feature: MA Experiment 20001451 PARAMETER Experiment Name: At_Far-red-induction_P Parameter: Light Value: Far-red vs. White
  misc_feature: MA Experiment 20001451 PARAMETER Experiment Name: At_Far-red-induction_P Parameter: Organism Value: A. thaliana
  misc_feature: MA Experiment 20001451 PARAMETER Experiment Name: At_Far-red-induction_P Parameter: Plant Line Value: Columbia
  misc_feature: MA Experiment 20001451 PARAMETER Experiment Name: At_Far-red-induction_P Parameter: Timepoint (hr) Value: 24
  misc_feature: MA Experiment 20001451 PARAMETER Experiment Name: At_Far-red-induction_P Parameter: Tissue Value: Whole Plant
atggcgaggatcatcagaagaccgttaaatttgacggcggccgtccggttccgactttctccgttgtctccattctccggtaactctggttctattaactcggaaacgactagttggtctgagttaattcgagtaccgagtttagtcgagggatgcgattacaagcactggctggttctcatgaagcctcccaatggatacccaactcgaaatcacattgtccaaagctttgtcgaaaccctagccatggctctagggagcgaagaagaagctaagagatcgatatactctgtatctacaaagtactactatgcatttggctgcaggattcatgaacctttgacttacaagattagatctctgcctgatgttaaatgggttttaccagattcgtttatagtggatggtgacaatagatacggaggagagccgtttgtcgatggagaagttgttccgtatgatgagaagtatcatgcggactggctacgagatcaaactgatgaggatgctaaaagcggagtagtcaaaaagaagcataggaggaaaagaaagaagaagttgatttaa

SEQ ID NO: 91261 - protein, 188 aa, Arabidopsis thaliana
  peptide (1)..(188): Ceres Seq. ID no. 12727023
  misc_feature (1)..(188): Homolog of NCBI NO: 15218508 NR Description: DAG-like protein; protein id: At1g72530.1
  misc_feature (29)..(164): Homolog of NCBI NO: 18400602 NR Description: expressed protein; protein id: At3g15000.1, by cDNA: gi_16226542 [Arabidopsis thaliana] Unknown mitochondrial protein At3g15000
  misc_feature (25)..(167): Homolog of NCBI NO: 15219250 NR Description: plastid protein, putative; protein id: [Arabidopsis thaliana] >gi|7769870|gb|AAF69548.1|AC008007_23
  misc_feature (21)..(152): Homolog of NCBI NO: 27754695 NR Description: putative DAG protein [Arabidopsis thaliana]
  misc_feature (21)..(152): Homolog of NCBI NO: 15230785 NR Description: DAG protein, putative; protein id: At3g06790.1 thaliana] >gi|7549634|gb|AAF63819.1| DAG protein, putative
  misc_feature (9)..(184): Homolog of NCBI NO: 15223247 NR Description: plastid protein, putative; protein id: supported by cDNA: gi_17381077, supported by cDNA: gi_20465720
  misc_feature (11)..(151): Homolog of NCBI NO: 38344141 NR Description: OSJNBa0041A02.8 [Oryza sativa (japonica
  misc_feature (26)..(151): Homolog of NCBI NO: 2440029 NR Description: DAL1 protein [Arabidopsis thaliana]
  misc_feature (26)..(151): Homolog of NCBI NO: 15226108 NR Description: plastid protein; protein id: At2g33430.1, by cDNA: 8717., supported by cDNA: gi_17933284, supported by
  misc_feature (26)..(151): Homolog of NCBI NO: 21617909 NR Description: plastid protein [Arabidopsis thaliana]
MARIIRRPLNLTAAVRFRLSPLSPFSGNSGSINSETTSWSELIRVPSLVEGCDYKHWLVLMKPPNGYPTRNHIVQSFVETLAMALGSEEEAKRSIYSVSTKYYYAFGCRIHEPLTYKIRSLPDVKWVLPDSFIVDGDNRYGGEPFVDGEVVPYDEKYHADWLRDQTDEDAKSGVVKKKHRRKRKKKLI

SEQ ID NO: 91262 - protein, 128 aa, Arabidopsis thaliana
  peptide (1)..(128): Ceres Seq. ID no. 12727024
  misc_feature (1)..(128): Homolog of NCBI NO: 15218508 NR Description: DAG-like protein; protein id: At1g72530.1
  misc_feature (1)..(104): Homolog of NCBI NO: 18400602 NR Description: expressed protein; protein id: At3g15000.1, by cDNA: gi_16226542 [Arabidopsis thaliana] Unknown mitochondrial protein At3g15000
  misc_feature (1)..(107): Homolog of NCBI NO: 15219250 NR Description: plastid protein, putative; protein id: [Arabidopsis thaliana] >gi|7769870|gb|AAF69548.1|AC008007_23
  misc_feature (1)..(92): Homolog of NCBI NO: 27754695 NR Description: putative DAG protein [Arabidopsis thaliana]
  misc_feature (1)..(92): Homolog of NCBI NO: 15230785 NR Description: DAG protein, putative; protein id: At3g06790.1 thaliana] >gi|7549634|gb|AAF63819.1| DAG protein, putative
  misc_feature (1)..(124): Homolog of NCBI NO: 15223247 NR Description: plastid protein, putative; protein id: supported by cDNA: gi_17381077, supported by cDNA: gi_20465720
  misc_feature (1)..(91): Homolog of NCBI NO: 38344141 NR Description: OSJNBa0041A02.8 [Oryza sativa (japonica
  misc_feature (1)..(91): Homolog of NCBI NO: 2440029 NR Description: DAL1 protein [Arabidopsis thaliana]
  misc_feature (1)..(91): Homolog of NCBI NO: 15226108 NR Description: plastid protein; protein id: At2g33430.1, by cDNA: 8717., supported by cDNA: gi_17933284, supported by
  misc_feature (1)..(91): Homolog of NCBI NO: 21617909 NR Description: plastid protein [Arabidopsis thaliana]
MKPPNGYPTRNHIVQSFVETLAMALGSEEEAKRSIYSVSTKYYYAFGCRIHEPLTYKIRSLPDVKWVLPDSFIVDGDNRYGGEPFVDGEVVPYDEKYHADWLRDQTDEDAKSGVVKKKHRRKRKKKLI

SEQ ID NO: 91263 - protein, 106 aa, Arabidopsis thaliana
  peptide (1)..(106): Ceres Seq. ID no. 12727025
  misc_feature (1)..(106): Homolog of NCBI NO: 15218508 NR Description: DAG-like protein; protein id: At1g72530.1
  misc_feature (1)..(82): Homolog of NCBI NO: 18400602 NR Description: expressed protein; protein id: At3g15000.1, by cDNA: gi_16226542 [Arabidopsis thaliana] Unknown mitochondrial protein At3g15000
  misc_feature (1)..(85): Homolog of NCBI NO: 15219250 NR Description: plastid protein, putative; protein id: [Arabidopsis thaliana] >gi|7769870|gb|AAF69548.1|AC008007_23
  misc_feature (1)..(70): Homolog of NCBI NO: 27754695 NR Description: putative DAG protein [Arabidopsis thaliana]
  misc_feature (1)..(70): Homolog of NCBI NO: 15230785 NR Description: DAG protein, putative; protein id: At3g06790.1 thaliana] >gi|7549634|gb|AAF63819.1| DAG protein, putative
  misc_feature (1)..(102): Homolog of NCBI NO: 15223247 NR Description: plastid protein, putative; protein id: supported by cDNA: gi_17381077, supported by cDNA: gi_20465720
  misc_feature (1)..(69): Homolog of NCBI NO: 38344141 NR Description: OSJNBa0041A02.8 [Oryza sativa (japonica
  misc_feature (1)..(69): Homolog of NCBI NO: 2440029 NR Description: DAL1 protein [Arabidopsis thaliana]
  misc_feature (1)..(69): Homolog of NCBI NO: 15226108 NR Description: plastid protein; protein id: At2g33430.1, by cDNA: 8717., supported by cDNA: gi_17933284, supported by
  misc_feature (1)..(69): Homolog of NCBI NO: 25370552 NR Description: DAG protein homolog [imported] - Arabidopsis >gi|2246378|emb|CAB06698.1| plastid protein [Arabidopsis
MALGSEEEAKRSIYSVSTKYYYAFGCRIHEPLTYKIRSLPDVKWVLPDSFIVDGDNRYGGEPFVDGEVVPYDEKYHADWLRDQTDEDAKSGVVKKKHRRKRKKKLI

SEQ ID NO: 91264 - DNA, 1448 bp, Arabidopsis thaliana
  misc_feature (1)..(1448): Ceres Seq. ID no. 12727060
  misc_feature: MA Experiment ID: 20000184 Result: Down-regulated in Transcription
  misc_feature: MA Experiment 20000184 PARAMETER Experiment Name: At_Shoots__P Parameter: Age (day) Value: 7
  misc_feature: MA Experiment 20000184 PARAMETER Experiment Name: At_Shoots__P Parameter: Tissue Value: Shoots vs. Whole Plant
  misc_feature: MA Experiment ID: 20000185 Result: Up-regulated in Transcription
  misc_feature: MA Experiment 20000185 PARAMETER Experiment Name: At_Roots__P Parameter: Age (day) Value: 7 vs. 21
  misc_feature: MA Experiment 20000185 PARAMETER Experiment Name: At_Roots__P Parameter: Organism Value: A. thaliana
  misc_feature: MA Experiment 20000185 PARAMETER Experiment Name: At_Roots__P Parameter: Tissue Value: Roots vs. Whole Plant
  misc_feature: MA Experiment ID: 20000264 Result: Up-regulated in Transcription
  misc_feature: MA Experiment 20000264 PARAMETER Experiment Name: At_Open_Flower_P Parameter: Age (day) Value: 21
  misc_feature: MA Experiment 20000264 PARAMETER Experiment Name: At_Open_Flower_P Parameter: Plant Line Value: WS
  misc_feature: MA Experiment 20000264 PARAMETER Experiment Name: At_Open_Flower_P Parameter: Tissue Value: Open Flower vs. Whole Plant
  misc_feature: MA Experiment ID: 20000438 Result: Down-regulated in Transcription
  misc_feature: MA Experiment 20000438 PARAMETER Experiment Name: At_Shoots__P Parameter: Age (day) Value: 14
  misc_feature: MA Experiment 20000438 PARAMETER Experiment Name: At_Shoots__P Parameter: Tissue Value: Shoots vs. Whole Plant
  misc_feature: MA Experiment ID: 20000439 Result: Up-regulated in Transcription
  misc_feature: MA Experiment 20000439 PARAMETER Experiment Name: At_Roots__P Parameter: Age (day) Value: 14 vs. 21
  misc_feature: MA Experiment 20000439 PARAMETER Experiment Name: At_Roots__P Parameter: Organism Value: A. thaliana
  misc_feature: MA Experiment 20000439 PARAMETER Experiment Name: At_Roots__P Parameter: Tissue Value: Roots vs. Whole Plant
  misc_feature: MA Experiment ID: 20000495 Result: Up-regulated in Transcription
  misc_feature: MA Experiment 20000495 PARAMETER Experiment Name: At_Guard_Cells_P Parameter: Harvest Date Value: 8/2/2002
  misc_feature: MA Experiment 20000495 PARAMETER Experiment Name: At_Guard_Cells_P Parameter: Organism Value: A. thaliana
  misc_feature: MA Experiment 20000495 PARAMETER Experiment Name: At_Guard_Cells_P Parameter: Tissue Value: Guard Cells vs. Leaves
  misc_feature: MA Experiment ID: 20000794 Result: Up-regulated in Transcription
  misc_feature: MA Experiment 20000794 PARAMETER Experiment Name: At_Petals_P Parameter: Age (day) Value: 23-25 days
  misc_feature: MA Experiment 20000794 PARAMETER Experiment Name: At_Petals_P Parameter: Plant Line Value: WS
  misc_feature: MA Experiment 20000794 PARAMETER Experiment Name: At_Petals_P Parameter: Tissue Value: Petals vs. Whole plant
aactttcaagattcaacaaaacccactttctatagttttatatgttcatttttttctgctaaagtatttttatatgttcatatttctcttttgtgccatctttttaataatttaatcttcctacagaagataatctccaacaaaagttttttcttacaagaaagattccgagaagtcttttgtgttttcaacaaactccagggttttttcaatgaacatgagcaataaacgtaatcagcaaccttcgtatattgctgatcatttcagcagtttggatcaggtgataacttctctgagagaagctggacttgaatcttcaaatctgattctaggaattgactttaccaagagcaatgagtggacagggagatattcattcaatagaaaaagccttcatgccattggtaaaagacagaatccatatgagaaagcaatatcgattattggtcgtactttgtctccctttgatgaagatgatcttataccttgtttcggttttggcgatgtaacaacgcgagatcaatatgtattcagcttttatcccgagaacaaaagctgcgacggattggaaaacgcagttaaaagatatagagagattgtcccacatttgaagttgtccggtcctacctcgtttgcaccggttattgatgctgccatcaacatagttgagcagaacaatatgcaataccatgttctcgtcattatcgcagatggtcaggtcacaagaaatccagatgtgccgcttggtcgacttagtccacaggaagaagctactatgaactcgataatggcagcgagccattacccattgtcgatagtcttggttggagtaggagatggaccatgggacacaatgaaacaattcgatgacaatattcctcaccgtgaattcgataacttccagtttgtaaacttcacgaagataatgtcagagcacaaagatgcggctaagaaggaggctgctttcgcactcgcagctctcatggagatcccttttcaatacaaggctacattaagtctcaatagaaaaccagtgcgcagttcccatcagcaccacaagccactcccgccaccaccagaggttatagagcgtgacaatgctgttagatcggtgccaaatcagatgacagaaactgcagagaaaagtgacagactcgctccttccacagtgccggtatgcccgatttgcttgacgaatccaaaggacatggcttttagctgcggtcacacgacatgcaaggaatgcggagttgttatcacaacatgcccactatgcagacaaccaataacaacaaggataaggctgtacacttgactcggaaaaattcttagagatgagacaaattatatggttaagcacttgagcttcatgtttatacttctgtagaacattgtacagtccaagcagaagaattgtaaagcataaatctcgagttgtagttcatatg

SEQ ID NO: 91265 - protein, 367 aa, Arabidopsis thaliana
  peptide (1)..(367): Ceres Seq. ID no. 12727061
  misc_feature (1)..(340): Homolog of NCBI NO: 8777310 NR Description: gb|AAF01562.1~gene_id:MBM17.7~strong similarity
  misc_feature (1)..(367): Homolog of NCBI NO: 22328041 NR Description: putative protein; protein id: At5g63970.1, by cDNA: gi_20259325 [Arabidopsis thaliana] unknown protein [Arabidopsis thaliana]
  misc_feature (10)..(367): Homolog of NCBI NO: 34905794 NR Description: P0401G10.23 [Oryza sativa (japonica
  misc_feature (6)..(366): Homolog of NCBI NO: 15232157 NR Description: unknown protein; protein id: At3g01650.1 thaliana] >gi|6016736|gb|AAF01562.1|AC009325_32 unknown protein
  misc_feature (1)..(288): Homolog of NCBI NO: 15241400 NR Description: putative protein; protein id: At5g14420.1, by cDNA: gi_20466261 [Arabidopsis thaliana]
  misc_feature (284)..(366): Homolog of NCBI NO: 15241400 NR Description: putative protein; protein id: At5g14420.1, by cDNA: gi_20466261 [Arabidopsis thaliana]
  misc_feature (4)..(367): Homolog of NCBI NO: 18412353 NR Description: expressed protein; protein id: At1g79380.1, by cDNA: gi_13937148 [Arabidopsis thaliana]
  misc_feature (1)..(366): Homolog of NCBI NO: 18408863 NR Description: F12A21.7; protein id: At1g67800.1, supported by
  misc_feature (1)..(366): Homolog of NCBI NO: 30697566 NR Description: copine-related [Arabidopsis thaliana]
  misc_feature (12)..(288): Homolog of NCBI NO: 20804894 NR Description: P0497A05.19 [Oryza sativa (japonica
MNMSNKRNQQPSYIADHFSSLDQVITSLREAGLESSNLILGIDFTKSNEWTGRYSFNRKSLHAIGKRQNPYEKAISIIGRTLSPFDEDDLIPCFGFGDVTTRDQYVFSFYPENKSCDGLENAVKRYREIVPHLKLSGPTSFAPVIDAAINIVEQNNMQYHVLVIIADGQVTRNPDVPLGRLSPQEEATMNSIMAASHYPLSIVLVGVGDGPWDTMKQFDDNIPHREFDNFQFVNFTKIMSEHKDAAKKEAAFALAALMEIPFQYKATLSLNRKPVRSSHQHHKPLPPPPEVIERDNAVRSVPNQMTETAEKSDRLAPSTVPVCPICLTNPKDMAFSCGHTTCKECGVVITTCPLCRQPITTRIRLYT

SEQ ID NO: 91266 - protein, 365 aa, Arabidopsis thaliana
  peptide (1)..(365): Ceres Seq. ID no. 12727062
  misc_feature (1)..(338): Homolog of NCBI NO: 8777310 NR Description: gb|AAF01562.1~gene_id:MBM17.7~strong similarity
  misc_feature (1)..(365): Homolog of NCBI NO: 22328041 NR Description: putative protein; protein id: At5g63970.1, by cDNA: gi_20259325 [Arabidopsis thaliana] unknown protein [Arabidopsis thaliana]
  misc_feature (8)..(365): Homolog of NCBI NO: 34905794 NR Description: P0401G10.23 [Oryza sativa (japonica
  misc_feature (4)..(364): Homolog of NCBI NO: 15232157 NR Description: unknown protein; protein id: At3g01650.1 thaliana] >gi|6016736|gb|AAF01562.1|AC009325_32 unknown protein
  misc_feature (1)..(286): Homolog of NCBI NO: 15241400 NR Description: putative protein; protein id: At5g14420.1, by cDNA: gi_20466261 [Arabidopsis thaliana]
  misc_feature (282)..(364): Homolog of NCBI NO: 15241400 NR Description: putative protein; protein id: At5g14420.1, by cDNA: gi_20466261 [Arabidopsis thaliana]
  misc_feature (2)..(365): Homolog of NCBI NO: 18412353 NR Description: expressed protein; protein id: At1g79380.1, by cDNA: gi_13937148 [Arabidopsis thaliana]
  misc_feature (1)..(364): Homolog of NCBI NO: 18408863 NR Description: F12A21.7; protein id: At1g67800.1, supported by
  misc_feature (1)..(364): Homolog of NCBI NO: 30697566 NR Description: copine-related [Arabidopsis thaliana]
  misc_feature (10)..(286): Homolog of NCBI NO: 20804894 NR Description: P0497A05.19 [Oryza sativa (japonica
MSNKRNQQPSYIADHFSSLDQVITSLREAGLESSNLILGIDFTKSNEWTGRYSFNRKSLHAIGKRQNPYEKAISIIGRTLSPFDEDDLIPCFGFGDVTTRDQYVFSFYPENKSCDGLENAVKRYREIVPHLKLSGPTSFAPVIDAAINIVEQNNMQYHVLVIIADGQVTRNPDVPLGRLSPQEEATMNSIMAASHYPLSIVLVGVGDGPWDTMKQFDDNIPHREFDNFQFVNFTKIMSEHKDAAKKEAAFALAALMEIPFQYKATLSLNRKPVRSSHQHHKPLPPPPEVIERDNAVRSVPNQMTETAEKSDRLAPSTVPVCPICLTNPKDMAFSCGHTTCKECGVVITTCPLCRQPITTRIRLYT

SEQ ID NO: 91267 - protein, 211 aa, Arabidopsis thaliana
  peptide (1)..(211): Ceres Seq. ID no. 12727063
  misc_feature (1)..(184): Homolog of NCBI NO: 8777310 NR Description: gb|AAF01562.1~gene_id:MBM17.7~strong similarity
  misc_feature (1)..(211): Homolog of NCBI NO: 22328041 NR Description: putative protein; protein id: At5g63970.1, by cDNA: gi_20259325 [Arabidopsis thaliana] unknown protein [Arabidopsis thaliana]
  misc_feature (1)..(211): Homolog of NCBI NO: 34905794 NR Description: P0401G10.23 [Oryza sativa (japonica
  misc_feature (1)..(210): Homolog of NCBI NO: 15232157 NR Description: unknown protein; protein id: At3g01650.1 thaliana] >gi|6016736|gb|AAF01562.1|AC009325_32 unknown protein
  misc_feature (1)..(132): Homolog of NCBI NO: 15241400 NR Description: putative protein; protein id: At5g14420.1, by cDNA: gi_20466261 [Arabidopsis thaliana]
  misc_feature (128)..(210): Homolog of NCBI NO: 15241400 NR Description: putative protein; protein id: At5g14420.1, by cDNA: gi_20466261 [Arabidopsis thaliana]
  misc_feature (1)..(211): Homolog of NCBI NO: 18412353 NR Description: expressed protein; protein id: At1g79380.1, by cDNA: gi_13937148 [Arabidopsis thaliana]
  misc_feature (1)..(210): Homolog of NCBI NO: 18408863 NR Description: F12A21.7; protein id: At1g67800.1, supported by
  misc_feature (1)..(210): Homolog of NCBI NO: 30697566 NR Description: copine-related [Arabidopsis thaliana]
  misc_feature (1)..(132): Homolog of NCBI NO: 20804894 NR Description: P0497A05.19 [Oryza sativa (japonica
MQYHVLVIIADGQVTRNPDVPLGRLSPQEEATMNSIMAASHYPLSIVLVGVGDGPWDTMKQFDDNIPHREFDNFQFVNFTKIMSEHKDAAKKEAAFALAALMEIPFQYKATLSLNRKPVRSSHQHHKPLPPPPEVIERDNAVRSVPNQMTETAEKSDRLAPSTVPVCPICLTNPKDMAFSCGHTTCKECGVVITTCPLCRQPITTRIRLYT

SEQ ID NO: 91268 - DNA, 1178 bp, Arabidopsis thaliana
  misc_feature (1)..(1178): Ceres Seq. ID no. 12727064
  misc_feature: MA Experiment ID: 20000169 Result: Down-regulated in Transcription
  misc_feature: MA Experiment 20000169 PARAMETER Experiment Name: At_100uM_ABA_P Parameter: Age (day) Value: 14
  misc_feature: MA Experiment 20000169 PARAMETER Experiment Name: At_100uM_ABA_P Parameter: Organism Value: A. thaliana
  misc_feature: MA Experiment 20000169 PARAMETER Experiment Name: At_100uM_ABA_P Parameter: Plant Line Value: WS
  misc_feature: MA Experiment 20000169 PARAMETER Experiment Name: At_100uM_ABA_P Parameter: Timepoint (hr) Value: 6
  misc_feature: MA Experiment 20000169 PARAMETER Experiment Name: At_100uM_ABA_P Parameter: Tissue Value: Aerial
  misc_feature: MA Experiment 20000169 PARAMETER Experiment Name: At_100uM_ABA_P Parameter: Treatment Value: 100uM ABA vs. No Treatment
  misc_feature: MA Experiment ID: 20000173 Result: Down-regulated in Transcription
  misc_feature: MA Experiment 20000173 PARAMETER Experiment Name: At_42deg_Heat_P Parameter: Age (day) Value: 14
  misc_feature: MA Experiment 20000173 PARAMETER Experiment Name: At_42deg_Heat_P Parameter: Organism Value: A. thaliana
  misc_feature: MA Experiment 20000173 PARAMETER Experiment Name: At_42deg_Heat_P Parameter: Plant Line Value: WS
  misc_feature: MA Experiment 20000173 PARAMETER Experiment Name: At_42deg_Heat_P Parameter: Temperature (deg C) Value: 42 vs. 22
  misc_feature: MA Experiment 20000173 PARAMETER Experiment Name: At_42deg_Heat_P Parameter: Timepoint (hr) Value: 6
  misc_feature: MA Experiment 20000173 PARAMETER Experiment Name: At_42deg_Heat_P Parameter: Tissue Value: Aerial
  misc_feature: MA Experiment ID: 20000184 Result: Down-regulated in Transcription
  misc_feature: MA Experiment 20000184 PARAMETER Experiment Name: At_Shoots__P Parameter: Age (day) Value: 7
  misc_feature: MA Experiment 20000184 PARAMETER Experiment Name: At_Shoots__P Parameter: Tissue Value: Shoots vs. Whole Plant
  misc_feature: MA Experiment ID: 20000185 Result: Down-regulated in Transcription
  misc_feature: MA Experiment 20000185 PARAMETER Experiment Name: At_Roots__P Parameter: Age (day) Value: 7 vs. 21
  misc_feature: MA Experiment 20000185 PARAMETER Experiment Name: At_Roots__P Parameter: Organism Value: A. thaliana
  misc_feature: MA Experiment 20000185 PARAMETER Experiment Name: At_Roots__P Parameter: Tissue Value: Roots vs. Whole Plant
  misc_feature: MA Experiment ID: 20000234 Result: Down-regulated in Transcription
  misc_feature: MA Experiment 20000234 PARAMETER Experiment Name: At_Siliques_P Parameter: Age (day) Value: 21
  misc_feature: MA Experiment 20000234 PARAMETER Experiment Name: At_Siliques_P Parameter: Organism Value: A. thaliana
  misc_feature: MA Experiment 20000234 PARAMETER Experiment Name: At_Siliques_P Parameter: Plant Line Value: WS
  misc_feature: MA Experiment 20000234 PARAMETER Experiment Name: At_Siliques_P Parameter: Tissue Value: Less Than 5mm Siliques vs. Whole Plant
  misc_feature: MA Experiment ID: 20000235 Result: Down-regulated in Transcription
  misc_feature: MA Experiment 20000235 PARAMETER Experiment Name: At_Siliques_P Parameter: Age (day) Value: 21
  misc_feature: MA Experiment 20000235 PARAMETER Experiment Name: At_Siliques_P Parameter: Organism Value: A. thaliana
  misc_feature: MA Experiment 20000235 PARAMETER Experiment Name: At_Siliques_P Parameter: Plant Line Value: WS
  misc_feature: MA Experiment 20000235 PARAMETER Experiment Name: At_Siliques_P Parameter: Tissue Value: 5-10mm Siliques vs. Whole Plant
  misc_feature: MA Experiment ID: 20000264 Result: Down-regulated in Transcription
  misc_feature: MA Experiment 20000264 PARAMETER Experiment Name: At_Open_Flower_P Parameter: Age (day) Value: 21
  misc_feature: MA Experiment 20000264 PARAMETER Experiment Name: At_Open_Flower_P Parameter: Plant Line Value: WS
  misc_feature: MA Experiment 20000264 PARAMETER Experiment Name: At_Open_Flower_P Parameter: Tissue Value: Open Flower vs. Whole Plant
  misc_feature: MA Experiment ID: 20000265 Result: Down-regulated in Transcription
  misc_feature: MA Experiment 20000265 PARAMETER Experiment Name: At_Open_Flower_P Parameter: Age (day) Value: 21
  misc_feature: MA Experiment 20000265 PARAMETER Experiment Name: At_Open_Flower_P Parameter: Plant Line Value: WS
  misc_feature: MA Experiment 20000265 PARAMETER Experiment Name: At_Open_Flower_P Parameter: Tissue Value: Closed Flower vs. Whole Plant
  misc_feature: MA Experiment ID: 20000286 Result: Down-regulated in Transcription
  misc_feature: MA Experiment 20000286 PARAMETER Experiment Name: At_Open_Flower_P Parameter: Age (day) Value: 21
  misc_feature: MA Experiment 20000286 PARAMETER Experiment Name: At_Open_Flower_P Parameter: Plant Line Value: WS
  misc_feature: MA Experiment 20000286 PARAMETER Experiment Name: At_Open_Flower_P Parameter: Tissue Value: Half Open vs. Whole Plant
  misc_feature: MA Experiment ID: 20000438 Result: Down-regulated in Transcription
  misc_feature: MA Experiment 20000438 PARAMETER Experiment Name: At_Shoots__P Parameter: Age (day) Value: 14
  misc_feature: MA Experiment 20000438 PARAMETER Experiment Name: At_Shoots__P Parameter: Tissue Value: Shoots vs. Whole Plant
  misc_feature: MA Experiment ID: 20000439 Result: Down-regulated in Transcription
  misc_feature: MA Experiment 20000439 PARAMETER Experiment Name: At_Roots__P Parameter: Age (day) Value: 14 vs. 21
  misc_feature: MA Experiment 20000439 PARAMETER Experiment Name: At_Roots__P Parameter: Organism Value: A. thaliana
  misc_feature: MA Experiment 20000439 PARAMETER Experiment Name: At_Roots__P Parameter: Tissue Value: Roots vs. Whole Plant
  misc_feature: MA Experiment ID: 20000453 Result: Down-regulated in Transcription
  misc_feature: MA Experiment 20000453 PARAMETER Experiment Name: At_100uM_ABA_P Parameter: Age (day) Value: 15
  misc_feature: MA Experiment 20000453 PARAMETER Experiment Name: At_100uM_ABA_P Parameter: Organism Value: A. thaliana
  misc_feature: MA Experiment 20000453 PARAMETER Experiment Name: At_100uM_ABA_P Parameter: Plant Line Value: WS
  misc_feature: MA Experiment 20000453 PARAMETER Experiment Name: At_100uM_ABA_P Parameter: Timepoint (hr) Value: 24
  misc_feature: MA Experiment 20000453 PARAMETER Experiment Name: At_100uM_ABA_P Parameter: Tissue Value: Aerial
  misc_feature: MA Experiment 20000453 PARAMETER Experiment Name: At_100uM_ABA_P Parameter: Treatment Value: 100uM ABA vs. No Treatment
  misc_feature: MA Experiment ID: 20000456 Result: Up-regulated in Transcription
  misc_feature: MA Experiment 20000456 PARAMETER Experiment Name: At_100uM_BA_P Parameter: Age (day) Value: 14
  misc_feature: MA Experiment 20000456 PARAMETER Experiment Name: At_100uM_BA_P Parameter: Organism Value: A. thaliana
  misc_feature: MA Experiment 20000456 PARAMETER Experiment Name: At_100uM_BA_P Parameter: Plant Line Value: WS
  misc_feature: MA Experiment 20000456 PARAMETER Experiment Name: At_100uM_BA_P Parameter: Timepoint (hr) Value: 6
  misc_feature: MA Experiment 20000456 PARAMETER Experiment Name: At_100uM_BA_P Parameter: Tissue Value: Aerial
  misc_feature: MA Experiment 20000456 PARAMETER Experiment Name: At_100uM_BA_P Parameter: Treatment Value: 100uM BA vs. No Treatment
  misc_feature: MA Experiment ID: 20000527 Result: Down-regulated in Transcription
  misc_feature: MA Experiment 20000527 PARAMETER Experiment Name: At_10percent_PEG_P Parameter: Age (day) Value: 20
  misc_feature: MA Experiment 20000527 PARAMETER Experiment Name: At_10percent_PEG_P Parameter: Organism Value: A. thaliana
  misc_feature: MA Experiment 20000527 PARAMETER Experiment Name: At_10percent_PEG_P Parameter: Plant Line Value: WS
  misc_feature: MA Experiment 20000527 PARAMETER Experiment Name: At_10percent_PEG_P Parameter: Timepoint (day) Value: 20
  misc_feature: MA Experiment 20000527 PARAMETER Experiment Name: At_10percent_PEG_P Parameter: Tissue Value: Whole Plant
  misc_feature: MA Experiment 20000527 PARAMETER Experiment Name: At_10percent_PEG_P Parameter: Treatment Value: 10percent PEG vs. No Treatment
  misc_feature: MA Experiment ID: 20000606 Result: Up-regulated in Transcription
  misc_feature: MA Experiment 20000606 PARAMETER Experiment Name: At_CS8548_Mutant_P Parameter: Age (day) Value: 14
  misc_feature: MA Experiment 20000606 PARAMETER Experiment Name: At_CS8548_Mutant_P Parameter: Plant Line Value: CS8548 vs. wt
  misc_feature: MA Experiment 20000606 PARAMETER Experiment Name: At_CS8548_Mutant_P Parameter: Tissue Value: Whole Plant
  misc_feature: MA Experiment ID: 20000709 Result: Down-regulated in Transcription
  misc_feature: MA Experiment 20000709 PARAMETER Experiment Name: At_15mM_NH4NO3_L-to-H_P Parameter: Age (hr) Value: 14
  misc_feature: MA Experiment 20000709 PARAMETER Experiment Name: At_15mM_NH4NO3_L-to-H_P Parameter: Organism Value: A. thaliana
  misc_feature: MA Experiment 20000709 PARAMETER Experiment Name: At_15mM_NH4NO3_L-to-H_P Parameter: Plant Line Value: WS
  misc_feature: MA Experiment 20000709 PARAMETER Experiment Name: At_15mM_NH4NO3_L-to-H_P Parameter: Timepoint (hr) Value: 4
  misc_feature: MA Experiment 20000709 PARAMETER Experiment Name: At_15mM_NH4NO3_L-to-H_P Parameter: Tissue Value: Aerial
  misc_feature: MA Experiment 20000709 PARAMETER Experiment Name: At_15mM_NH4NO3_L-to-H_P Parameter: Treatment Value: 15mM NH4NO3 vs. 30mM Mannitol
  misc_feature: MA Experiment ID: 20000794 Result: Down-regulated in Transcription
  misc_feature: MA Experiment 20000794 PARAMETER Experiment Name: At_Petals_P Parameter: Age (day) Value: 23-25 days
  misc_feature: MA Experiment 20000794 PARAMETER Experiment Name: At_Petals_P Parameter: Plant Line Value: WS
  misc_feature: MA Experiment 20000794 PARAMETER Experiment Name: At_Petals_P Parameter: Tissue Value: Petals vs. Whole plant
  misc_feature: MA Experiment ID: 20001555 Result: Down-regulated in Transcription
  misc_feature: MA Experiment 20001555 PARAMETER Experiment Name: At_Drought_Soil_Dry_P Parameter: Age (day) Value: 24
  misc_feature: MA Experiment 20001555 PARAMETER Experiment Name: At_Drought_Soil_Dry_P Parameter: Organism Value: A. thaliana
  misc_feature: MA Experiment 20001555 PARAMETER Experiment Name: At_Drought_Soil_Dry_P Parameter: Plant Line Value: WS
  misc_feature: MA Experiment 20001555 PARAMETER Experiment Name: At_Drought_Soil_Dry_P Parameter: Post Timepoint (hr) Value: None
  misc_feature: MA Experiment 20001555 PARAMETER Experiment Name: At_Drought_Soil_Dry_P Parameter: Post-Treatment Value: None
  misc_feature: MA Experiment 20001555 PARAMETER Experiment Name: At_Drought_Soil_Dry_P Parameter: Timepoint (day) Value: 10
  misc_feature: MA Experiment 20001555 PARAMETER Experiment Name: At_Drought_Soil_Dry_P Parameter: Treatment Value: Drought vs. No Drought
  misc_feature: MA Experiment ID: 20001556 Result: Down-regulated in Transcription
  misc_feature: MA Experiment 20001556 PARAMETER Experiment Name: At_Drought_Soil_Dry_P Parameter: Age (day) Value: 26
  misc_feature: MA Experiment 20001556 PARAMETER Experiment Name: At_Drought_Soil_Dry_P Parameter: Organism Value: A. thaliana
  misc_feature: MA Experiment 20001556 PARAMETER Experiment Name: At_Drought_Soil_Dry_P Parameter: Plant Line Value: WS
  misc_feature: MA Experiment 20001556 PARAMETER Experiment Name: At_Drought_Soil_Dry_P Parameter: Post Timepoint (hr) Value: None
  misc_feature: MA Experiment 20001556 PARAMETER Experiment Name: At_Drought_Soil_Dry_P Parameter: Post-Treatment Value: None
  misc_feature: MA Experiment 20001556 PARAMETER Experiment Name: At_Drought_Soil_Dry_P Parameter: Timepoint (day) Value: 12
  misc_feature: MA Experiment 20001556 PARAMETER Experiment Name: At_Drought_Soil_Dry_P Parameter: Treatment Value: Drought vs. No Drought
  misc_feature: MA Experiment ID: 20001560 Result: Down-regulated in Transcription
  misc_feature: MA Experiment 20001560 PARAMETER Experiment Name: At_Drought_Soil_Dry_P Parameter: Age (day) Value: 28
  misc_feature: MA Experiment 20001560 PARAMETER Experiment Name: At_Drought_Soil_Dry_P Parameter: Organism Value: A. thaliana
  misc_feature: MA Experiment 20001560 PARAMETER Experiment Name: At_Drought_Soil_Dry_P Parameter: Plant Line Value: WS
  misc_feature: MA Experiment 20001560 PARAMETER Experiment Name: At_Drought_Soil_Dry_P Parameter: Post Timepoint (hr) Value: None
  misc_feature: MA Experiment 20001560 PARAMETER Experiment Name: At_Drought_Soil_Dry_P Parameter: Post-Treatment Value: None
  misc_feature: MA Experiment 20001560 PARAMETER Experiment Name: At_Drought_Soil_Dry_P Parameter: Timepoint (day) Value: 14
  misc_feature: MA Experiment 20001560 PARAMETER Experiment Name: At_Drought_Soil_Dry_P Parameter: Treatment Value: Drought vs. No Drought
  misc_feature: MA Experiment ID: 20001904 Result: Down-regulated in Transcription
  misc_feature: MA Experiment 20001904 PARAMETER Experiment Name: At_Drought_Reproduction_P Parameter: Age (day) Value: 37
  misc_feature: MA Experiment 20001904 PARAMETER Experiment Name: At_Drought_Reproduction_P Parameter: Organism Value: A. thaliana
  misc_feature: MA Experiment 20001904 PARAMETER Experiment Name: At_Drought_Reproduction_P Parameter: Plant Line Value: WS
  misc_feature: MA Experiment 20001904 PARAMETER Experiment Name: At_Drought_Reproduction_P Parameter: Timepoint (day) Value: 7
  misc_feature: MA Experiment 20001904 PARAMETER Experiment Name: At_Drought_Reproduction_P Parameter: Tissue Value: Rosettes
  misc_feature: MA Experiment 20001904 PARAMETER Experiment Name: At_Drought_Reproduction_P Parameter: Treatment Value: Drought vs. No Drought
  misc_feature: MA Experiment ID: 20001905 Result: Down-regulated in Transcription
  misc_feature: MA Experiment 20001905 PARAMETER Experiment Name: At_Drought_Reproduction_P Parameter: Age (day) Value: 40
  misc_feature: MA Experiment 20001905 PARAMETER Experiment Name: At_Drought_Reproduction_P Parameter: Organism Value: A. thaliana
  misc_feature: MA Experiment 20001905 PARAMETER Experiment Name: At_Drought_Reproduction_P Parameter: Plant Line Value: WS
  misc_feature: MA Experiment 20001905 PARAMETER Experiment Name: At_Drought_Reproduction_P Parameter: Timepoint (day) Value: 10
  misc_feature: MA Experiment 20001905 PARAMETER Experiment Name: At_Drought_Reproduction_P Parameter: Tissue Value: Rosettes
  misc_feature: MA Experiment 20001905 PARAMETER Experiment Name: At_Drought_Reproduction_P Parameter: Treatment Value: Drought vs. No Drought
acatagtctattcttgaagcttttcaatgtcttatgagaaggagctagccgctgcaaagaaagccgtcactctagctgctcgtctcagccaggaagtgcagaagactcttttgcaatcccaagtttggaaaaaatccgatagaagtccggttactgcagctgattacggctcacaagctgtggttagtcttgtattggagagggagctccaacctgataaactgtcattagtagctgaagaggaaactggagatctgcggaagaatggaagtgaggcgtttctagaagatattgcaaagcttgtgaaagatactctagcctctgaggaatcgtacaccagctctcctctatccacagatgatgtgttaaatgctatagactgcggtaaatcagaaggcggttgcaaaggttcccactgggttcttgatcctatagatggaaccagaggatttgtaagaggagagcaatacgcggtggggttagccttgcttgtggaaggcaaagtggtgcttggtgtcatggcttgcccaaatcttcctttggcttctgcggtttgcgcgactgataattcttcccaggaagatgttggctgtcttttctttgctacaacgggttcagggacttacgtgcaatcgctcaaaggcaattctctgccacaaaaggtgcaagtgagtagcaatgagaatcttgatgaagcgaagttcttagaatcataccacaaaccaattcccatccatggtaccattgccaagaaactcgggattaaagcattacctgtaaggatcgatagccaagctaagtatgcggctttgtcgcgaggagacgcagagatatacttgcgtttcactctcaatggataccgtgagtgtatttgggaccatgcacctggttcaataatcactacagaagctggaggcgtagtgtgtgatgctacagggaaatctctggacttctcgaaaggaaagtatcttgctcacaaaacggggatcatagttaccaccaagaaactcaagccatggatattgaaggcagtcagagaatccatagaagaagagaatctttatttctgaggcacaacagaaactgtacaatacagtatttgtatttgtctgaactagtaattggtgtatattcttagttcatatatcgtatacatcagatatgaaagatatttttgc

SEQ ID NO: 91269 - protein, 347 aa, Arabidopsis thaliana; identical to SEQ ID NO: 76001
  peptide (1)..(347): Ceres Seq. ID no. 12727065
  misc_feature (1)..(347): Homolog of NCBI NO: 15237589 NR Description: 3(2),5-bisphosphate nucleotidase protein id: At5g64000.1, supported by cDNA: gi_20466006
  misc_feature (1)..(345): Homolog of NCBI NO: 34395640 NR Description: Probable SAL4 phosphatase (3'(2'),5'-bisphosphate
  misc_feature (1)..(345): Homolog of NCBI NO: 15242383 NR Description: 3'(2'),5'-bisphosphate nucleotidase-like protein;
  misc_feature (1)..(343): Homolog of NCBI NO: 18424775 NR Description: 3(2),5-bisphosphate nucleotidase; protein id: supported by cDNA: 98980. [Arabidopsis thaliana]
  misc_feature (1)..(343): Homolog of NCBI NO: 21618152 NR Description: 3(2),5-bisphosphate nucleotidase [Arabidopsis
  misc_feature (1)..(343): Homolog of NCBI NO: 15237567 NR Description: 3(2),5-bisphosphate nucleotidase; protein id:
  misc_feature (1)..(343): Homolog of NCBI NO: 8777312 NR Description: 3'(2'),5'-bisphosphate nucleotidase [Arabidopsis
  misc_feature (3)..(344): Homolog of NCBI NO: 14268820 NR Description: diphosphonucleotide phosphatase 1 [Zea mays]
  misc_feature (3)..(344): Homolog of NCBI NO: 3913517 NR Description: 3'(2'),5'-BISPHOSPHATE NUCLEOTIDASE (3'(2'),5-
  misc_feature (3)..(172): Homolog of NCBI NO: 15451579 NR Description: Putative PAP-specific phosphatase [Oryza sativa]

SEQ ID NO: 91270 - protein, 183 aa, Arabidopsis thaliana; identical to SEQ ID NO: 76002
  peptide (1)..(183): Ceres Seq. ID no. 12727066
  misc_feature (1)..(183): Homolog of NCBI NO: 15237589 NR Description: 3(2),5-bisphosphate nucleotidase protein id: At5g64000.1, supported by cDNA: gi_20466006
  misc_feature (1)..(181): Homolog of NCBI NO: 34395640 NR Description: Probable SAL4 phosphatase (3'(2'),5'-bisphosphate
  misc_feature (1)..(181): Homolog of NCBI NO: 15242383 NR Description: 3'(2'),5'-bisphosphate nucleotidase-like protein;
  misc_feature (1)..(179): Homolog of NCBI NO: 18424775 NR Description: 3(2),5-bisphosphate nucleotidase; protein id: supported by cDNA: 98980. [Arabidopsis thaliana]
  misc_feature (1)..(179): Homolog of NCBI NO: 21618152 NR Description: 3(2),5-bisphosphate nucleotidase [Arabidopsis
  misc_feature (1)..(179): Homolog of NCBI NO: 15237567 NR Description: 3(2),5-bisphosphate nucleotidase; protein id:
  misc_feature (1)..(179): Homolog of NCBI NO: 8777312 NR Description: 3'(2'),5'-bisphosphate nucleotidase [Arabidopsis
  misc_feature (1)..(180): Homolog of NCBI NO: 14268820 NR Description: diphosphonucleotide phosphatase 1 [Zea mays]
  misc_feature (1)..(180): Homolog of NCBI NO: 3913517 NR Description: 3'(2'),5'-BISPHOSPHATE NUCLEOTIDASE (3'(2'),5-
  misc_feature (24)..(164): Homolog of NCBI NO: 15451579 NR Description: Putative PAP-specific phosphatase [Oryza sativa]

SEQ ID NO: 91271 - DNA, 912 bp, Arabidopsis thaliana
  misc_feature (1)..(912): Ceres Seq. ID no. 12727087
  misc_feature: MA Experiment ID: 108573 Result: Up-regulated in Transcription
  misc_feature: MA Experiment 108573 PARAMETER Experiment Name: At_Drought_cDNA_P Parameter: Timepoint (hr) Value: 6
  misc_feature: MA Experiment 108573 PARAMETER Experiment Name: At_Drought_cDNA_P Parameter: Tissue Value: Aerial
  misc_feature: MA Experiment 108573 PARAMETER Experiment Name: At_Drought_cDNA_P Parameter: Treatment Value: Drought vs. No Drought
  misc_feature: MA Experiment ID: 108577 Result: Up-regulated in Transcription
  misc_feature: MA Experiment 108577 PARAMETER Experiment Name: At_42deg_Heat_cDNA_P Parameter: Temperature (deg C) Value: 42 vs. 22
  misc_feature: MA Experiment 108577 PARAMETER Experiment Name: At_42deg_Heat_cDNA_P Parameter: Timepoint (hr) Value: 6
  misc_feature: MA Experiment 108577 PARAMETER Experiment Name: At_42deg_Heat_cDNA_P Parameter: Tissue Value: Aerial
  misc_feature: MA Experiment ID: 108585 Result: Up-regulated in Transcription
  misc_feature: MA Experiment 108585 PARAMETER Experiment Name: At_5mM_NaNP_cDNA_P Parameter: Timepoint (hr) Value: 6
  misc_feature: MA Experiment 108585 PARAMETER Experiment Name: At_5mM_NaNP_cDNA_P Parameter: Tissue Value: Aerial
  misc_feature: MA Experiment 108585 PARAMETER Experiment Name: At_5mM_NaNP_cDNA_P Parameter: Treatment Value: null
atgtcgcacttcggaaggtcaggtccaccggatatcagcgacacctactcacttctcgtccttaacatcaccttccgtacgactgctgatgatctctatcctctattcgcaaagtatggaaaggtcgttgatgtgtttattcccagagatcgaaggactggtgattcgcgtggttttgcgtttgttcggtataagtataaagacgaagctcacaaagcagtggaaaggcttgatggaagagttgttgatggcagagaaataactgttcagtttgcgaaatatgggccaaatgctgaaaaaatttccaaaggaagagttgtggaaccaccgccgaagtcacgaagatctagaagccgtagtcctaggcggagtcgtagtcctaggaggagccgtagcccgcctagacgtcgtagtcccagaagaagccgcagtcctcgtaggaggtcccgagatgactatagggaaaaagactaccggaagcggagcaggagcagaagctatgacaggcgtgaaaggcatgaggagaaggatagagatcatcgtcgtcgcactaggtctcgtagtgccagcccagatgaaaaacgcagagtcagaggccgttatgataatgagagccgcagtcacagtcgttccttgagtgcatctcctgctcgccgcagccctagaagttcctccccacagaaaacctctcctgctagagaagtttctcctgataagcgtagcaatgagaggtctccatctcctcgtcgcagcctcagcccaagaagccctgctttgcaaaaggcctctccttctaaggagatgtctcctgaaaggcgtagcaatgagaggtccccatctcctggtagccctgctcctctgcgcaaagttgatgctgcttctcgaagtcaatctccttatgctgcggaatga

SEQ ID NO: 91272 - protein, 303 aa, Arabidopsis thaliana; identical to SEQ ID NO: 35347
  peptide (1)..(303): Ceres Seq. ID no. 12727088
  misc_feature (18)..(89): Pfam Name: RNA recognition motif. (a.k.a. RRM, RBD, or RNP domain) Pfam Description: RNA recognition motif. (a.k.a. RRM, RBD, or RNP
  misc_feature (1)..(303): Homolog of NCBI NO: 15237641 NR Description: arginine/serine-rich splicing factor SC35; id: At5g64200.1, supported by cDNA: gi_17380867 [Arabidopsis >gi|17380868|gb|AAL36246.1| unknown protein [Arabidopsis
  misc_feature (1)..(303): Homolog of NCBI NO: 9843653 NR Description: splicing factor SC35 [Arabidopsis thaliana]
  misc_feature (1)..(280): Homolog of NCBI NO: 33146621 NR Description: putative splicing factor, arginine/serine-rich 2
  misc_feature (1)..(288): Homolog of NCBI NO: 7446336 NR Description: probable arginine/serine-rich splicing factor -
  misc_feature (4)..(216): Homolog of NCBI NO: 28279759 NR Description: Similar to splicing factor, arginine/serine-rich
  misc_feature (4)..(234): Homolog of NCBI NO: 266991 NR Description: Splicing factor, arginine/serine-rich 2 (Splicing
  misc_feature (4)..(234): Homolog of NCBI NO: 6755478 NR Description: splicing factor, arginine/serine-rich 2; DNA Chr 11, Wayne State University 175, expressed; splicing factor [Mus musculus] >gi|27691222|ref|XP_213556.1| similar to
  misc_feature (4)..(234): Homolog of NCBI NO: 4506899 NR Description: splicing factor, arginine/serine-rich 2 [Homo
  misc_feature (5)..(279): Homolog of NCBI NO: 15055543 NR Description: 46kD arginine/serine-rich splicing factor [Homo
  misc_feature (4)..(221): Homolog of NCBI NO: 39794351 NR Description: Unknown (protein for MGC:75633) [Silurana

SEQ ID NO: 91273 - DNA, 2517 bp, Arabidopsis thaliana
  misc_feature (1)..(2517): Ceres Seq. ID no. 12727108
  misc_feature: MA Experiment ID: 20000180 Result: Up-regulated in Transcription
  misc_feature: MA Experiment 20000180 PARAMETER Experiment Name: At_Germinating_Seeds_P Parameter: Age (hr) Value: 24 vs. 0
  misc_feature: MA Experiment 20000180 PARAMETER Experiment Name: At_Germinating_Seeds_P Parameter: Tissue Value: Germinating Seeds
  misc_feature: MA Experiment ID: 20000182 Result: Down-regulated in Transcription
  misc_feature: MA Experiment 20000182 PARAMETER Experiment Name: At_2mM_SA_P Parameter: Age (day) Value: 14
  misc_feature: MA Experiment 20000182 PARAMETER Experiment Name: At_2mM_SA_P Parameter: Organism Value: A. thaliana
  misc_feature: MA Experiment 20000182 PARAMETER Experiment Name: At_2mM_SA_P Parameter: Plant Line Value: WS
  misc_feature: MA Experiment 20000182 PARAMETER Experiment Name: At_2mM_SA_P Parameter: Timepoint (hr) Value: 6
  misc_feature: MA Experiment 20000182 PARAMETER Experiment Name: At_2mM_SA_P Parameter: Tissue Value: Aerial
  misc_feature: MA Experiment 20000182 PARAMETER Experiment Name: At_2mM_SA_P Parameter: Treatment Value: 2mM SA vs. No Treatment
  misc_feature: MA Experiment ID: 20000227 Result: Up-regulated in Transcription
  misc_feature: MA Experiment 20000227 PARAMETER Experiment Name: At_Root-Tips-vs-Tops_P Parameter: Tissue Value: Root Tips vs. Root Tops
  misc_feature: MA Experiment ID: 20000264 Result: Up-regulated in Transcription
  misc_feature: MA Experiment 20000264 PARAMETER Experiment Name: At_Open_Flower_P Parameter: Age (day) Value: 21
  misc_feature: MA Experiment 20000264 PARAMETER Experiment Name: At_Open_Flower_P Parameter: Plant Line Value: WS
  misc_feature: MA Experiment 20000264 PARAMETER Experiment Name: At_Open_Flower_P Parameter: Tissue Value: Open Flower vs. Whole Plant
  misc_feature: MA Experiment ID: 20000286 Result: Up-regulated in Transcription
  misc_feature: MA Experiment 20000286 PARAMETER Experiment Name: At_Open_Flower_P Parameter: Age (day) Value: 21
  misc_feature: MA Experiment 20000286 PARAMETER Experiment Name: At_Open_Flower_P Parameter: Plant Line Value: WS
  misc_feature: MA Experiment 20000286 PARAMETER Experiment Name: At_Open_Flower_P Parameter: Tissue Value: Half Open vs. Whole Plant
  misc_feature: MA Experiment ID: 20000437 Result: Down-regulated in Transcription
  misc_feature: MA Experiment 20000437 PARAMETER Experiment Name: At_Drought_P Parameter: Age (day) Value: 8
  misc_feature: MA Experiment 20000437 PARAMETER Experiment Name: At_Drought_P Parameter: Organism Value: A. thaliana
  misc_feature: MA Experiment 20000437 PARAMETER Experiment Name: At_Drought_P Parameter: Plant Line Value: WS
  misc_feature: MA Experiment 20000437 PARAMETER Experiment Name: At_Drought_P Parameter: Timepoint (hr) Value: 24
  misc_feature: MA Experiment 20000437 PARAMETER Experiment Name: At_Drought_P Parameter: Tissue Value: Whole Plant
  misc_feature: MA Experiment 20000437 PARAMETER Experiment Name: At_Drought_P Parameter: Treatment Value: Drought vs. No Drought
  misc_feature: MA Experiment ID: 20000438 Result: Up-regulated in Transcription
  misc_feature: MA Experiment 20000438 PARAMETER Experiment Name: At_Shoots__P Parameter: Age (day) Value: 14
  misc_feature: MA Experiment 20000438 PARAMETER Experiment Name: At_Shoots__P Parameter: Tissue Value: Shoots vs. Whole Plant
  misc_feature: MA Experiment ID: 20000794 Result: Up-regulated in Transcription
  misc_feature: MA Experiment 20000794 PARAMETER Experiment Name: At_Petals_P Parameter: Age (day) Value: 23-25 days
  misc_feature: MA Experiment 20000794 PARAMETER Experiment Name: At_Petals_P Parameter: Plant Line Value: WS
  misc_feature: MA Experiment 20000794 PARAMETER Experiment Name: At_Petals_P Parameter: Tissue Value: Petals vs. Whole plant
  misc_feature: MA Experiment ID: 20001451 Result: Up-regulated in Transcription
  misc_feature: MA Experiment 20001451 PARAMETER Experiment Name: At_Far-red-induction_P Parameter: Age (day) Value: 7
  misc_feature: MA Experiment 20001451 PARAMETER Experiment Name: At_Far-red-induction_P Parameter: Light Value: Far-red vs. White
  misc_feature: MA Experiment 20001451 PARAMETER Experiment Name: At_Far-red-induction_P Parameter: Organism Value: A. thaliana
  misc_feature: MA Experiment 20001451 PARAMETER Experiment Name: At_Far-red-induction_P Parameter: Plant Line Value: Columbia
  misc_feature: MA Experiment 20001451 PARAMETER Experiment Name: At_Far-red-induction_P Parameter: Timepoint (hr) Value: 24
  misc_feature: MA Experiment 20001451 PARAMETER Experiment Name: At_Far-red-induction_P Parameter: Tissue Value: Whole Plant
  misc_feature: MA Experiment ID: 20001904 Result: Down-regulated in Transcription
  misc_feature: MA Experiment 20001904 PARAMETER Experiment Name: At_Drought_Reproduction_P Parameter: Age (day) Value: 37
  misc_feature: MA Experiment 20001904 PARAMETER Experiment Name: At_Drought_Reproduction_P Parameter: Organism Value: A. thaliana
  misc_feature: MA Experiment 20001904 PARAMETER Experiment Name: At_Drought_Reproduction_P Parameter: Plant Line Value: WS
  misc_feature: MA Experiment 20001904 PARAMETER Experiment Name: At_Drought_Reproduction_P Parameter: Timepoint (day) Value: 7
  misc_feature: MA Experiment 20001904 PARAMETER Experiment Name: At_Drought_Reproduction_P Parameter: Tissue Value: Rosettes
  misc_feature: MA Experiment 20001904 PARAMETER Experiment Name: At_Drought_Reproduction_P Parameter: Treatment Value: Drought vs. No Drought
  misc_feature: MA Experiment ID: 20001905 Result: Down-regulated in Transcription
  misc_feature: MA Experiment 20001905 PARAMETER Experiment Name: At_Drought_Reproduction_P Parameter: Age (day) Value: 40
  misc_feature: MA Experiment 20001905 PARAMETER Experiment Name: At_Drought_Reproduction_P Parameter: Organism Value: A. thaliana
  misc_feature: MA Experiment 20001905 PARAMETER Experiment Name: At_Drought_Reproduction_P Parameter: Plant Line Value: WS
  misc_feature: MA Experiment 20001905 PARAMETER Experiment Name: At_Drought_Reproduction_P Parameter: Timepoint (day) Value: 10
  misc_feature: MA Experiment 20001905 PARAMETER Experiment Name: At_Drought_Reproduction_P Parameter: Tissue Value: Rosettes
  misc_feature: MA Experiment 20001905 PARAMETER Experiment Name: At_Drought_Reproduction_P Parameter: Treatment Value: Drought vs. No Drought
ccctctctcttctctctctctttgccactctctctttcatctttataatcaaaactaatcaatctctcttctcttggaaactctttgtttcactttgatcttctcatcctctatatatcttcccttggtcctttcttgcttccaactacagagagtgttaacttgtgtatgatgtgggaatctgagagcgacggtggggttggagttggaggtggaggaggaagagagtatggtgatggagttttgagttctaacaagcatggcggcgtcaagactgatgggtttgagcttagaggccaatcttggtttgttgctacggatatccccagcgatcttctggttaagatcggcgacatgaactttcaccttcacaagtatccgttgctgtcacgtagcgggaagatgaacagattgatctatgagtcacgagatcctgacccgacgatccttattcttgatgatctacctggaggaccagaagcgtttgagcttgcatccaaattctgctatggagttcccgtggatctcacggcaactaacatatcaggattacgttgtgcagctgagtatcttgagatgacagaggatcttgaggaagggaatctaatcttcaagacagaagcttttctcagctatgtggttctgtcttcatggagagactccatcttggtcctgaagagctgtgaaaagctctcaccttgggctgagaatcttcagattgtgagaaggtgtagtgaatctatcgcttggaaagcttgtagtaatccaaaaggtattagatgggcttacacagggaaagctccatctccatcaacaacaaatttcgcgggttctagtccgagatggaacgaatcaaaagattcaagtttctattgtagtccgagtaggaacactaatagccagcctgttcctccagattggtggttcgaagatgtctccatcttaagaatcgatcatttcgttcgtgtaatcactgcaatcaaggtgaaaggtatgagatttgaactactcggagctgtaataatgcattacgccggaaaatggcttccgggtttgatcaaagaaggaggagttgcaatagctccagcaatgtcctccgccattggaggaggattaggtttaggaggagacgaaatgagtataagctgcggaagcaacagcagcggaggaagctccggaccagattggaaaggcggtcttcatatggttctctccgccggaaaaacaaacggacatcaagattccgtcgcttgtctcgccggactaggaatcagtccaaaagaccaacgaatgatcgtcgaatctttaatcagcataatccctccacagaaagattccgtcacttgtagcttcctcctccgtcttcttagagcagcaaacatgctcaaagtagctccggcgttgatcacggagctcgagaaacgcgtagggatgcaattcgaacaagcgacgcttcaagatcttttgattcctggttataacaataaaggagagacaatgtacgatgttgatcttgttcagagattgttggaacattttcttgtgcaagaacagacggaaggatcgagtccgagtcgaatgtcgccgtcgccgtcgcagtctatgtacgccgatatcccgagagggaataacaacaatggtggtggtggtggtggtaataatcagaatgcgaaaatgagagtggcgaggcttgtggatagttatctcaccgaagttgctagagatcggaatttgccgttgacaaagtttcaggttttggctgaggcgttaccggaatctgctaggacttgtgacgatggactatacagagccattgattcatatctcaaggcgcatccgacattatcggagcatgagaggaaacggctatgccgagtgatggattgtcaaaaactatcaatggacgcatgtatgcacgcggctcagaacgagaggttgccattgagagtggtggttcaagttctcttctcggagcaagtcaagatcagcaatgctttagccaacacatcactcaaggagtcaaccactttaggagaagccatgggtacgtatcagcctatgatcccaaatcgcaagacattgatcgaagcaacaccacaatcgtttcaggaaggatgggctgcagccaagaaggatattaacacgttgaagttcgagttagagacggtgaagaccaagtacgtcgagcttcagaacgagatggaagtgatgcaacgacagtttgagaagacggggaaagtgaagaacacgccatcttcttcggcttggaccagcggttggaagaagctaagtaaactgactaagatgagtggacaggagagccatgacatatcctctggaggagaacaagctggtgttgatcatccaccccccaggaaaccaagacgatggaggaactcaatttcatgaagtgatagtgatggttttgtatcttcttgattttgattctttgaaaagaaaaagcttttgtttgttcctaatttgtaatgtttattggtttctaatatggaataagtg

SEQ ID NO: 91274 - protein, 746 aa, Arabidopsis thaliana
  peptide (1)..(746): Ceres Seq. ID no. 12727109
  misc_feature (249)..(581): Pfam Name: NPH3 family Pfam Description: NPH3 family
  misc_feature (364)..(726): Homolog of NCBI NO: 15220750 NR Description: non-phototropic hypocotyl, putative; protein id:
  misc_feature (364)..(726): Homolog of NCBI NO: 25336228 NR Description: F26G16.2 protein - Arabidopsis thaliana Contains a bZIP transcription factor PF|00170 domain. ESTs gb|AA650964, gb|AI994521 come from this gene. [Arabidopsis
  misc_feature (33)..(322): Homolog of NCBI NO: 15220750 NR Description: non-phototropic hypocotyl, putative; protein id:
  misc_feature (33)..(322): Homolog of NCBI NO: 25336228 NR Description: F26G16.2 protein - Arabidopsis thaliana Contains a bZIP transcription factor PF|00170 domain. ESTs gb|AA650964, gb|AI994521 come from this gene. [Arabidopsis
  misc_feature (369)..(697): Homolog of NCBI NO: 18481720 NR Description: hypothetical protein [Sorghum bicolor]
  misc_feature (33)..(310): Homolog of NCBI NO: 18481720 NR Description: hypothetical protein [Sorghum bicolor]
  misc_feature (502)..(720): Homolog of NCBI NO: 15238110 NR Description: non-phototropic hypocotyl 3-like protein; protein
  misc_feature (37)..(199): Homolog of NCBI NO: 15238110 NR Description: non-phototropic hypocotyl 3-like protein; protein
  misc_feature (371)..(464): Homolog of NCBI NO: 15238110 NR Description: non-phototropic hypocotyl 3-like protein; protein
  misc_feature (253)..(337): Homolog of NCBI NO: 15238110 NR Description: non-phototropic hypocotyl 3-like protein; protein
MMWESESDGGVGVGGGGGREYGDGVLSSNKHGGVKTDGFELRGQSWFVATDIPSDLLVKIGDMNFHLHKYPLLSRSGKMNRLIYESRDPDPTILILDDLPGGPEAFELASKFCYGVPVDLTATNISGLRCAAEYLEMTEDLEEGNLIFKTEAFLSYVVLSSWRDSILVLKSCEKLSPWAENLQIVRRCSESIAWKACSNPKGIRWAYTGKAPSPSTTNFAGSSPRWNESKDSSFYCSPSRNTNSQPVPPDWWFEDVSILRIDHFVRVITAIKVKGMRFELLGAVIMHYAGKWLPGLIKEGGVAIAPAMSSAIGGGLGLGGDEMSISCGSNSSGGSSGPDWKGGLHMVLSAGKTNGHQDSVACLAGLGISPKDQRMIVESLISIIPPQKDSVTCSFLLRLLRAANMLKVAPALITELEKRVGMQFEQATLQDLLIPGYNNKGETMYDVDLVQRLLEHFLVQEQTEGSSPSRMSPSPSQSMYADIPRGNNNNGGGGGGNNQNAKMRVARLVDSYLTEVARDRNLPLTKFQVLAEALPESARTCDDGLYRAIDSYLKAHPTLSEHERKRLCRVMDCQKLSMDACMHAAQNERLPLRVVVQVLFSEQVKISNALANTSLKESTTLGEAMGTYQPMIPNRKTLIEATPQSFQEGWAAAKKDINTLKFELETVKTKYVELQNEMEVMQRQFEKTGKVKNTPSSSAWTSGWKKLSKLTKMSGQESHDISSGGEQAGVDHPPPRKPRRWRNSIS

SEQ ID NO: 91275 - protein, 745 aa, Arabidopsis thaliana
  peptide (1)..(745): Ceres Seq. ID no. 12727110
  misc_feature (248)..(580): Pfam Name: NPH3 family Pfam Description: NPH3 family
  misc_feature (363)..(725): Homolog of NCBI NO: 15220750 NR Description: non-phototropic hypocotyl, putative; protein id:
  misc_feature (363)..(725): Homolog of NCBI NO: 25336228 NR Description: F26G16.2 protein - Arabidopsis thaliana Contains a bZIP transcription factor PF|00170 domain. ESTs gb|AA650964, gb|AI994521 come from this gene. [Arabidopsis
  misc_feature (32)..(321): Homolog of NCBI NO: 15220750 NR Description: non-phototropic hypocotyl, putative; protein id:
  misc_feature (32)..(321): Homolog of NCBI NO: 25336228 NR Description: F26G16.2 protein - Arabidopsis thaliana Contains a bZIP transcription factor PF|00170 domain. ESTs gb|AA650964, gb|AI994521 come from this gene. [Arabidopsis
  misc_feature (368)..(696): Homolog of NCBI NO: 18481720 NR Description: hypothetical protein [Sorghum bicolor]
  misc_feature (32)..(309): Homolog of NCBI NO: 18481720 NR Description: hypothetical protein [Sorghum bicolor]
  misc_feature (501)..(719): Homolog of NCBI NO: 15238110 NR Description: non-phototropic hypocotyl 3-like protein; protein
  misc_feature (36)..(198): Homolog of NCBI NO: 15238110 NR Description: non-phototropic hypocotyl 3-like protein; protein
  misc_feature (370)..(463): Homolog of NCBI NO: 15238110 NR Description: non-phototropic hypocotyl 3-like protein; protein
  misc_feature (252)..(336): Homolog of NCBI NO: 15238110 NR Description: non-phototropic hypocotyl 3-like protein; protein
MWESESDGGVGVGGGGGREYGDGVLSSNKHGGVKTDGFELRGQSWFVATDIPSDLLVKIGDMNFHLHKYPLLSRSGKMNRLIYESRDPDPTILILDDLPGGPEAFELASKFCYGVPVDLTATNISGLRCAAEYLEMTEDLEEGNLIFKTEAFLSYVVLSSWRDSILVLKSCEKLSPWAENLQIVRRCSESIAWKACSNPKGIRWAYTGKAPSPSTTNFAGSSPRWNESKDSSFYCSPSRNTNSQPVPPDWWFEDVSILRIDHFVRVITAIKVKGMRFELLGAVIMHYAGKWLPGLIKEGGVAIAPAMSSAIGGGLGLGGDEMSISCGSNSSGGSSGPDWKGGLHMVLSAGKTNGHQDSVACLAGLGISPKDQRMIVESLISIIPPQKDSVTCSFLLRLLRAANMLKVAPALITELEKRVGMQFEQATLQDLLIPGYNNKGETMYDVDLVQRLLEHFLVQEQTEGSSPSRMSPSPSQSMYADIPRGNNNNGGGGGGNNQNAKMRVARLVDSYLTEVARDRNLPLTKFQVLAEALPESARTCDDGLYRAIDSYLKAHPTLSEHERKRLCRVMDCQKLSMDACMHAAQNERLPLRVVVQVLFSEQVKISNALANTSLKESTTLGEAMGTYQPMIPNRKTLIEATPQSFQEGWAAAKKDINTLKFELETVKTKYVELQNEMEVMQRQFEKTGKVKNTPSSSAWTSGWKKLSKLTKMSGQESHDISSGGEQAGVDHPPPRKPRRWRNSIS

SEQ ID NO: 91276 - protein, 684 aa, Arabidopsis thaliana
  peptide (1)..(684): Ceres Seq. ID no. 12727111
  misc_feature (187)..(519): Pfam Name: NPH3 family Pfam Description: NPH3 family
  misc_feature (302)..(664): Homolog of NCBI NO: 15220750 NR Description: non-phototropic hypocotyl, putative; protein id:
  misc_feature (302)..(664): Homolog of NCBI NO: 25336228 NR Description: F26G16.2 protein - Arabidopsis thaliana Contains a bZIP transcription factor PF|00170 domain. ESTs gb|AA650964, gb|AI994521 come from this gene. [Arabidopsis
  misc_feature (1)..(260): Homolog of NCBI NO: 15220750 NR Description: non-phototropic hypocotyl, putative; protein id:
  misc_feature (1)..(260): Homolog of NCBI NO: 25336228 NR Description: F26G16.2 protein - Arabidopsis thaliana Contains a bZIP transcription factor PF|00170 domain. ESTs gb|AA650964, gb|AI994521 come from this gene. [Arabidopsis
  misc_feature (307)..(635): Homolog of NCBI NO: 18481720 NR Description: hypothetical protein [Sorghum bicolor]
  misc_feature (1)..(248): Homolog of NCBI NO: 18481720 NR Description: hypothetical protein [Sorghum bicolor]
  misc_feature (440)..(658): Homolog of NCBI NO: 15238110 NR Description: non-phototropic hypocotyl 3-like protein; protein
  misc_feature (1)..(137): Homolog of NCBI NO: 15238110 NR Description: non-phototropic hypocotyl 3-like protein; protein
  misc_feature (309)..(402): Homolog of NCBI NO: 15238110 NR Description: non-phototropic hypocotyl 3-like protein; protein
  misc_feature (191)..(275): Homolog of NCBI NO: 15238110 NR Description: non-phototropic hypocotyl 3-like protein; protein
MNFHLHKYPLLSRSGKMNRLIYESRDPDPTILILDDLPGGPEAFELASKFCYGVPVDLTATNISGLRCAAEYLEMTEDLEEGNLIFKTEAFLSYVVLSSWRDSILVLKSCEKLSPWAENLQIVRRCSESIAWKACSNPKGIRWAYTGKAPSPSTTNFAGSSPRWNESKDSSFYCSPSRNTNSQPVPPDWWFEDVSILRIDHFVRVITAIKVKGMRFELLGAVIMHYAGKWLPGLIKEGGVAIAPAMSSAIGGGLGLGGDEMSISCGSNSSGGSSGPDWKGGLHMVLSAGKTNGHQDSVACLAGLGISPKDQRMIVESLISIIPPQKDSVTCSFLLRLLRAANMLKVAPALITELEKRVGMQFEQATLQDLLIPGYNNKGETMYDVDLVQRLLEHFLVQEQTEGSSPSRMSPSPSQSMYADIPRGNNNNGGGGGGNNQNAKMRVARLVDSYLTEVARDRNLPLTKFQVLAEALPESARTCDDGLYRAIDSYLKAHPTLSEHERKRLCRVMDCQKLSMDACMHAAQNERLPLRVVVQVLFSEQVKISNALANTSLKESTTLGEAMGTYQPMIPNRKTLIEATPQSFQEGWAAAKKDINTLKFELETVKTKYVELQNEMEVMQRQFEKTGKVKNTPSSSAWTSGWKKLSKLTKMSGQESHDISSGGEQAGVDHPPPRKPRRWRNSIS

SEQ ID NO: 91277 - DNA, 1218 bp, Arabidopsis thaliana
  misc_feature (1)..(1218): Ceres Seq. ID no. 12727120
  misc_feature: MA Experiment ID: 20000180 Result: Up-regulated in Transcription
  misc_feature: MA Experiment 20000180 PARAMETER Experiment Name: At_Germinating_Seeds_P Parameter: Age (hr) Value: 24 vs. 0
  misc_feature: MA Experiment 20000180 PARAMETER Experiment Name: At_Germinating_Seeds_P Parameter: Tissue Value: Germinating Seeds
  misc_feature: MA Experiment ID: 20000182 Result: Up-regulated in Transcription
  misc_feature: MA Experiment 20000182 PARAMETER Experiment Name: At_2mM_SA_P Parameter: Age (day) Value: 14
  misc_feature: MA Experiment 20000182 PARAMETER Experiment Name: At_2mM_SA_P Parameter: Organism Value: A. thaliana
  misc_feature: MA Experiment 20000182 PARAMETER Experiment Name: At_2mM_SA_P Parameter: Plant Line Value: WS
  misc_feature: MA Experiment 20000182 PARAMETER Experiment Name: At_2mM_SA_P Parameter: Timepoint (hr) Value: 6
  misc_feature: MA Experiment 20000182 PARAMETER Experiment Name: At_2mM_SA_P Parameter: Tissue Value: Aerial
  misc_feature: MA Experiment 20000182 PARAMETER Experiment Name: At_2mM_SA_P Parameter: Treatment Value: 2mM SA vs. No Treatment
  misc_feature: MA Experiment ID: 20000185 Result: Up-regulated in Transcription
  misc_feature: MA Experiment 20000185 PARAMETER Experiment Name: At_Roots__P Parameter: Age (day) Value: 7 vs. 21
  misc_feature: MA Experiment 20000185 PARAMETER Experiment Name: At_Roots__P Parameter: Organism Value: A. thaliana
  misc_feature: MA Experiment 20000185 PARAMETER Experiment Name: At_Roots__P Parameter: Tissue Value: Roots vs. Whole Plant
  misc_feature: MA Experiment ID: 20000439 Result: Up-regulated in Transcription
  misc_feature: MA Experiment 20000439 PARAMETER Experiment Name: At_Roots__P Parameter: Age (day) Value: 14 vs. 21
  misc_feature: MA Experiment 20000439 PARAMETER Experiment Name: At_Roots__P Parameter: Organism Value: A. thaliana
  misc_feature: MA Experiment 20000439 PARAMETER Experiment Name: At_Roots__P Parameter: Tissue Value: Roots vs. Whole Plant
  misc_feature: MA Experiment ID: 20000794 Result: Up-regulated in Transcription
  misc_feature: MA Experiment 20000794 PARAMETER Experiment Name: At_Petals_P Parameter: Age (day) Value: 23-25 days
  misc_feature: MA Experiment 20000794 PARAMETER Experiment Name: At_Petals_P Parameter: Plant Line Value: WS
  misc_feature: MA Experiment 20000794 PARAMETER Experiment Name: At_Petals_P Parameter: Tissue Value: Petals vs. Whole plant
  misc_feature: MA Experiment ID: 20001557 Result: Down-regulated in Transcription
  misc_feature: MA Experiment 20001557 PARAMETER Experiment Name: At_Drought_Soil_Dry_P Parameter: Age (day) Value: 27
  misc_feature: MA Experiment 20001557 PARAMETER Experiment Name: At_Drought_Soil_Dry_P Parameter: Organism Value: A. thaliana
  misc_feature: MA Experiment 20001557 PARAMETER Experiment Name: At_Drought_Soil_Dry_P Parameter: Plant Line Value: WS
  misc_feature: MA Experiment 20001557 PARAMETER Experiment Name: At_Drought_Soil_Dry_P Parameter: Post Timepoint (hr) Value: 3
  misc_feature: MA Experiment 20001557 PARAMETER Experiment Name: At_Drought_Soil_Dry_P Parameter: Post-Treatment Value: Re-Water vs. No Drought
  misc_feature: MA Experiment 20001557 PARAMETER Experiment Name: At_Drought_Soil_Dry_P Parameter: Timepoint (day) Value: 13
  misc_feature: MA Experiment 20001557 PARAMETER Experiment Name: At_Drought_Soil_Dry_P Parameter: Treatment Value: Drought vs. No Drought
  misc_feature: MA Experiment ID: 20001558 Result: Down-regulated in Transcription
  misc_feature: MA Experiment 20001558 PARAMETER Experiment Name: At_Drought_Soil_Dry_P Parameter: Age (day) Value: 27
  misc_feature: MA Experiment 20001558 PARAMETER Experiment Name: At_Drought_Soil_Dry_P Parameter: Organism Value: A. thaliana
  misc_feature: MA Experiment 20001558 PARAMETER Experiment Name: At_Drought_Soil_Dry_P Parameter: Plant Line Value: WS
  misc_feature: MA Experiment 20001558 PARAMETER Experiment Name: At_Drought_Soil_Dry_P Parameter: Post Timepoint (hr) Value: 6
  misc_feature: MA Experiment 20001558 PARAMETER Experiment Name: At_Drought_Soil_Dry_P Parameter: Post-Treatment Value: Re-Water vs. No Drought
  misc_feature: MA Experiment 20001558 PARAMETER Experiment Name: At_Drought_Soil_Dry_P Parameter: Timepoint (day) Value: 13
  misc_feature: MA Experiment 20001558 PARAMETER Experiment Name: At_Drought_Soil_Dry_P Parameter: Treatment Value: Drought vs. No Drought
  misc_feature: MA Experiment ID: 20001560 Result: Down-regulated in Transcription
  misc_feature: MA Experiment 20001560 PARAMETER Experiment Name: At_Drought_Soil_Dry_P Parameter: Age (day) Value: 28
  misc_feature: MA Experiment 20001560 PARAMETER Experiment Name: At_Drought_Soil_Dry_P Parameter: Organism Value: A. thaliana
  misc_feature: MA Experiment 20001560 PARAMETER Experiment Name: At_Drought_Soil_Dry_P Parameter: Plant Line Value: WS
  misc_feature: MA Experiment 20001560 PARAMETER Experiment Name: At_Drought_Soil_Dry_P Parameter: Post Timepoint (hr) Value: None
  misc_feature: MA Experiment 20001560 PARAMETER Experiment Name: At_Drought_Soil_Dry_P Parameter: Post-Treatment Value: None
  misc_feature: MA Experiment 20001560 PARAMETER Experiment Name: At_Drought_Soil_Dry_P Parameter: Timepoint (day) Value: 14
  misc_feature: MA Experiment 20001560 PARAMETER Experiment Name: At_Drought_Soil_Dry_P Parameter: Treatment Value: Drought vs. No Drought
atgatatcagaaaacggagaaacaagtgccgaaggatcgatttgcggctatgattcgctgcatcaactcttatcagcgaatcttaagcccgagctctatcaggaggtaaaccggttgctccttggacgtaactgtgggagatcgcttgaacagattgttctgccggagtctgctaaagccttgtcttcaaaacatgattttgatctccaggctgctagcttttcagctgataaagagcaaatgagaaatcctcgagtggtcagagttggtctcattcaaaactccattgctcttccaaccactgctccattctcggaccaaacaagaggaatattcgacaagttgaagccgataatcgatgctgcgggtgttgctggtgttaacatactgtgcttgcaggaagcttggaccatgccatttgcattttgcactagggagaggagatggtgtgagtttgcagagcctgttgatggcgaatcgacaaagtttcttcaagaactcgctaaaaagtataacatggtgattgttagtcctattctcgaaagagatattgatcacggtgaagtgctttggaataccgctgtgattatagggaataatggaaatatcattggcaagcatcgaaagaaccatatacctagggtaggagatttcaacgagagcacctattacatggaaggagacacaggccatcctgtgtttgagacggtgtttgggaaaattgcggttaatatatgttatggcagacaccatcctctgaattggttagcttttggtctaaatggtgcagagattgtcttcaacccttcagcaactgttggtgaactcagtgaaccaatgtggcctattgaggcacgaaatgccgcaatagcaaacagttactttgttggatccattaaccgagttggaaccgaagtattccccaatccttttacgtcaggtgatggaaaaccgcaacacaatgatttcgggcatttctatgggtcaagccatttttctgcaccagatgcttcttgcacaccgtctttgtcccgttacaaagatggtttattgatctcggacatggatctcaatctctgccggcaatacaaggacaagtggggatttagaatgactgcaagatacgaagtctatgccgatcttttggcaaagtacataaagccagacttcaagcctcaagtcgtctctgacccattgctccacaagaattctacataa

SEQ ID NO: 91278 - protein, 405 aa, Arabidopsis thaliana; identical to SEQ ID NO: 84734
  peptide (1)..(405): Ceres Seq. ID no. 12727121
  misc_feature (1)..(405): Homolog of NCBI NO: 30698009 NR Description: beta-ureidopropionase [Arabidopsis thaliana]
  misc_feature (4)..(404): Homolog of NCBI NO: 22775671 NR Description: contains ESTs
  misc_feature (17)..(398): Homolog of NCBI NO: 14334061 NR Description: beta-alanine synthase [Dictyostelium discoideum]
  misc_feature (19)..(397): Homolog of NCBI NO: 21358471 NR Description: CG3027-PA [Drosophila melanogaster]
  misc_feature (19)..(397): Homolog of NCBI NO: 40215848 NR Description: LD13390p [Drosophila melanogaster]
  misc_feature (17)..(397): Homolog of NCBI NO: 7706509 NR Description: beta-ureidopropionase [Homo sapiens]
  misc_feature (17)..(397): Homolog of NCBI NO: 6288790 NR Description: beta-ureidopropionase [Homo sapiens]
  misc_feature (17)..(400): Homolog of NCBI NO: 16758704 NR Description: ureidopropionase, beta [Rattus norvegicus]
  misc_feature (17)..(400): Homolog of NCBI NO: 19527212 NR Description: expressed sequence AI195023 [Mus musculus]
  misc_feature (18)..(394): Homolog of NCBI NO: 39597058 NR Description: Hypothetical protein CBG02618 [Caenorhabditis

SEQ ID NO: 91279 - protein, 325 aa, Arabidopsis thaliana; identical to SEQ ID NO: 84735
  peptide (1)..(325): Ceres Seq. ID no. 12727122
  misc_feature (1)..(325): Homolog of NCBI NO: 30698009 NR Description: beta-ureidopropionase [Arabidopsis thaliana]
  misc_feature (1)..(324): Homolog of NCBI NO: 22775671 NR Description: contains ESTs
  misc_feature (1)..(318): Homolog of NCBI NO: 14334061 NR Description: beta-alanine synthase [Dictyostelium discoideum]
  misc_feature (1)..(317): Homolog of NCBI NO: 21358471 NR Description: CG3027-PA [Drosophila melanogaster]
  misc_feature (1)..(317): Homolog of NCBI NO: 40215848 NR Description: LD13390p [Drosophila melanogaster]
  misc_feature (1)..(317): Homolog of NCBI NO: 7706509 NR Description: beta-ureidopropionase [Homo sapiens]
  misc_feature (1)..(317): Homolog of NCBI NO: 6288790 NR Description: beta-ureidopropionase [Homo sapiens]
  misc_feature (1)..(320): Homolog of NCBI NO: 16758704 NR Description: ureidopropionase, beta [Rattus norvegicus]
  misc_feature (1)..(320): Homolog of NCBI NO: 19527212 NR Description: expressed sequence AI195023 [Mus musculus]
  misc_feature (1)..(314): Homolog of NCBI NO: 39597058 NR Description: Hypothetical protein CBG02618 [Caenorhabditis

SEQ ID NO: 91280 - protein, 268 aa, Arabidopsis thaliana
  peptide (1)..(268): Ceres Seq. ID no. 12727123
  misc_feature (1)..(268): Homolog of NCBI NO: 30698009 NR Description: beta-ureidopropionase [Arabidopsis thaliana]
  misc_feature (1)..(267): Homolog of NCBI NO: 22775671 NR Description: contains ESTs
  misc_feature (1)..(261): Homolog of NCBI NO: 14334061 NR Description: beta-alanine synthase [Dictyostelium discoideum]
  misc_feature (1)..(260): Homolog of NCBI NO: 21358471 NR Description: CG3027-PA [Drosophila melanogaster]
  misc_feature (1)..(260): Homolog of NCBI NO: 40215848 NR Description: LD13390p [Drosophila melanogaster]
  misc_feature (1)..(260): Homolog of NCBI NO: 7706509 NR Description: beta-ureidopropionase [Homo sapiens]
  misc_feature (1)..(260): Homolog of NCBI NO: 6288790 NR Description: beta-ureidopropionase [Homo sapiens]
  misc_feature (1)..(263): Homolog of NCBI NO: 16758704 NR Description: ureidopropionase, beta [Rattus norvegicus]
  misc_feature (1)..(263): Homolog of NCBI NO: 19527212 NR Description: expressed sequence AI195023 [Mus musculus]
  misc_feature (1)..(257): Homolog of NCBI NO: 39597058 NR Description: Hypothetical protein CBG02618 [Caenorhabditis
MPFAFCTRERRWCEFAEPVDGESTKFLQELAKKYNMVIVSPILERDIDHGEVLWNTAVIIGNNGNIIGKHRKNHIPRVGDFNESTYYMEGDTGHPVFETVFGKIAVNICYGRHHPLNWLAFGLNGAEIVFNPSATVGELSEPMWPIEARNAAIANSYFVGSINRVGTEVFPNPFTSGDGKPQHNDFGHFYGSSHFSAPDASCTPSLSRYKDGLLISDMDLNLCRQYKDKWGFRMTARYEVYADLLAKYIKPDFKPQVVSDPLLHKNST

SEQ ID NO: 91281 - DNA, 1792 bp, Arabidopsis thaliana
  misc_feature (1)..(1792): Ceres Seq. ID no. 12727144
  misc_feature: MA Experiment ID: 20000264 Result: Up-regulated in Transcription
  misc_feature: MA Experiment 20000264 PARAMETER Experiment Name: At_Open_Flower_P Parameter: Age (day) Value: 21
  misc_feature: MA Experiment 20000264 PARAMETER Experiment Name: At_Open_Flower_P Parameter: Plant Line Value: WS
  misc_feature: MA Experiment 20000264 PARAMETER Experiment Name: At_Open_Flower_P Parameter: Tissue Value: Open Flower vs. Whole Plant
  misc_feature: MA Experiment ID: 20000451 Result: Up-regulated in Transcription
  misc_feature: MA Experiment 20000451 PARAMETER Experiment Name: At_CS6879_Shoots-Roots_P Parameter: Age (day) Value: 14
  misc_feature: MA Experiment 20000451 PARAMETER Experiment Name: At_CS6879_Shoots-Roots_P Parameter: Organism Value: A. thaliana
  misc_feature: MA Experiment 20000451 PARAMETER Experiment Name: At_CS6879_Shoots-Roots_P Parameter: Plant Line Value: CS6879 vs. WS
  misc_feature: MA Experiment 20000451 PARAMETER Experiment Name: At_CS6879_Shoots-Roots_P Parameter: Tissue Value: Roots
  misc_feature: MA Experiment ID: 20000452 Result: Up-regulated in Transcription
  misc_feature: MA Experiment 20000452 PARAMETER Experiment Name: At_CS6879_Shoots-Roots_P Parameter: Age (day) Value: 14
  misc_feature: MA Experiment 20000452 PARAMETER Experiment Name: At_CS6879_Shoots-Roots_P Parameter: Organism Value: A. thaliana
  misc_feature: MA Experiment 20000452 PARAMETER Experiment Name: At_CS6879_Shoots-Roots_P Parameter: Plant Line Value: CS6879 vs. WS
  misc_feature: MA Experiment 20000452 PARAMETER Experiment Name: At_CS6879_Shoots-Roots_P Parameter: Tissue Value: Shoots
  misc_feature: MA Experiment ID: 20000573 Result: Up-regulated in Transcription
  misc_feature: MA Experiment 20000573 PARAMETER Experiment Name: At_100uM_ABA_Mutants__P Parameter: Organism Value: A. thaliana
  misc_feature: MA Experiment 20000573 PARAMETER Experiment Name: At_100uM_ABA_Mutants__P Parameter: Plant Line Value: CS22 vs. Ler wt
  misc_feature: MA Experiment 20000573 PARAMETER Experiment Name: At_100uM_ABA_Mutants__P Parameter: Timepoint (hr) Value: N/A
  misc_feature: MA Experiment 20000573 PARAMETER Experiment Name: At_100uM_ABA_Mutants__P Parameter: Tissue Value: Whole Plant
  misc_feature: MA Experiment 20000573 PARAMETER Experiment Name: At_100uM_ABA_Mutants__P Parameter: Treatment Value: None
aaaccctagaaaattttctcaagaaaatccgaatcacgattctgggcattgtggaggattgacaaaaatgaagggaggtacgatacagataagttggcacgatgggaagccggtgctaaccgtagattttcacccgatttccggtttactcgccaccgccggagccgattacgatatcaagctatggttgataaattcgggtcaagcggagaagaaggttcctagtgtatcttatcagagtagccttacttaccatggatgtgctgtcaataccattcgtttttctccatctggggaactacttgcctcgggagcagacggaggtgagctttttatatggaagttgcatcctagtgaaaccaatcagtcctggaaagttcacaaatcattatcatttcatcgaaaggatgtcctggatcttcagtggtctcctgatgatgcatatcttatttctggctcagtggacaactcttgcattatatgggacgttaacaaaggttctgtccatcagatactggatgcccattgtcattatgttcaaggtgttgcctgggatcccttagcaaagtatgtagcctctcttagttcagacagaacatgccgtatatatgccaataagcctcaaacaaagagtaaaggtgttgaaaaaatgaactatgtttgccagcatgttatcatgaaagcagatcagcaacggggtgatgaaactaagacaataaaaacccatctctttcatgatgagacattgccgtctttctttcgaagattgtcatggtcacctgatggatcttttttactcattccagcaggttctttcaaggtttcacccacatccgaagctgtaaatgctacctatgtcttttctaggaaggacctttcaagacctgcactgcagcttcctggcgccagcaaaccggttgtagtggttcgtttttgccctgttgcatttaaactccgtggttcaagttctgaagagggtttcttcaagcttccttaccgtcttgtctttgccattgcaactttaaactccgtgtacatatatgacacagagtgtgtcgctccaattgcagtcttagcaggtctccactatgctgcaataaccgatataacatggtcacctaatgcatcgtatctggcactgtcctcacaagatggctattgcacactagttgaatttgaagataaagaactaggagaagctgtctccatttcaggtttgctcttagtcctttcactcttgaaccttccagaacccgattgacccatcaatccaactacagttggaaagaaacctgttgatggtgaggagaaaaagcatgatttagagaaaggcgatgaactaatgacagaaacaacaccagacgagagcaagaaacaagctgaattagaacaaaacgaagagagcaaacagccattgccaagcaaaattaccacggatggtaaggaaaaagagcatattatgcagaaaaccgatgatgaagtaatgacagaaacaagacatgaggaagagaatcagccattacagagcaaagttaacacaccggtctcaaataaaccagcaaggaaacgcatcacacccatggctattgacccctgatgtcgtcattttccatcagtgttttttttttaactctgatacaaatagctttctcataggctacatttagacatcaaaatgaatcgtattgacggccatgttggaaatggacttgtttctttagtcatacgtctcgtctctaaaggcaatgtacatatagacacatgtatgaacgttcacatgagatggttttgc

SEQ ID NO: 91282 - protein, 419 aa, Arabidopsis thaliana
  peptide (1)..(419): Ceres Seq. ID no. 12727145
  misc_feature (23)..(419): Homolog of NCBI NO: 18424846 NR Description: FAS2 (dbj|BAA77766.1); protein id: At5g64630.1, by cDNA: gi_14030688, supported by cDNA: gi_18491112 [Arabidopsis >gi|14030689|gb|AAK53019.1|AF375435_1 AT5g64630/MUB3_15
  misc_feature (23)..(419): Homolog of NCBI NO: 4884488 NR Description: FAS2 [Arabidopsis thaliana]
NPRKFSQENPNHDSGHCGGLTKMKGGTIQISWHDGKPVLTVDFHPISGLLATAGADYDIKLWLINSGQAEKKVPSVSYQSSLTYHGCAVNTIRFSPSGELLASGADGGELFIWKLHPSETNQSWKVHKSLSFHRKDVLDLQWSPDDAYLISGSVDNSCIIWDVNKGSVHQILDAHCHYVQGVAWDPLAKYVASLSSDRTCRIYANKPQTKSKGVEKMNYVCQHVIMKADQQRGDETKTIKTHLFHDETLPSFFRRLSWSPDGSFLLIPAGSFKVSPTSEAVNATYVFSRKDLSRPALQLPGASKPVVVVRFCPVAFKLRGSSSEEGFFKLPYRLVFAIATLNSVYIYDTECVAPIAVLAGLHYAAITDITWSPNASYLALSSQDGYCTLVEFEDKELGEAVSISGLLLVLSLLNLPEPD

SEQ ID NO: 91283 - protein, 397 aa, Arabidopsis thaliana
  peptide (1)..(397): Ceres Seq. ID no. 12727146
  misc_feature (1)..(397): Homolog of NCBI NO: 18424846 NR Description: FAS2 (dbj|BAA77766.1); protein id: At5g64630.1, by cDNA: gi_14030688, supported by cDNA: gi_18491112 [Arabidopsis >gi|14030689|gb|AAK53019.1|AF375435_1 AT5g64630/MUB3_15
  misc_feature (1)..(397): Homolog of NCBI NO: 4884488 NR Description: FAS2 [Arabidopsis thaliana]
MKGGTIQISWHDGKPVLTVDFHPISGLLATAGADYDIKLWLINSGQAEKKVPSVSYQSSLTYHGCAVNTIRFSPSGELLASGADGGELFIWKLHPSETNQSWKVHKSLSFHRKDVLDLQWSPDDAYLISGSVDNSCIIWDVNKGSVHQILDAHCHYVQGVAWDPLAKYVASLSSDRTCRIYANKPQTKSKGVEKMNYVCQHVIMKADQQRGDETKTIKTHLFHDETLPSFFRRLSWSPDGSFLLIPAGSFKVSPTSEAVNATYVFSRKDLSRPALQLPGASKPVVVVRFCPVAFKLRGSSSEEGFFKLPYRLVFAIATLNSVYIYDTECVAPIAVLAGLHYAAITDITWSPNASYLALSSQDGYCTLVEFEDKELGEAVSISGLLLVLSLLNLPEPD

SEQ ID NO: 91284 - DNA, 1955 bp, Arabidopsis thaliana
  misc_feature (1)..(1955): Ceres Seq. ID no. 12727147
  misc_feature: MA Experiment ID: 108434 Result: Down-regulated in Transcription
  misc_feature: MA Experiment 108434 PARAMETER Experiment Name: At_Root_Tips_cDNA_P Parameter: Tissue Value: Root Tips
  misc_feature: MA Experiment ID: 108576 Result: Down-regulated in Transcription
  misc_feature: MA Experiment 108576 PARAMETER Experiment Name: At_42deg_Heat_cDNA_P Parameter: Temperature (deg C) Value: 42 vs. 22
  misc_feature: MA Experiment 108576 PARAMETER Experiment Name: At_42deg_Heat_cDNA_P Parameter: Timepoint (hr) Value: 1
  misc_feature: MA Experiment 108576 PARAMETER Experiment Name: At_42deg_Heat_cDNA_P Parameter: Tissue Value: Aerial
  misc_feature: MA Experiment ID: 20000069 Result: Up-regulated in Transcription
  misc_feature: MA Experiment 20000069 PARAMETER Experiment Name: At_100uM_ABA_Mutants_cDNA_P Parameter: Plant Line Value: CS23
  misc_feature: MA Experiment 20000069 PARAMETER Experiment Name: At_100uM_ABA_Mutants_cDNA_P Parameter: Timepoint (hr) Value: 6
  misc_feature: MA Experiment 20000069 PARAMETER Experiment Name: At_100uM_ABA_Mutants_cDNA_P Parameter: Tissue Value: Aerial
  misc_feature: MA Experiment 20000069 PARAMETER Experiment Name: At_100uM_ABA_Mutants_cDNA_P Parameter: Treatment Value: 100uM ABA vs. No Treatment
  misc_feature: MA Experiment ID: 20000070 Result: Up-regulated in Transcription
  misc_feature: MA Experiment 20000070 PARAMETER Experiment Name: At_100uM_ABA_Mutants_cDNA_P Parameter: Plant Line Value: CS24
  misc_feature: MA Experiment 20000070 PARAMETER Experiment Name: At_100uM_ABA_Mutants_cDNA_P Parameter: Timepoint (hr) Value: 6
  misc_feature: MA Experiment 20000070 PARAMETER Experiment Name: At_100uM_ABA_Mutants_cDNA_P Parameter: Tissue Value: Aerial
  misc_feature: MA Experiment 20000070 PARAMETER Experiment Name: At_100uM_ABA_Mutants_cDNA_P Parameter: Treatment Value: 100uM ABA vs. No Treatment
  misc_feature: MA Experiment ID: 20000111 Result: Down-regulated in Transcription
  misc_feature: MA Experiment 20000111 PARAMETER Experiment Name: At_42deg_Heat_cDNA_P Parameter: Temperature (deg C) Value: 42 vs. 22
  misc_feature: MA Experiment 20000111 PARAMETER Experiment Name: At_42deg_Heat_cDNA_P Parameter: Timepoint (hr) Value: 6
  misc_feature: MA Experiment 20000111 PARAMETER Experiment Name: At_42deg_Heat_cDNA_P Parameter: Tissue Value: Aerial
  misc_feature: MA Experiment ID: 20000113 Result: Down-regulated in Transcription
  misc_feature: MA Experiment 20000113 PARAMETER Experiment Name: At_42deg_Heat_cDNA_P Parameter: Temperature (deg C) Value: 42 vs. 22
  misc_feature: MA Experiment 20000113 PARAMETER Experiment Name: At_42deg_Heat_cDNA_P Parameter: Timepoint (hr) Value: 8
  misc_feature: MA Experiment 20000113 PARAMETER Experiment Name: At_42deg_Heat_cDNA_P Parameter: Tissue Value: Aerial
  misc_feature: MA Experiment ID: 20000234 Result: Up-regulated in Transcription
  misc_feature: MA Experiment 20000234 PARAMETER Experiment Name: At_Siliques_P Parameter: Age (day) Value: 21
  misc_feature: MA Experiment 20000234 PARAMETER Experiment Name: At_Siliques_P Parameter: Organism Value: A. thaliana
  misc_feature: MA Experiment 20000234 PARAMETER Experiment Name: At_Siliques_P Parameter: Plant Line Value: WS
  misc_feature: MA Experiment 20000234 PARAMETER Experiment Name: At_Siliques_P Parameter: Tissue Value: Less Than 5mm Siliques vs. Whole Plant
  misc_feature: MA Experiment ID: 20000264 Result: Up-regulated in Transcription
  misc_feature: MA Experiment 20000264 PARAMETER Experiment Name: At_Open_Flower_P Parameter: Age (day) Value: 21
  misc_feature: MA Experiment 20000264 PARAMETER Experiment Name: At_Open_Flower_P Parameter: Plant Line Value: WS
  misc_feature: MA Experiment 20000264 PARAMETER Experiment Name: At_Open_Flower_P Parameter: Tissue Value: Open Flower vs. Whole Plant
  misc_feature: MA Experiment ID: 20000265 Result: Up-regulated in Transcription
  misc_feature: MA Experiment 20000265 PARAMETER Experiment Name: At_Open_Flower_P Parameter: Age (day) Value: 21
  misc_feature: MA Experiment 20000265 PARAMETER Experiment Name: At_Open_Flower_P Parameter: Plant Line Value: WS
  misc_feature: MA Experiment 20000265 PARAMETER Experiment Name: At_Open_Flower_P Parameter: Tissue Value: Closed Flower vs. Whole Plant
  misc_feature: MA Experiment ID: 20000286 Result: Up-regulated in Transcription
  misc_feature: MA Experiment 20000286 PARAMETER Experiment Name: At_Open_Flower_P Parameter: Age (day) Value: 21
  misc_feature: MA Experiment 20000286 PARAMETER Experiment Name: At_Open_Flower_P Parameter: Plant Line Value: WS
  misc_feature: MA Experiment 20000286 PARAMETER Experiment Name: At_Open_Flower_P Parameter: Tissue Value: Half Open vs. Whole Plant
atggattctccgacactaccgcactctatctccgcctcttcctccaccccattcgcttccgccgccgtaaaacctcaccggaataaactcctttcccgtaatggcatcctcatcatcatcgccgcgtcctgtattctcctcctcctcatatctctcctcatctacgccaccgtctcaaaatcctcccgcaaccaccataatccatcgcaccaaaccccaacctccgacgatcatcctccgccggaaacacctccttctcctccaccaatcgctcagatccgtctcgcatgcaacgcaacgcgtttcccagatcattgcgttgcctcgctctctaaacccggtcaagtccctccggatcctaaaccggttcaaataatccactctgcaatttcagtctcctacgagaatctcaaatccggccaatcgaaaatccaatcaatcctagactcctccgcagggaatcgaaaccgtacgaacatcgccaccatttgcctcgagatcctctcttactctcaacaccgtaccgaatcaacagacatagccgtgacgagcggcgatatcaaagacgcacgtgcgtggatgagcgcagctctagcttaccaattcgattgctggtcaggtctcaaaaccgtcaacgacactaagcaagtcgtcgacacgattacgttcttcgaaggtctcgtgaacctcaccggaaacgcgttgagcatgatgttatcgttcgacagtttcggagacgacgtcgtttcgtggattcgtccagcgacggaaagagacgggttttgggagaaagctgggccgagtttgggctcgggtacgggtacagaggctagtttgggttttccgtctggtttaacggaagacgtgacggtgtgtaaaaacggagggaaagattgtaaatacaaaacagtgcaagaagccgttgattccgcgccggatacaaacagaactgtaaagtttgtgatacgtattagagaaggtgtgtatgaagaaaccgttagggttccgtttgagaaaaagaatgtcgtcttcatcggtgacggaatgggtaaaacggtaattacagggtcgttgaatgttggacaaccagggatgacaacgtttgaatctgcaactgtcggagttctcggtgatggatttatggctcgtgatttaactatagagaacacggcaggagcagatgcgcaccaagcggttgcgtttagatcagacagtgatttttcggtacttgaaaactgcgagtttcttgggaaccaagacactctttatgctcactctctccgtcagttctacaaacaatgtcgaatccaaggcaacgtagacttcatctttggtaactcagctgccgtattccaagattgtgatatcctaatcgcttcaaaacactccaaactcgagcaaggcggtgcaaacaacgcgatcacagcacacgggaggattgatgcgtcgcagtccacgggatttgtgtttttgaactgttcgattaacggaacagaggaatacatgaaggagtttcaagctaaccctgaagggcataagaacttcttgggaagaccgtggaaggagttttcgaggacggtttttgtaaactgtaatcttgagtctttgattagtcctgatggatggatgccttggaacggggatttcgcattgaagactttgtattacggtgagtataagaatacgggtccgggatcggttagatcgagtagggttccatggagtagtgagataccagagaagcatgttgatgtttactctgttgccaattttattcaggctgatgagtgggcttccacgactgcttgatttttgtaaaggaaacatgaggttttaggattttgaaaagaagagaagagaagtcgtcattgtaactttattgtagtgtcaaatattagtgtggtttctttatcgctcattggggattcataatagattaataattgaagataatc

SEQ ID NO: 91285 - protein, 602 aa, Arabidopsis thaliana
  peptide (1)..(602): Ceres Seq. ID no. 12727148
  misc_feature (288)..(595): Pfam Name: Pectinesterase Pfam Description: Pectinesterase
  misc_feature (194)..(602): Homolog of NCBI NO: 22135882 NR Description: pectin methylesterase-like protein [Arabidopsis
  misc_feature (25)..(602): Homolog of NCBI NO: 9759007 NR Description: pectin methylesterase-like protein [Arabidopsis
  misc_feature (43)..(602): Homolog of NCBI NO: 15242495 NR Description: pectin methylesterase - like protein; protein id:
  misc_feature (66)..(597): Homolog of NCBI NO: 34907404 NR Description: putative pectin methylesterase [Oryza sativa
  misc_feature (381)..(602): Homolog of NCBI NO: 21554293 NR Description: pectin methylesterase-like protein [Arabidopsis
  misc_feature (220)..(602): Homolog of NCBI NO: 1552379 NR Description: pectin methylesterase [Silene latifolia subsp.
  misc_feature (281)..(597): Homolog of NCBI NO: 38344075 NR Description: OSJNBa0006B20.19 [Oryza sativa (japonica
  misc_feature (164)..(204): Homolog of NCBI NO: 38344075 NR Description: OSJNBa0006B20.19 [Oryza sativa (japonica
  misc_feature (45)..(601): Homolog of NCBI NO: 24250746 NR Description: putative thermostable pectinesterase [Citrus >gi|24250751|gb|AAK84486.1| putative thermostable pectinesterase
  misc_feature (38)..(597): Homolog of NCBI NO: 15230019 NR Description: putative pectinesterase; protein id: At3g05610.1 thaliana] >gi|6714449|gb|AAF26136.1|AC011620_12 putative
MDSPTLPHSISASSSTPFASAAVKPHRNKLLSRNGILIIIAASCILLLLISLLIYATVSKSSRNHHNPSHQTPTSDDHPPPETPPSPPPIAQIRLACNATRFPDHCVASLSKPGQVPPDPKPVQIIHSAISVSYENLKSGQSKIQSILDSSAGNRNRTNIATICLEILSYSQHRTESTDIAVTSGDIKDARAWMSAALAYQFDCWSGLKTVNDTKQVVDTITFFEGLVNLTGNALSMMLSFDSFGDDVVSWIRPATERDGFWEKAGPSLGSGTGTEASLGFPSGLTEDVTVCKNGGKDCKYKTVQEAVDSAPDTNRTVKFVIRIREGVYEETVRVPFEKKNVVFIGDGMGKTVITGSLNVGQPGMTTFESATVGVLGDGFMARDLTIENTAGADAHQAVAFRSDSDFSVLENCEFLGNQDTLYAHSLRQFYKQCRIQGNVDFIFGNSAAVFQDCDILIASKHSKLEQGGANNAITAHGRIDASQSTGFVFLNCSINGTEEYMKEFQANPEGHKNFLGRPWKEFSRTVFVNCNLESLISPDGWMPWNGDFALKTLYYGEYKNTGPGSVRSSRVPWSSEIPEKHVDVYSVANFIQADEWASTTA

SEQ ID NO: 91286 - protein, 409 aa, Arabidopsis thaliana
  peptide (1)..(409): Ceres Seq. ID no. 12727149
  misc_feature (95)..(402): Pfam Name: Pectinesterase Pfam Description: Pectinesterase
  misc_feature (1)..(409): Homolog of NCBI NO: 22135882 NR Description: pectin methylesterase-like protein [Arabidopsis
  misc_feature (1)..(409): Homolog of NCBI NO: 9759007 NR Description: pectin methylesterase-like protein [Arabidopsis
  misc_feature (1)..(409): Homolog of NCBI NO: 15242495 NR Description: pectin methylesterase - like protein; protein id:
  misc_feature (1)..(404): Homolog of NCBI NO: 34907404 NR Description: putative pectin methylesterase [Oryza sativa
  misc_feature (188)..(409): Homolog of NCBI NO: 21554293 NR Description: pectin methylesterase-like protein [Arabidopsis
  misc_feature (27)..(409): Homolog of NCBI NO: 1552379 NR Description: pectin methylesterase [Silene latifolia subsp.
  misc_feature (88)..(404): Homolog of NCBI NO: 38344075 NR Description: OSJNBa0006B20.19 [Oryza sativa (japonica
  misc_feature (1)..(11): Homolog of NCBI NO: 38344075 NR Description: OSJNBa0006B20.19 [Oryza sativa (japonica
  misc_feature (1)..(408): Homolog of NCBI NO: 24250746 NR Description: putative thermostable pectinesterase [Citrus >gi|24250751|gb|AAK84486.1| putative thermostable pectinesterase
  misc_feature (1)..(404): Homolog of NCBI NO: 15230019 NR Description: putative pectinesterase; protein id: At3g05610.1 thaliana] >gi|6714449|gb|AAF26136.1|AC011620_12 putative
MSAALAYQFDCWSGLKTVNDTKQVVDTITFFEGLVNLTGNALSMMLSFDSFGDDVVSWIRPATERDGFWEKAGPSLGSGTGTEASLGFPSGLTEDVTVCKNGGKDCKYKTVQEAVDSAPDTNRTVKFVIRIREGVYEETVRVPFEKKNVVFIGDGMGKTVITGSLNVGQPGMTTFESATVGVLGDGFMARDLTIENTAGADAHQAVAFRSDSDFSVLENCEFLGNQDTLYAHSLRQFYKQCRIQGNVDFIFGNSAAVFQDCDILIASKHSKLEQGGANNAITAHGRIDASQSTGFVFLNCSINGTEEYMKEFQANPEGHKNFLGRPWKEFSRTVFVNCNLESLISPDGWMPWNGDFALKTLYYGEYKNTGPGSVRSSRVPWSSEIPEKHVDVYSVANFIQADEWASTTA

SEQ ID NO: 91287 - protein, 366 aa, Arabidopsis thaliana
  peptide (1)..(366): Ceres Seq. ID no. 12727150
  misc_feature (52)..(359): Pfam Name: Pectinesterase Pfam Description: Pectinesterase
  misc_feature (1)..(366): Homolog of NCBI NO: 22135882 NR Description: pectin methylesterase-like protein [Arabidopsis
  misc_feature (1)..(366): Homolog of NCBI NO: 9759007 NR Description: pectin methylesterase-like protein [Arabidopsis
  misc_feature (1)..(366): Homolog of NCBI NO: 15242495 NR Description: pectin methylesterase - like protein; protein id:
  misc_feature (1)..(361): Homolog of NCBI NO: 34907404 NR Description: putative pectin methylesterase [Oryza sativa
  misc_feature (145)..(366): Homolog of NCBI NO: 21554293 NR Description: pectin methylesterase-like protein [Arabidopsis
  misc_feature (1)..(366): Homolog of NCBI NO: 1552379 NR Description: pectin methylesterase [Silene latifolia subsp.
  misc_feature (45)..(361): Homolog of NCBI NO: 38344075 NR Description: OSJNBa0006B20.19 [Oryza sativa (japonica
  misc_feature (1)..(365): Homolog of NCBI NO: 24250746 NR Description: putative thermostable pectinesterase [Citrus >gi|24250751|gb|AAK84486.1| putative thermostable pectinesterase
  misc_feature (1)..(361): Homolog of NCBI NO: 15230019 NR Description: putative pectinesterase; protein id: At3g05610.1 thaliana] >gi|6714449|gb|AAF26136.1|AC011620_12 putative
  misc_feature (1)..(361): Homolog of NCBI NO: 26451784 NR Description: putative pectinesterase [Arabidopsis thaliana]
MMLSFDSFGDDVVSWIRPATERDGFWEKAGPSLGSGTGTEASLGFPSGLTEDVTVCKNGGKDCKYKTVQEAVDSAPDTNRTVKFVIRIREGVYEETVRVPFEKKNVVFIGDGMGKTVITGSLNVGQPGMTTFESATVGVLGDGFMARDLTIENTAGADAHQAVAFRSDSDFSVLENCEFLGNQDTLYAHSLRQFYKQCRIQGNVDFIFGNSAAVFQDCDILIASKHSKLEQGGANNAITAHGRIDASQSTGFVFLNCSINGTEEYMKEFQANPEGHKNFLGRPWKEFSRTVFVNCNLESLISPDGWMPWNGDFALKTLYYGEYKNTGPGSVRSSRVPWSSEIPEKHVDVYSVANFIQADEWASTTA

SEQ ID NO: 91288 - DNA, 1080 bp, Arabidopsis thaliana
  misc_feature (1)..(1080): Ceres Seq. ID no. 12727154
  misc_feature: MA Experiment ID: 20000227 Result: Down-regulated in Transcription
  misc_feature: MA Experiment 20000227 PARAMETER Experiment Name: At_Root-Tips-vs-Tops_P Parameter: Tissue Value: Root Tips vs. Root Tops
atggacatggagtcgaagaaaccatatctgatggttactataatacaagtcatatatacaatcatgttcttgatctccaaagccgtcttcaacggtggaatgaacactttcgtctttgttttctatcgtcaagctttcgctaccatcttcttggctcctctggctttcttctttgagcggaaaagtgctccacctctttcatttgtgaccttcatcaagatcttcatgctctctttatttggtgtgacattgagcttggacttaaacggtatcgcattatcatacacgtcggcaactttagccgccgccacaacagcttcccttccggccatcacattcttcttggctcttttatttggaatggagaggcttaaggttaagagcatacaaggaacagcaaagcttgtggggattactgtgtgcatgggaggggtaattatcttagctatttacaaaggtccattactgaaattacctttatgccctcatttttaccacggccaagaacatcctcaccggaataatcccggccacgtctccggcggttccacctcgtggctcaaaggatgtgtcctcatgataacctccaacattctatggggtctctggctcgttttacagggtcgtgtgttgaaggtttatccttcgaagctatatttcacaactcttcattgtctattgagttccattcaatcattcgtcatcgcgattgctttagagagagatatttcagcatggaagcttggttggaacctaagactcgttgcagtcatttactgcggattcattgtaacaggcgtagcatattatttgcaatcatgggttatagaaaagagaggacctgtcttcttatcaatgtttactcctttgtctctcctcttcactctcctctcttcagcgattctcttgtgcgagatcatcagtcttggaagtattgtaggtggattattattgatcataggactttactgtgtgctgtgggggaaaagcagagaggagaaaaacagtggtgatgataagattgatttacagaaggaaaacgatgtcgtgtgcaatgaagtgaaggttgtcattagttga

SEQ ID NO: 91289 - protein, 359 aa, Arabidopsis thaliana
  peptide (1)..(359): Ceres Seq. ID no. 12727155
  misc_feature (198)..(327): Pfam Name: Integral membrane protein DUF6 Pfam Description: Integral membrane protein DUF6
  misc_feature (1)..(359): Homolog of NCBI NO: 15238227 NR Description: nodulin-like protein; protein id: At5g64700.1
  misc_feature (3)..(333): Homolog of NCBI NO: 34903802 NR Description: OSJNBa0016I09.14 [Oryza sativa (japonica
  misc_feature (3)..(333): Homolog of NCBI NO: 34913776 NR Description: nodulin-like protein [Oryza sativa (japonica
  misc_feature (1)..(357): Homolog of NCBI NO: 30693682 NR Description: nodulin N21 family protein [Arabidopsis thaliana]
  misc_feature (3)..(332): Homolog of NCBI NO: 34903800 NR Description: OSJNBa0016I09.13 [Oryza sativa (japonica
  misc_feature (24)..(334): Homolog of NCBI NO: 34913778 NR Description: nodulin-like protein [Oryza sativa (japonica
  misc_feature (34)..(343): Homolog of NCBI NO: 34913772 NR Description: nodulin-like protein [Oryza sativa (japonica
  misc_feature (3)..(359): Homolog of NCBI NO: 15240683 NR Description: MtN21 nodulin protein-like; protein id:
  misc_feature (58)..(335): Homolog of NCBI NO: 15088548 NR Description: putative nodulin-like-like protein [Triticum
  misc_feature (2)..(55): Homolog of NCBI NO: 15088548 NR Description: putative nodulin-like-like protein [Triticum
MDMESKKPYLMVTIIQVIYTIMFLISKAVFNGGMNTFVFVFYRQAFATIFLAPLAFFFERKSAPPLSFVTFIKIFMLSLFGVTLSLDLNGIALSYTSATLAAATTASLPAITFFLALLFGMERLKVKSIQGTAKLVGITVCMGGVIILAIYKGPLLKLPLCPHFYHGQEHPHRNNPGHVSGGSTSWLKGCVLMITSNILWGLWLVLQGRVLKVYPSKLYFTTLHCLLSSIQSFVIAIALERDISAWKLGWNLRLVAVIYCGFIVTGVAYYLQSWVIEKRGPVFLSMFTPLSLLFTLLSSAILLCEIISLGSIVGGLLLIIGLYCVLWGKSREEKNSGDDKIDLQKENDVVCNEVKVVIS

SEQ ID NO: 91290 - protein, 357 aa, Arabidopsis thaliana
  peptide (1)..(357): Ceres Seq. ID no. 12727156
  misc_feature (196)..(325): Pfam Name: Integral membrane protein DUF6 Pfam Description: Integral membrane protein DUF6
  misc_feature (1)..(357): Homolog of NCBI NO: 15238227 NR Description: nodulin-like protein; protein id: At5g64700.1
  misc_feature (1)..(331): Homolog of NCBI NO: 34903802 NR Description: OSJNBa0016I09.14 [Oryza sativa (japonica
  misc_feature (1)..(331): Homolog of NCBI NO: 34913776 NR Description: nodulin-like protein [Oryza sativa (japonica
  misc_feature (1)..(355): Homolog of NCBI NO: 30693682 NR Description: nodulin N21 family protein [Arabidopsis thaliana]
  misc_feature (1)..(330): Homolog of NCBI NO: 34903800 NR Description: OSJNBa0016I09.13 [Oryza sativa (japonica
  misc_feature (22)..(332): Homolog of NCBI NO: 34913778 NR Description: nodulin-like protein [Oryza sativa (japonica
  misc_feature (32)..(341): Homolog of NCBI NO: 34913772 NR Description: nodulin-like protein [Oryza sativa (japonica
  misc_feature (1)..(357): Homolog of NCBI NO: 15240683 NR Description: MtN21 nodulin protein-like; protein id:
  misc_feature (56)..(333): Homolog of NCBI NO: 15088548 NR Description: putative nodulin-like-like protein [Triticum
  misc_feature (1)..(53): Homolog of NCBI NO: 15088548 NR Description: putative nodulin-like-like protein [Triticum
MESKKPYLMVTIIQVIYTIMFLISKAVFNGGMNTFVFVFYRQAFATIFLAPLAFFFERKSAPPLSFVTFIKIFMLSLFGVTLSLDLNGIALSYTSATLAAATTASLPAITFFLALLFGMERLKVKSIQGTAKLVGITVCMGGVIILAIYKGPLLKLPLCPHFYHGQEHPHRNNPGHVSGGSTSWLKGCVLMITSNILWGLWLVLQGRVLKVYPSKLYFTTLHCLLSSIQSFVIAIALERDISAWKLGWNLRLVAVIYCGFIVTGVAYYLQSWVIEKRGPVFLSMFTPLSLLFTLLSSAILLCEIISLGSIVGGLLLIIGLYCVLWGKSREEKNSGDDKIDLQKENDVVCNEVKVVIS

SEQ ID NO: 91291 - protein, 349 aa, Arabidopsis thaliana
  peptide (1)..(349): Ceres Seq. ID no. 12727157
  misc_feature (188)..(317): Pfam Name: Integral membrane protein DUF6 Pfam Description: Integral membrane protein DUF6
  misc_feature (1)..(349): Homolog of NCBI NO: 15238227 NR Description: nodulin-like protein; protein id: At5g64700.1
  misc_feature (1)..(323): Homolog of NCBI NO: 34903802 NR Description: OSJNBa0016I09.14 [Oryza sativa (japonica
  misc_feature (1)..(323): Homolog of NCBI NO: 34913776 NR Description: nodulin-like protein [Oryza sativa (japonica
  misc_feature (1)..(347): Homolog of NCBI NO: 30693682 NR Description: nodulin N21 family protein [Arabidopsis thaliana]
  misc_feature (1)..(322): Homolog of NCBI NO: 34903800 NR Description: OSJNBa0016I09.13 [Oryza sativa (japonica
  misc_feature (14)..(324): Homolog of NCBI NO: 34913778 NR Description: nodulin-like protein [Oryza sativa (japonica
  misc_feature (24)..(333): Homolog of NCBI NO: 34913772 NR Description: nodulin-like protein [Oryza sativa (japonica
  misc_feature (1)..(349): Homolog of NCBI NO: 15240683 NR Description: MtN21 nodulin protein-like; protein id:
  misc_feature (48)..(325): Homolog of NCBI NO: 15088548 NR Description: putative nodulin-like-like protein [Triticum
  misc_feature (1)..(45): Homolog of NCBI NO: 15088548 NR Description: putative nodulin-like-like protein [Triticum
MVTIIQVIYTIMFLISKAVFNGGMNTFVFVFYRQAFATIFLAPLAFFFERKSAPPLSFVTFIKIFMLSLFGVTLSLDLNGIALSYTSATLAAATTASLPAITFFLALLFGMERLKVKSIQGTAKLVGITVCMGGVIILAIYKGPLLKLPLCPHFYHGQEHPHRNNPGHVSGGSTSWLKGCVLMITSNILWGLWLVLQGRVLKVYPSKLYFTTLHCLLSSIQSFVIAIALERDISAWKLGWNLRLVAVIYCGFIVTGVAYYLQSWVIEKRGPVFLSMFTPLSLLFTLLSSAILLCEIISLGSIVGGLLLIIGLYCVLWGKSREEKNSGDDKIDLQKENDVVCNEVKVVIS

SEQ ID NO: 91292 - DNA, 3452 bp, Arabidopsis thaliana
  misc_feature (1)..(3452): Ceres Seq. ID no. 12727166
  misc_feature: MA Experiment ID: 20000171 Result: Down-regulated in Transcription
  misc_feature: MA Experiment 20000171 PARAMETER Experiment Name: At_42deg_Heat_P Parameter: Age (day) Value: 14
  misc_feature: MA Experiment 20000171 PARAMETER Experiment Name: At_42deg_Heat_P Parameter: Organism Value: A. thaliana
  misc_feature: MA Experiment 20000171 PARAMETER Experiment Name: At_42deg_Heat_P Parameter: Plant Line Value: WS
  misc_feature: MA Experiment 20000171 PARAMETER Experiment Name: At_42deg_Heat_P Parameter: Temperature (deg C) Value: 42 vs. 22
  misc_feature: MA Experiment 20000171 PARAMETER Experiment Name: At_42deg_Heat_P Parameter: Timepoint (hr) Value: 1
  misc_feature: MA Experiment 20000171 PARAMETER Experiment Name: At_42deg_Heat_P Parameter: Tissue Value: Aerial
  misc_feature: MA Experiment ID: 20000173 Result: Down-regulated in Transcription
  misc_feature: MA Experiment 20000173 PARAMETER Experiment Name: At_42deg_Heat_P Parameter: Age (day) Value: 14
  misc_feature: MA Experiment 20000173 PARAMETER Experiment Name: At_42deg_Heat_P Parameter: Organism Value: A. thaliana
  misc_feature: MA Experiment 20000173 PARAMETER Experiment Name: At_42deg_Heat_P Parameter: Plant Line Value: WS
  misc_feature: MA Experiment 20000173 PARAMETER Experiment Name: At_42deg_Heat_P Parameter: Temperature (deg C) Value: 42 vs. 22
  misc_feature: MA Experiment 20000173 PARAMETER Experiment Name: At_42deg_Heat_P Parameter: Timepoint (hr) Value: 6
  misc_feature: MA Experiment 20000173 PARAMETER Experiment Name: At_42deg_Heat_P Parameter: Tissue Value: Aerial
  misc_feature: MA Experiment ID: 20001451 Result: Up-regulated in Transcription
  misc_feature: MA Experiment 20001451 PARAMETER Experiment Name: At_Far-red-induction_P Parameter: Age (day) Value: 7
  misc_feature: MA Experiment 20001451 PARAMETER Experiment Name: At_Far-red-induction_P Parameter: Light Value: Far-red vs. White
  misc_feature: MA Experiment 20001451 PARAMETER Experiment Name: At_Far-red-induction_P Parameter: Organism Value: A. thaliana
  misc_feature: MA Experiment 20001451 PARAMETER Experiment Name: At_Far-red-induction_P Parameter: Plant Line Value: Columbia
  misc_feature: MA Experiment 20001451 PARAMETER Experiment Name: At_Far-red-induction_P Parameter: Timepoint (hr) Value: 24
  misc_feature: MA Experiment 20001451 PARAMETER Experiment Name: At_Far-red-induction_P Parameter: Tissue Value: Whole Plant
  misc_feature: MA Experiment ID: 20001557 Result: Up-regulated in Transcription
  misc_feature: MA Experiment 20001557 PARAMETER Experiment Name: At_Drought_Soil_Dry_P Parameter: Age (day) Value: 27
  misc_feature: MA Experiment 20001557 PARAMETER Experiment Name: At_Drought_Soil_Dry_P Parameter: Organism Value: A. thaliana
  misc_feature: MA Experiment 20001557 PARAMETER Experiment Name: At_Drought_Soil_Dry_P Parameter: Plant Line Value: WS
  misc_feature: MA Experiment 20001557 PARAMETER Experiment Name: At_Drought_Soil_Dry_P Parameter: Post Timepoint (hr) Value: 3
  misc_feature: MA Experiment 20001557 PARAMETER Experiment Name: At_Drought_Soil_Dry_P Parameter: Post-Treatment Value: Re-Water vs. No Drought
  misc_feature: MA Experiment 20001557 PARAMETER Experiment Name: At_Drought_Soil_Dry_P Parameter: Timepoint (day) Value: 13
  misc_feature: MA Experiment 20001557 PARAMETER Experiment Name: At_Drought_Soil_Dry_P Parameter: Treatment Value: Drought vs. No Drought
  misc_feature: MA Experiment ID: 20001558 Result: Up-regulated in Transcription
  misc_feature: MA Experiment 20001558 PARAMETER Experiment Name: At_Drought_Soil_Dry_P Parameter: Age (day) Value: 27
  misc_feature: MA Experiment 20001558 PARAMETER Experiment Name: At_Drought_Soil_Dry_P Parameter: Organism Value: A. thaliana
  misc_feature: MA Experiment 20001558 PARAMETER Experiment Name: At_Drought_Soil_Dry_P Parameter: Plant Line Value: WS
  misc_feature: MA Experiment 20001558 PARAMETER Experiment Name: At_Drought_Soil_Dry_P Parameter: Post Timepoint (hr) Value: 6
  misc_feature: MA Experiment 20001558 PARAMETER Experiment Name: At_Drought_Soil_Dry_P Parameter: Post-Treatment Value: Re-Water vs. No Drought
  misc_feature: MA Experiment 20001558 PARAMETER Experiment Name: At_Drought_Soil_Dry_P Parameter: Timepoint (day) Value: 13
  misc_feature: MA Experiment 20001558 PARAMETER Experiment Name: At_Drought_Soil_Dry_P Parameter: Treatment Value: Drought vs. No Drought
  misc_feature: MA Experiment ID: 20001906 Result: Down-regulated in Transcription
  misc_feature: MA Experiment 20001906 PARAMETER Experiment Name: At_Drought_Reproduction_P Parameter: Age (day) Value: 35
  misc_feature: MA Experiment 20001906 PARAMETER Experiment Name: At_Drought_Reproduction_P Parameter: Organism Value: A. thaliana
  misc_feature: MA Experiment 20001906 PARAMETER Experiment Name: At_Drought_Reproduction_P Parameter: Plant Line Value: WS
  misc_feature: MA Experiment 20001906 PARAMETER Experiment Name: At_Drought_Reproduction_P Parameter: Timepoint (day) Value: 5
  misc_feature: MA Experiment 20001906 PARAMETER Experiment Name: At_Drought_Reproduction_P Parameter: Tissue Value: Siliques
  misc_feature: MA Experiment 20001906 PARAMETER Experiment Name: At_Drought_Reproduction_P Parameter: Treatment Value: Drought vs. No Drought
atgaacaccggtggtcggttaatcgccggttctcacaacaggaatgagtttgtcctcattaatgccgatgagaatgcccgaataagatcagtccaagagctgagtggacagacatgtcaaatctgcagagatgagatcgaattgactgttgatggagaaccgtttgtggcatgtaacgaatgtgcattccctgtgtgtagaccttgctatgagtacgaaagacgagaaggcaatcaagcttgtccacagtgcaaaacccgtttcaaacgtcttaaaggaagtccaagagttgaaggtgatgaagaggaagatgacattgatgatttagacaatgagtttgagtatggaaataatgggattggatttgatcaggtttctgaaggtatgtcaatctctcgtcgcaactccggtttcccacaatctgatttggattcagctccacctggctctcagattccattgctgacttacggcgacgaggacgttgagatttcttctgatagacatgctcttattgttcctccttcacttggtggtcatggcaatagagttcatcctgtttctctttctgacccgaccgtggctgcacatccaaggcctatggtacctcagaaagatcttgcggtttatggttatggaagtgtcgcttggaaagatcggatggaggaatggaagagaaagcagaatgagaaacttcaggttgttaggcatgaaggagatcctgattttgaagatggtgatgatgctgattttccaatgatggatgagggaaggcagccattgtctaggaagataccaatcaaatcgagcaagataaatccttaccggatgttaattgtgctacgtcttgtgattcttggtctcttctttcactaccgtattcttcaccccgtcaaagatgcatatgctttgtggcttatttctgttatatgtgagatatggtttgctgtttcatgggttcttgatcagttccctaaatggtaccctatcgagcgagaaacgtacttggaccgactctcattaagatatgagaaagaagggaaaccgtcgggactatcccctgtggatgtatttgttagtacagtggatccattgaaagagcctccgcttattactgcaaatactgtcttgtctattcttgctgttgattatcctgtcgataaggttgcttgttacgtatctgatgatggtgctgctatgcttactttcgaagctctttctgagaccgctgaattcgcaaggaaatgggttcctttctgcaagaaatattgtattgagcctcgtgctcccgaatggtatttctgccataaaatggactacttgaagaataaagttcatcccgcatttgttagggagcggcgagccatgaagagagattatgaagaattcaaagtaaagatcaatgctttagtagcaacagcacagaaagtgcctgaggatggttggactatgcaagacggtacaccttggcccggtaatagtgtgcgagatcatcctggcatgattcaggtcttccttggaagtgacggtgttcgtgatgtcgaaaacaacgagttgcctcgattagtttacgtttctcgtgagaagagacccggatttgatcaccataagaaggctggagctatgaattccctgatacgagtctctggggttctatcaaatgctccttaccttctgaatgtcgattgtgatcactacatcaacaatagcaaagctcttagagaagcaatgtgtttcatgatggatcctcagtcaggaaagaaaatctgttatgttcagttccctcaaaggttcgatgggattgataggcacgatcgatactcaaatcgcaatgttgtgttctttgatatcaatatgaaaggtttggatgggctacaagggcctatatacgtcggtacaggttgtgttttcaggaggcaagcgctttacggatttgatgcaccgaagaagaagaagggcccacgtaagacatgcaattgctggccaaaatggtgtctcctatgttttggttcaagaaagaatcgtaaagcaaagacagtggctgcggataagaagaagaagaatagggaagcgtcaaagcagatccacgcattagaaaatatcgaagagggccgcgtcactaaaggttctaacgtagaacagtcaaccgaggcaatgcaaatgaagttggagaagaaatttgggcagtctcctgtatttgttgcatctgcgcgtatggagaatggtgggatggctagaaacgcaagcccggcttgtctgcttaaagaagccatccaagtcattagttgcggatatgaagataaaactgaatggggaaaagagattgggtggatctatggttctgttaccgaagatattcttacgggttttaagatgcattctcatggttggagatctgtttattgtacaccaaagttagcggctttcaaaggatcagctccaatcaatctttcggatcgtctccatcaagttcttcgatgggcgcttgggtcggttgagattttcttgagtaggcattgtcctatttggtatggttatggaggtgggttgaaatggcttgagcggttgtcctacattaactctgtggtttacccgtggacctctctaccgctcatcgtttactgttctctccctgccatctgtcttctcactggaaaattcatcgttcccgagattagcaactatgcgagtatcctcttcatggcgctcttctcgtcgattgcaataacgggtattctcgagatgcaatggggcaaagttgggatcgatgattggtggagaaacgaacagttttgggtcattggaggtgtttctgcgcatctgtttgctctcttccaaggtctcctcaaggttcttgctggtgtcgacactaacttcacagtcacatcaaaagcagctgatgatggagagttctctgacctttacctcttcaaatggacttcacttctcatccctccaatgactctactcatcataaacgtcattggagtcatagtcggagtctctgatgccatcagcaatggatacgactcgtggggaccgcttttcggaagactgttctttgcactttgggtcatcattcatctttacccgttccttaaaggtttgcttgggaaacaagatagaatgccaaccattattgtcgtctggtccatcctcctggcctcgattcttacacttctttgggtccgggttaatccgtttgtggcgaaaggcggtcctattctcgagatctgtggtttagactgcttgtgattcgattgaccggtggatgggttggtgaaaaaggtttaattcccacggatcaaagagaggtaagagagatattgttttacctctaaaagactccttcattgtgttcattagatgatgaaaaatgaaaagaaaaagaagatttaattttgttacgagaattgttatttttgcaagaatgtgttgtagatagcggccgc

SEQ ID NO: 91293 - protein, 1084 aa, Arabidopsis thaliana
  peptide (1)..(1084): Ceres Seq. ID no. 12727167
  misc_feature (356)..(424): Pfam Name: Glycosyl transferase Pfam Description: Glycosyl transferase
  misc_feature (493)..(1067): Homolog of NCBI NO: 15217853 NR Description: hypothetical protein; protein id: At1g02730.1
  misc_feature (255)..(470): Homolog of NCBI NO: 15217853 NR Description: hypothetical protein; protein id: At1g02730.1
  misc_feature (32)..(109): Homolog of NCBI NO: 15217853 NR Description: hypothetical protein; protein id: At1g02730.1
  misc_feature (476)..(1067): Homolog of NCBI NO: 15237873 NR Description: cellulose synthase catalytic subunit -like protein id: At5g16910.1 [Arabidopsis thaliana]
  misc_feature (210)..(470): Homolog of NCBI NO: 15237873 NR Description: cellulose synthase catalytic subunit -like protein id: At5g16910.1 [Arabidopsis thaliana]
  misc_feature (36)..(103): Homolog of NCBI NO: 15237873 NR Description: cellulose synthase catalytic subunit -like protein id: At5g16910.1 [Arabidopsis thaliana]
  misc_feature (476)..(1067): Homolog of NCBI NO: 27372782 NR Description: cellulose synthase-like protein D4 [Populus
  misc_feature (240)..(470): Homolog of NCBI NO: 27372782 NR Description: cellulose synthase-like protein D4 [Populus
  misc_feature (476)..(1067): Homolog of NCBI NO: 15228448 NR Description: putative cellulose synthase catalytic subunit; id: At3g03050.1, supported by cDNA: gi_12619787, supported by gi_13430535 [Arabidopsis thaliana]
  misc_feature (253)..(470): Homolog of NCBI NO: 15228448 NR Description: putative cellulose synthase catalytic subunit; id: At3g03050.1, supported by cDNA: gi_12619787, supported by gi_13430535 [Arabidopsis thaliana]
MNTGGRLIAGSHNRNEFVLINADENARIRSVQELSGQTCQICRDEIELTVDGEPFVACNECAFPVCRPCYEYERREGNQACPQCKTRFKRLKGSPRVEGDEEEDDIDDLDNEFEYGNNGIGFDQVSEGMSISRRNSGFPQSDLDSAPPGSQIPLLTYGDEDVEISSDRHALIVPPSLGGHGNRVHPVSLSDPTVAAHPRPMVPQKDLAVYGYGSVAWKDRMEEWKRKQNEKLQVVRHEGDPDFEDGDDADFPMMDEGRQPLSRKIPIKSSKINPYRMLIVLRLVILGLFFHYRILHPVKDAYALWLISVICEIWFAVSWVLDQFPKWYPIERETYLDRLSLRYEKEGKPSGLSPVDVFVSTVDPLKEPPLITANTVLSILAVDYPVDKVACYVSDDGAAMLTFEALSETAEFARKWVPFCKKYCIEPRAPEWYFCHKMDYLKNKVHPAFVRERRAMKRDYEEFKVKINALVATAQKVPEDGWTMQDGTPWPGNSVRDHPGMIQVFLGSDGVRDVENNELPRLVYVSREKRPGFDHHKKAGAMNSLIRVSGVLSNAPYLLNVDCDHYINNSKALREAMCFMMDPQSGKKICYVQFPQRFDGIDRHDRYSNRNVVFFDINMKGLDGLQGPIYVGTGCVFRRQALYGFDAPKKKKGPRKTCNCWPKWCLLCFGSRKNRKAKTVAADKKKKNREASKQIHALENIEEGRVTKGSNVEQSTEAMQMKLEKKFGQSPVFVASARMENGGMARNASPACLLKEAIQVISCGYEDKTEWGKEIGWIYGSVTEDILTGFKMHSHGWRSVYCTPKLAAFKGSAPINLSDRLHQVLRWALGSVEIFLSRHCPIWYGYGGGLKWLERLSYINSVVYPWTSLPLIVYCSLPAICLLTGKFIVPEISNYASILFMALFSSIAITGILEMQWGKVGIDDWWRNEQFWVIGGVSAHLFALFQGLLKVLAGVDTNFTVTSKAADDGEFSDLYLFKWTSLLIPPMTLLIINVIGVIVGVSDAISNGYDSWGPLFGRLFFALWVIIHLYPFLKGLLGKQDRMPTIIVVWSILLASILTLLWVRVNPFVAKGGPILEICGLDCL

SEQ ID NO: 91294 - protein, 956 aa, Arabidopsis thaliana
  peptide (1)..(956): Ceres Seq. ID no. 12727168
  misc_feature (228)..(296): Pfam Name: Glycosyl transferase Pfam Description: Glycosyl transferase
  misc_feature (365)..(939): Homolog of NCBI NO: 15217853 NR Description: hypothetical protein; protein id: At1g02730.1
  misc_feature (127)..(342): Homolog of NCBI NO: 15217853 NR Description: hypothetical protein; protein id: At1g02730.1
  misc_feature (348)..(939): Homolog of NCBI NO: 15237873 NR Description: cellulose synthase catalytic subunit -like protein id: At5g16910.1 [Arabidopsis thaliana]
  misc_feature (82)..(342): Homolog of NCBI NO: 15237873 NR Description: cellulose synthase catalytic subunit -like protein id: At5g16910.1 [Arabidopsis thaliana]
  misc_feature (348)..(939): Homolog of NCBI NO: 27372782 NR Description: cellulose synthase-like protein D4 [Populus
  misc_feature (112)..(342): Homolog of NCBI NO: 27372782 NR Description: cellulose synthase-like protein D4 [Populus
  misc_feature (348)..(939): Homolog of NCBI NO: 15228448 NR Description: putative cellulose synthase catalytic subunit; id: At3g03050.1, supported by cDNA: gi_12619787, supported by gi_13430535 [Arabidopsis thaliana]
  misc_feature (125)..(342): Homolog of NCBI NO: 15228448 NR Description: putative cellulose synthase catalytic subunit; id: At3g03050.1, supported by cDNA: gi_12619787, supported by gi_13430535 [Arabidopsis thaliana]
  misc_feature (618)..(952): Homolog of NCBI NO: 13925884 NR Description: cellulose synthase D-like protein [Nicotiana
  misc_feature (113)..(342): Homolog of NCBI NO: 13925884 NR Description: cellulose synthase D-like protein [Nicotiana
MSISRRNSGFPQSDLDSAPPGSQIPLLTYGDEDVEISSDRHALIVPPSLGGHGNRVHPVSLSDPTVAAHPRPMVPQKDLAVYGYGSVAWKDRMEEWKRKQNEKLQVVRHEGDPDFEDGDDADFPMMDEGRQPLSRKIPIKSSKINPYRMLIVLRLVILGLFFHYRILHPVKDAYALWLISVICEIWFAVSWVLDQFPKWYPIERETYLDRLSLRYEKEGKPSGLSPVDVFVSTVDPLKEPPLITANTVLSILAVDYPVDKVACYVSDDGAAMLTFEALSETAEFARKWVPFCKKYCIEPRAPEWYFCHKMDYLKNKVHPAFVRERRAMKRDYEEFKVKINALVATAQKVPEDGWTMQDGTPWPGNSVRDHPGMIQVFLGSDGVRDVENNELPRLVYVSREKRPGFDHHKKAGAMNSLIRVSGVLSNAPYLLNVDCDHYINNSKALREAMCFMMDPQSGKKICYVQFPQRFDGIDRHDRYSNRNVVFFDINMKGLDGLQGPIYVGTGCVFRRQALYGFDAPKKKKGPRKTCNCWPKWCLLCFGSRKNRKAKTVAADKKKKNREASKQIHALENIEEGRVTKGSNVEQSTEAMQMKLEKKFGQSPVFVASARMENGGMARNASPACLLKEAIQVISCGYEDKTEWGKEIGWIYGSVTEDILTGFKMHSHGWRSVYCTPKLAAFKGSAPINLSDRLHQVLRWALGSVEIFLSRHCPIWYGYGGGLKWLERLSYINSVVYPWTSLPLIVYCSLPAICLLTGKFIVPEISNYASILFMALFSSIAITGILEMQWGKVGIDDWWRNEQFWVIGGVSAHLFALFQGLLKVLAGVDTNFTVTSKAADDGEFSDLYLFKWTSLLIPPMTLLIINVIGVIVGVSDAISNGYDSWGPLFGRLFFALWVIIHLYPFLKGLLGKQDRMPTIIVVWSILLASILTLLWVRVNPFVAKGGPILEICGLDCL

SEQ ID NO: 91295 - protein, 884 aa, Arabidopsis thaliana
  peptide (1)..(884): Ceres Seq. ID no. 12727169
  misc_feature (156)..(224): Pfam Name: Glycosyl transferase Pfam Description: Glycosyl transferase
  misc_feature (293)..(867): Homolog of NCBI NO: 15217853 NR Description: hypothetical protein; protein id: At1g02730.1
  misc_feature (55)..(270): Homolog of NCBI NO: 15217853 NR Description: hypothetical protein; protein id: At1g02730.1
  misc_feature (276)..(867): Homolog of NCBI NO: 15237873 NR Description: cellulose synthase catalytic subunit -like protein id: At5g16910.1 [Arabidopsis thaliana]
  misc_feature (10)..(270): Homolog of NCBI NO: 15237873 NR Description: cellulose synthase catalytic subunit -like protein id: At5g16910.1 [Arabidopsis thaliana]
  misc_feature (276)..(867): Homolog of NCBI NO: 27372782 NR Description: cellulose synthase-like protein D4 [Populus
  misc_feature (40)..(270): Homolog of NCBI NO: 27372782 NR Description: cellulose synthase-like protein D4 [Populus
  misc_feature (276)..(867): Homolog of NCBI NO: 15228448 NR Description: putative cellulose synthase catalytic subunit; id: At3g03050.1, supported by cDNA: gi_12619787, supported by gi_13430535 [Arabidopsis thaliana]
  misc_feature (53)..(270): Homolog of NCBI NO: 15228448 NR Description: putative cellulose synthase catalytic subunit; id: At3g03050.1, supported by cDNA: gi_12619787, supported by gi_13430535 [Arabidopsis thaliana]
  misc_feature (546)..(880): Homolog of NCBI NO: 13925884 NR Description: cellulose synthase D-like protein [Nicotiana
  misc_feature (41)..(270): Homolog of NCBI NO: 13925884 NR Description: cellulose synthase D-like protein [Nicotiana
MVPQKDLAVYGYGSVAWKDRMEEWKRKQNEKLQVVRHEGDPDFEDGDDADFPMMDEGRQPLSRKIPIKSSKINPYRMLIVLRLVILGLFFHYRILHPVKDAYALWLISVICEIWFAVSWVLDQFPKWYPIERETYLDRLSLRYEKEGKPSGLSPVDVFVSTVDPLKEPPLITANTVLSILAVDYPVDKVACYVSDDGAAMLTFEALSETAEFARKWVPFCKKYCIEPRAPEWYFCHKMDYLKNKVHPAFVRERRAMKRDYEEFKVKINALVATAQKVPEDGWTMQDGTPWPGNSVRDHPGMIQVFLGSDGVRDVENNELPRLVYVSREKRPGFDHHKKAGAMNSLIRVSGVLSNAPYLLNVDCDHYINNSKALREAMCFMMDPQSGKKICYVQFPQRFDGIDRHDRYSNRNVVFFDINMKGLDGLQGPIYVGTGCVFRRQALYGFDAPKKKKGPRKTCNCWPKWCLLCFGSRKNRKAKTVAADKKKKNREASKQIHALENIEEGRVTKGSNVEQSTEAMQMKLEKKFGQSPVFVASARMENGGMARNASPACLLKEAIQVISCGYEDKTEWGKEIGWIYGSVTEDILTGFKMHSHGWRSVYCTPKLAAFKGSAPINLSDRLHQVLRWALGSVEIFLSRHCPIWYGYGGGLKWLERLSYINSVVYPWTSLPLIVYCSLPAICLLTGKFIVPEISNYASILFMALFSSIAITGILEMQWGKVGIDDWWRNEQFWVIGGVSAHLFALFQGLLKVLAGVDTNFTVTSKAADDGEFSDLYLFKWTSLLIPPMTLLIINVIGVIVGVSDAISNGYDSWGPLFGRLFFALWVIIHLYPFLKGLLGKQDRMPTIIVVWSILLASILTLLWVRVNPFVAKGGPILEICGLDCL

SEQ ID NO: 91296 - DNA, 1525 bp, Arabidopsis thaliana
  misc_feature (1)..(1525): Ceres Seq. ID no. 12727170
  misc_feature: MA Experiment ID: 20000173 Result: Up-regulated in Transcription
  misc_feature: MA Experiment 20000173 PARAMETER Experiment Name: At_42deg_Heat_P Parameter: Age (day) Value: 14
  misc_feature: MA Experiment 20000173 PARAMETER Experiment Name: At_42deg_Heat_P Parameter: Organism Value: A. thaliana
  misc_feature: MA Experiment 20000173 PARAMETER Experiment Name: At_42deg_Heat_P Parameter: Plant Line Value: WS
  misc_feature: MA Experiment 20000173 PARAMETER Experiment Name: At_42deg_Heat_P Parameter: Temperature (deg C) Value: 42 vs. 22
  misc_feature: MA Experiment 20000173 PARAMETER Experiment Name: At_42deg_Heat_P Parameter: Timepoint (hr) Value: 6
  misc_feature: MA Experiment 20000173 PARAMETER Experiment Name: At_42deg_Heat_P Parameter: Tissue Value: Aerial
  misc_feature: MA Experiment ID: 20000179 Result: Down-regulated in Transcription
  misc_feature: MA Experiment 20000179 PARAMETER Experiment Name: At_Germinating_Seeds_P Parameter: Age (hr) Value: 6 vs. 0
  misc_feature: MA Experiment 20000179 PARAMETER Experiment Name: At_Germinating_Seeds_P Parameter: Tissue Value: Germinating Seeds
  misc_feature: MA Experiment ID: 20000180 Result: Down-regulated in Transcription
  misc_feature: MA Experiment 20000180 PARAMETER Experiment Name: At_Germinating_Seeds_P Parameter: Age (hr) Value: 24 vs. 0
  misc_feature: MA Experiment 20000180 PARAMETER Experiment Name: At_Germinating_Seeds_P Parameter: Tissue Value: Germinating Seeds
  misc_feature: MA Experiment ID: 20000182 Result: Up-regulated in Transcription
  misc_feature: MA Experiment 20000182 PARAMETER Experiment Name: At_2mM_SA_P Parameter: Age (day) Value: 14
  misc_feature: MA Experiment 20000182 PARAMETER Experiment Name: At_2mM_SA_P Parameter: Organism Value: A. thaliana
  misc_feature: MA Experiment 20000182 PARAMETER Experiment Name: At_2mM_SA_P Parameter: Plant Line Value: WS
  misc_feature: MA Experiment 20000182 PARAMETER Experiment Name: At_2mM_SA_P Parameter: Timepoint (hr) Value: 6
  misc_feature: MA Experiment 20000182 PARAMETER Experiment Name: At_2mM_SA_P Parameter: Tissue Value: Aerial
  misc_feature: MA Experiment 20000182 PARAMETER Experiment Name: At_2mM_SA_P Parameter: Treatment Value: 2mM SA vs. No Treatment
  misc_feature: MA Experiment ID: 20000184 Result: Down-regulated in Transcription
  misc_feature: MA Experiment 20000184 PARAMETER Experiment Name: At_Shoots__P Parameter: Age (day) Value: 7
  misc_feature: MA Experiment 20000184 PARAMETER Experiment Name: At_Shoots__P Parameter: Tissue Value: Shoots vs. Whole Plant
  misc_feature: MA Experiment ID: 20000185 Result: Down-regulated in Transcription
  misc_feature: MA Experiment 20000185 PARAMETER Experiment Name: At_Roots__P Parameter: Age (day) Value: 7 vs. 21
  misc_feature: MA Experiment 20000185 PARAMETER Experiment Name: At_Roots__P Parameter: Organism Value: A. thaliana
  misc_feature: MA Experiment 20000185 PARAMETER Experiment Name: At_Roots__P Parameter: Tissue Value: Roots vs. Whole Plant
  misc_feature: MA Experiment ID: 20000213 Result: Up-regulated in Transcription
  misc_feature: MA Experiment 20000213 PARAMETER Experiment Name: At_4deg_Cold_P Parameter: Timepoint (hr) Value: 2
  misc_feature: MA Experiment ID: 20000234 Result: Down-regulated in Transcription
  misc_feature: MA Experiment 20000234 PARAMETER Experiment Name: At_Siliques_P Parameter: Age (day) Value: 21
  misc_feature: MA Experiment 20000234 PARAMETER Experiment Name: At_Siliques_P Parameter: Organism Value: A. thaliana
  misc_feature: MA Experiment 20000234 PARAMETER Experiment Name: At_Siliques_P Parameter: Plant Line Value: WS
  misc_feature: MA Experiment 20000234 PARAMETER Experiment Name: At_Siliques_P Parameter: Tissue Value: Less Than 5mm Siliques vs. Whole Plant
  misc_feature: MA Experiment ID: 20000235 Result: Down-regulated in Transcription
  misc_feature: MA Experiment 20000235 PARAMETER Experiment Name: At_Siliques_P Parameter: Age (day) Value: 21
  misc_feature: MA Experiment 20000235 PARAMETER Experiment Name: At_Siliques_P Parameter: Organism Value: A. thaliana
  misc_feature: MA Experiment 20000235 PARAMETER Experiment Name: At_Siliques_P Parameter: Plant Line Value: WS
  misc_feature: MA Experiment 20000235 PARAMETER Experiment Name: At_Siliques_P Parameter: Tissue Value: 5-10mm Siliques vs. Whole Plant
  misc_feature: MA Experiment ID: 20000264 Result: Down-regulated in Transcription
  misc_feature: MA Experiment 20000264 PARAMETER Experiment Name: At_Open_Flower_P Parameter: Age (day) Value: 21
  misc_feature: MA Experiment 20000264 PARAMETER Experiment Name: At_Open_Flower_P Parameter: Plant Line Value: WS
  misc_feature: MA Experiment 20000264 PARAMETER Experiment Name: At_Open_Flower_P Parameter: Tissue Value: Open Flower vs. Whole Plant
  misc_feature: MA Experiment ID: 20000265 Result: Down-regulated in Transcription
  misc_feature: MA Experiment 20000265 PARAMETER Experiment Name: At_Open_Flower_P Parameter: Age (day) Value: 21
  misc_feature: MA Experiment 20000265 PARAMETER Experiment Name: At_Open_Flower_P Parameter: Plant Line Value: WS
  misc_feature: MA Experiment 20000265 PARAMETER Experiment Name: At_Open_Flower_P Parameter: Tissue Value: Closed Flower vs. Whole Plant
  misc_feature: MA Experiment ID: 20000286 Result: Down-regulated in Transcription
  misc_feature: MA Experiment 20000286 PARAMETER Experiment Name: At_Open_Flower_P Parameter: Age (day) Value: 21
  misc_feature: MA Experiment 20000286 PARAMETER Experiment Name: At_Open_Flower_P Parameter: Plant Line Value: WS
  misc_feature: MA Experiment 20000286 PARAMETER Experiment Name: At_Open_Flower_P Parameter: Tissue Value: Half Open vs. Whole Plant
  misc_feature: MA Experiment ID: 20000437 Result: Up-regulated in Transcription
  misc_feature: MA Experiment 20000437 PARAMETER Experiment Name: At_Drought_P Parameter: Age (day) Value: 8
  misc_feature: MA Experiment 20000437 PARAMETER Experiment Name: At_Drought_P Parameter: Organism Value: A. thaliana
  misc_feature: MA Experiment 20000437 PARAMETER Experiment Name: At_Drought_P Parameter: Plant Line Value: WS
  misc_feature: MA Experiment 20000437 PARAMETER Experiment Name: At_Drought_P Parameter: Timepoint (hr) Value: 24
  misc_feature: MA Experiment 20000437 PARAMETER Experiment Name: At_Drought_P Parameter: Tissue Value: Whole Plant
  misc_feature: MA Experiment 20000437 PARAMETER Experiment Name: At_Drought_P Parameter: Treatment Value: Drought vs. No Drought
  misc_feature: MA Experiment ID: 20000439 Result: Down-regulated in Transcription
  misc_feature: MA Experiment 20000439 PARAMETER Experiment Name: At_Roots__P Parameter: Age (day) Value: 14 vs. 21
  misc_feature: MA Experiment 20000439 PARAMETER Experiment Name: At_Roots__P Parameter: Organism Value: A. thaliana
  misc_feature: MA Experiment 20000439 PARAMETER Experiment Name: At_Roots__P Parameter: Tissue Value: Roots vs. Whole Plant
  misc_feature: MA Experiment ID: 20000456 Result: Up-regulated in Transcription
  misc_feature: MA Experiment 20000456 PARAMETER Experiment Name: At_100uM_BA_P Parameter: Age (day) Value: 14
  misc_feature: MA Experiment 20000456 PARAMETER Experiment Name: At_100uM_BA_P Parameter: Organism Value: A. thaliana
  misc_feature: MA Experiment 20000456 PARAMETER Experiment Name: At_100uM_BA_P Parameter: Plant Line Value: WS
  misc_feature: MA Experiment 20000456 PARAMETER Experiment Name: At_100uM_BA_P Parameter: Timepoint (hr) Value: 6
  misc_feature: MA Experiment 20000456 PARAMETER Experiment Name: At_100uM_BA_P Parameter: Tissue Value: Aerial
  misc_feature: MA Experiment 20000456 PARAMETER Experiment Name: At_100uM_BA_P Parameter: Treatment Value: 100uM BA vs. No Treatment
  misc_feature: MA Experiment ID: 20000460 Result: Up-regulated in Transcription
  misc_feature: MA Experiment 20000460 PARAMETER Experiment Name: At_10percent_PEG_P Parameter: Age (day) Value: 12
  misc_feature: MA Experiment 20000460 PARAMETER Experiment Name: At_10percent_PEG_P Parameter: Organism Value: A. thaliana
  misc_feature: MA Experiment 20000460 PARAMETER Experiment Name: At_10percent_PEG_P Parameter: Plant Line Value: WS
  misc_feature: MA Experiment 20000460 PARAMETER Experiment Name: At_10percent_PEG_P Parameter: Timepoint (day) Value: 12
  misc_feature: MA Experiment 20000460 PARAMETER Experiment Name: At_10percent_PEG_P Parameter: Tissue Value: Whole Plant
  misc_feature: MA Experiment 20000460 PARAMETER Experiment Name: At_10percent_PEG_P Parameter: Treatment Value: 10percent PEG vs. No Treatment
  misc_feature: MA Experiment ID: 20000495 Result: Down-regulated in Transcription
  misc_feature: MA Experiment 20000495 PARAMETER Experiment Name: At_Guard_Cells_P Parameter: Harvest Date Value: 8/2/2002
  misc_feature: MA Experiment 20000495 PARAMETER Experiment Name: At_Guard_Cells_P Parameter: Organism Value: A. thaliana
  misc_feature: MA Experiment 20000495 PARAMETER Experiment Name: At_Guard_Cells_P Parameter: Tissue Value: Guard Cells vs. Leaves
  misc_feature: MA Experiment ID: 20000496 Result: Down-regulated in Transcription
  misc_feature: MA Experiment 20000496 PARAMETER Experiment Name: At_Guard_Cells_P Parameter: Harvest Date Value: 7/19/2002
  misc_feature: MA Experiment 20000496 PARAMETER Experiment Name: At_Guard_Cells_P Parameter: Organism Value: Canola
  misc_feature: MA Experiment 20000496 PARAMETER Experiment Name: At_Guard_Cells_P Parameter: Tissue Value: Guard Cells vs. Leaves
  misc_feature: MA Experiment ID: 20000709 Result: Up-regulated in Transcription
  misc_feature: MA Experiment 20000709 PARAMETER Experiment Name: At_15mM_NH4NO3_L-to-H_P Parameter: Age (hr) Value: 14
  misc_feature: MA Experiment 20000709 PARAMETER Experiment Name: At_15mM_NH4NO3_L-to-H_P Parameter: Organism Value: A. thaliana
  misc_feature: MA Experiment 20000709 PARAMETER Experiment Name: At_15mM_NH4NO3_L-to-H_P Parameter: Plant Line Value: WS
  misc_feature: MA Experiment 20000709 PARAMETER Experiment Name: At_15mM_NH4NO3_L-to-H_P Parameter: Timepoint (hr) Value: 4
  misc_feature: MA Experiment 20000709 PARAMETER Experiment Name: At_15mM_NH4NO3_L-to-H_P Parameter: Tissue Value: Aerial
  misc_feature: MA Experiment 20000709 PARAMETER Experiment Name: At_15mM_NH4NO3_L-to-H_P Parameter: Treatment Value: 15mM NH4NO3 vs. 30mM Mannitol
  misc_feature: MA Experiment ID: 20001248 Result: Up-regulated in Transcription
  misc_feature: MA Experiment 20001248 PARAMETER Experiment Name: At_Far-red-induction_P Parameter: Age (day) Value: 7
  misc_feature: MA Experiment 20001248 PARAMETER Experiment Name: At_Far-red-induction_P Parameter: Light Value: Far-red vs. White
  misc_feature: MA Experiment 20001248 PARAMETER Experiment Name: At_Far-red-induction_P Parameter: Organism Value: A. thaliana
  misc_feature: MA Experiment 20001248 PARAMETER Experiment Name: At_Far-red-induction_P Parameter: Plant Line Value: Columbia
  misc_feature: MA Experiment 20001248 PARAMETER Experiment Name: At_Far-red-induction_P Parameter: Timepoint (hr) Value: 4
  misc_feature: MA Experiment 20001248 PARAMETER Experiment Name: At_Far-red-induction_P Parameter: Tissue Value: Whole Plant
  misc_feature: MA Experiment ID: 20001557 Result: Up-regulated in Transcription
  misc_feature: MA Experiment 20001557 PARAMETER Experiment Name: At_Drought_Soil_Dry_P Parameter: Age (day) Value: 27
  misc_feature: MA Experiment 20001557 PARAMETER Experiment Name: At_Drought_Soil_Dry_P Parameter: Organism Value: A. thaliana
  misc_feature: MA Experiment 20001557 PARAMETER Experiment Name: At_Drought_Soil_Dry_P Parameter: Plant Line Value: WS
  misc_feature: MA Experiment 20001557 PARAMETER Experiment Name: At_Drought_Soil_Dry_P Parameter: Post Timepoint (hr) Value: 3
  misc_feature: MA Experiment 20001557 PARAMETER Experiment Name: At_Drought_Soil_Dry_P Parameter: Post-Treatment Value: Re-Water vs. No Drought
  misc_feature: MA Experiment 20001557 PARAMETER Experiment Name: At_Drought_Soil_Dry_P Parameter: Timepoint (day) Value: 13
  misc_feature: MA Experiment 20001557 PARAMETER Experiment Name: At_Drought_Soil_Dry_P Parameter: Treatment Value: Drought vs. No Drought
  misc_feature: MA Experiment ID: 20001558 Result: Up-regulated in Transcription
  misc_feature: MA Experiment 20001558 PARAMETER Experiment Name: At_Drought_Soil_Dry_P Parameter: Age (day) Value: 27
  misc_feature: MA Experiment 20001558 PARAMETER Experiment Name: At_Drought_Soil_Dry_P Parameter: Organism Value: A. thaliana
  misc_feature: MA Experiment 20001558 PARAMETER Experiment Name: At_Drought_Soil_Dry_P Parameter: Plant Line Value: WS
  misc_feature: MA Experiment 20001558 PARAMETER Experiment Name: At_Drought_Soil_Dry_P Parameter: Post Timepoint (hr) Value: 6
  misc_feature: MA Experiment 20001558 PARAMETER Experiment Name: At_Drought_Soil_Dry_P Parameter: Post-Treatment Value: Re-Water vs. No Drought
  misc_feature: MA Experiment 20001558 PARAMETER Experiment Name: At_Drought_Soil_Dry_P Parameter: Timepoint (day) Value: 13
  misc_feature: MA Experiment 20001558 PARAMETER Experiment Name: At_Drought_Soil_Dry_P Parameter: Treatment Value: Drought vs. No Drought
  misc_feature: MA Experiment ID: 20001905 Result: Up-regulated in Transcription
  misc_feature: MA Experiment 20001905 PARAMETER Experiment Name: At_Drought_Reproduction_P Parameter: Age (day) Value: 40
  misc_feature: MA Experiment 20001905 PARAMETER Experiment Name: At_Drought_Reproduction_P Parameter: Organism Value: A. thaliana
  misc_feature: MA Experiment 20001905 PARAMETER Experiment Name: At_Drought_Reproduction_P Parameter: Plant Line Value: WS
  misc_feature: MA Experiment 20001905 PARAMETER Experiment Name: At_Drought_Reproduction_P Parameter: Timepoint (day) Value: 10
  misc_feature: MA Experiment 20001905 PARAMETER Experiment Name: At_Drought_Reproduction_P Parameter: Tissue Value: Rosettes
  misc_feature: MA Experiment 20001905 PARAMETER Experiment Name: At_Drought_Reproduction_P Parameter: Treatment Value: Drought vs. No Drought
gtctctgtttcttgtttctctctctctctctctacagagttttctttccctcgaagaaaaagaatatttttaaatttaattttctctgcgtttataagctttaagtttcagaggaggaggatttagaaggagggttttgtatgtgtgtcttaaaagtggcaaatcaggaagataacgttggcaaaaaagccgagtctattagagacgatgatcatcggacgttatctgaaatcgatcaatggctttacttattcgcagccgaagacgaccaccaccgtcatagcttccctacgcagcagccgcctccatcgtcgtcgtcctcatctcttatctcaggtttcagtagagagatggagatgtctgctattgtctctgctttgactcacgttgttgctggaaatgttcctcagcatcaacaaggaggcggtgaaggtagcggagaagggacttcgaattcgtcttcttcctcggggcagaaaaggaggagagaggtggaggaaggtggcgccaaagcggttaaggcagctaatactttgacggttgatcaatatttctccggtggtagctctacttctaaagtgagagaagcttcgagtaacatgtcaggtccgggcccaacatacgagtatacaactacggcaactgctagtagcgaaacgtcgtcgtttagtggggaccaacctcggcgaagatacagaggagttagacaaagaccatggggaaagtgggcggctgagattcgagatccatttaaagcagctagagtttggctcggtacgttcgacaatgctgaatcagcagcaagagcttacgacgaagctgcacttcggtttagaggcaacaaagccaaactcaacttccctgaaaacgtcaaactcgttagacctgcttcaaccgaagcacaacctgtgcaccaaaccgctgctcaaagaccgacccagtcaaggaactcgggttcaacgactacccttttgcccataagacctgcttcgaatcaaagcgttcattcgcagccgttgatgcaatcatacaacttgagttactctgaaatggctcgtcaacaacaacagtttcagcaacatcatcaacaatctttggatttatacgatcaaatgtcgtttccgttgcgtttcggtcacactggaggttcaatgatgcaatctacgtcgtcatcatcatctcattctcgtcctctgttttccccggctgctgttcagccgccaccagaatcagctagcgaaaccggttatctccaggatatacaatggccatcagacaagactagtaataactacaataatagtccatcctcctgatgacttgcttcattttatttgtttcactatagagtaatagaaaacaggaaaatgattatatgttatagagttatttttccaaatattatagggtttaggttgtttgtattgttctgctttcatcctctcatgctttttttcttaatttattatatttttgcattataatttcgtttcattgtaacaaacattaaaaagaccacatggag

SEQ ID NO: 91297 - protein, 391 aa, Arabidopsis thaliana
  peptide (1)..(391): Ceres Seq. ID no. 12727171
  misc_feature (182)..(246): Pfam Name: AP2 domain Pfam Description: AP2 domain
  misc_feature (1)..(391): Homolog of NCBI NO: 15238232 NR Description: putative protein; protein id: At5g64750.1 thaliana] >gi|10177206|dbj|BAB10308.1| contains similarity to factor~gene_id:MVP7.8 [Arabidopsis thaliana]
  misc_feature (58)..(295): Homolog of NCBI NO: 34908616 NR Description: P0677H08.8 [Oryza sativa (japonica
  misc_feature (180)..(278): Homolog of NCBI NO: 15240610 NR Description: putative protein; protein id: At5g50080.1 thaliana] >gi|10177219|dbj|BAB10294.1| contains similarity to AP2
  misc_feature (180)..(278): Homolog of NCBI NO: 34221731 NR Description: putative AP2 domain transcription factor
  misc_feature (141)..(246): Homolog of NCBI NO: 15240379 NR Description: putative protein; protein id: At5g61890.1
  misc_feature (182)..(364): Homolog of NCBI NO: 15240754 NR Description: putative transcription factor; protein id:
  misc_feature (179)..(311): Homolog of NCBI NO: 15240604 NR Description: putative protein; protein id: At5g13330.1
  misc_feature (164)..(244): Homolog of NCBI NO: 2281637 NR Description: AP2 domain containing protein RAP2.6 [Arabidopsis
  misc_feature (164)..(244): Homolog of NCBI NO: 15218275 NR Description: AP2 domain protein RAP2.6; protein id: supported by cDNA: gi_17065541 [Arabidopsis thaliana]
  misc_feature (123)..(245): Homolog of NCBI NO: 38347164 NR Description: OSJNBa0039C07.10 [Oryza sativa (japonica
MCVLKVANQEDNVGKKAESIRDDDHRTLSEIDQWLYLFAAEDDHHRHSFPTQQPPPSSSSSSLISGFSREMEMSAIVSALTHVVAGNVPQHQQGGGEGSGEGTSNSSSSSGQKRRREVEEGGAKAVKAANTLTVDQYFSGGSSTSKVREASSNMSGPGPTYEYTTTATASSETSSFSGDQPRRRYRGVRQRPWGKWAAEIRDPFKAARVWLGTFDNAESAARAYDEAALRFRGNKAKLNFPENVKLVRPASTEAQPVHQTAAQRPTQSRNSGSTTTLLPIRPASNQSVHSQPLMQSYNLSYSEMARQQQQFQQHHQQSLDLYDQMSFPLRFGHTGGSMMQSTSSSSSHSRPLFSPAAVQPPPESASETGYLQDIQWPSDKTSNNYNNSPSS

SEQ ID NO: 91298 - protein, 321 aa, Arabidopsis thaliana
  peptide (1)..(321): Ceres Seq. ID no. 12727172
  misc_feature (112)..(176): Pfam Name: AP2 domain Pfam Description: AP2 domain
  misc_feature (1)..(321): Homolog of NCBI NO: 15238232 NR Description: putative protein; protein id: At5g64750.1 thaliana] >gi|10177206|dbj|BAB10308.1| contains similarity to factor~gene_id:MVP7.8 [Arabidopsis thaliana]
  misc_feature (1)..(225): Homolog of NCBI NO: 34908616 NR Description: P0677H08.8 [Oryza sativa (japonica
  misc_feature (110)..(208): Homolog of NCBI NO: 15240610 NR Description: putative protein; protein id: At5g50080.1 thaliana] >gi|10177219|dbj|BAB10294.1| contains similarity to AP2
  misc_feature (110)..(208): Homolog of NCBI NO: 34221731 NR Description: putative AP2 domain transcription factor
  misc_feature (71)..(176): Homolog of NCBI NO: 15240379 NR Description: putative protein; protein id: At5g61890.1
  misc_feature (112)..(294): Homolog of NCBI NO: 15240754 NR Description: putative transcription factor; protein id:
  misc_feature (109)..(241): Homolog of NCBI NO: 15240604 NR Description: putative protein; protein id: At5g13330.1
  misc_feature (94)..(174): Homolog of NCBI NO: 2281637 NR Description: AP2 domain containing protein RAP2.6 [Arabidopsis
  misc_feature (94)..(174): Homolog of NCBI NO: 15218275 NR Description: AP2 domain protein RAP2.6; protein id: supported by cDNA: gi_17065541 [Arabidopsis thaliana]
  misc_feature (53)..(175): Homolog of NCBI NO: 38347164 NR Description: OSJNBa0039C07.10 [Oryza sativa (japonica
MEMSAIVSALTHVVAGNVPQHQQGGGEGSGEGTSNSSSSSGQKRRREVEEGGAKAVKAANTLTVDQYFSGGSSTSKVREASSNMSGPGPTYEYTTTATASSETSSFSGDQPRRRYRGVRQRPWGKWAAEIRDPFKAARVWLGTFDNAESAARAYDEAALRFRGNKAKLNFPENVKLVRPASTEAQPVHQTAAQRPTQSRNSGSTTTLLPIRPASNQSVHSQPLMQSYNLSYSEMARQQQQFQQHHQQSLDLYDQMSFPLRFGHTGGSMMQSTSSSSSHSRPLFSPAAVQPPPESASETGYLQDIQWPSDKTSNNYNNSPSS

SEQ ID NO: 91299 - protein, 319 aa, Arabidopsis thaliana
  peptide (1)..(319): Ceres Seq. ID no. 12727173
  misc_feature (110)..(174): Pfam Name: AP2 domain Pfam Description: AP2 domain
  misc_feature (1)..(319): Homolog of NCBI NO: 15238232 NR Description: putative protein; protein id: At5g64750.1 thaliana] >gi|10177206|dbj|BAB10308.1| contains similarity to factor~gene_id:MVP7.8 [Arabidopsis thaliana]
  misc_feature (1)..(223): Homolog of NCBI NO: 34908616 NR Description: P0677H08.8 [Oryza sativa (japonica
  misc_feature (108)..(206): Homolog of NCBI NO: 15240610 NR Description: putative protein; protein id: At5g50080.1 thaliana] >gi|10177219|dbj|BAB10294.1| contains similarity to AP2
  misc_feature (108)..(206): Homolog of NCBI NO: 34221731 NR Description: putative AP2 domain transcription factor
  misc_feature (69)..(174): Homolog of NCBI NO: 15240379 NR Description: putative protein; protein id: At5g61890.1
  misc_feature (110)..(292): Homolog of NCBI NO: 15240754 NR Description: putative transcription factor; protein id:
  misc_feature (107)..(239): Homolog of NCBI NO: 15240604 NR Description: putative protein; protein id: At5g13330.1
  misc_feature (92)..(172): Homolog of NCBI NO: 2281637 NR Description: AP2 domain containing protein RAP2.6 [Arabidopsis
  misc_feature (92)..(172): Homolog of NCBI NO: 15218275 NR Description: AP2 domain protein RAP2.6; protein id: supported by cDNA: gi_17065541 [Arabidopsis thaliana]
  misc_feature (51)..(173): Homolog of NCBI NO: 38347164 NR Description: OSJNBa0039C07.10 [Oryza sativa (japonica
MSAIVSALTHVVAGNVPQHQQGGGEGSGEGTSNSSSSSGQKRRREVEEGGAKAVKAANTLTVDQYFSGGSSTSKVREASSNMSGPGPTYEYTTTATASSETSSFSGDQPRRRYRGVRQRPWGKWAAEIRDPFKAARVWLGTFDNAESAARAYDEAALRFRGNKAKLNFPENVKLVRPASTEAQPVHQTAAQRPTQSRNSGSTTTLLPIRPASNQSVHSQPLMQSYNLSYSEMARQQQQFQQHHQQSLDLYDQMSFPLRFGHTGGSMMQSTSSSSSHSRPLFSPAAVQPPPESASETGYLQDIQWPSDKTSNNYNNSPSS

SEQ ID NO: 91300 - DNA, 1329 bp, Arabidopsis thaliana
  misc_feature (1)..(1329): Ceres Seq. ID no. 12727174
  misc_feature: MA Experiment ID: 108434 Result: Up-regulated in Transcription
  misc_feature: MA Experiment 108434 PARAMETER Experiment Name: At_Root_Tips_cDNA_P Parameter: Tissue Value: Root Tips
  misc_feature: MA Experiment ID: 108462 Result: Down-regulated in Transcription
  misc_feature: MA Experiment 108462 PARAMETER Experiment Name: At_Germinating_Seeds_cDNA_P Parameter: Age (day) Value: 2 vs. 0
  misc_feature: MA Experiment 108462 PARAMETER Experiment Name: At_Germinating_Seeds_cDNA_P Parameter: Tissue Value: Germinating Seeds
  misc_feature: MA Experiment ID: 108463 Result: Down-regulated in Transcription
  misc_feature: MA Experiment 108463 PARAMETER Experiment Name: At_Germinating_Seeds_cDNA_P Parameter: Age (day) Value: 3 vs. 0
  misc_feature: MA Experiment 108463 PARAMETER Experiment Name: At_Germinating_Seeds_cDNA_P Parameter: Tissue Value: Germinating Seeds
  misc_feature: MA Experiment ID: 108464 Result: Down-regulated in Transcription
  misc_feature: MA Experiment 108464 PARAMETER Experiment Name: At_Germinating_Seeds_cDNA_P Parameter: Age (day) Value: 4 vs. 0
  misc_feature: MA Experiment 108464 PARAMETER Experiment Name: At_Germinating_Seeds_cDNA_P Parameter: Tissue Value: Germinating Seeds
  misc_feature: MA Experiment ID: 108585 Result: Up-regulated in Transcription
  misc_feature: MA Experiment 108585 PARAMETER Experiment Name: At_5mM_NaNP_cDNA_P Parameter: Timepoint (hr) Value: 6
  misc_feature: MA Experiment 108585 PARAMETER Experiment Name: At_5mM_NaNP_cDNA_P Parameter: Tissue Value: Aerial
  misc_feature: MA Experiment 108585 PARAMETER Experiment Name: At_5mM_NaNP_cDNA_P Parameter: Treatment Value: null
  misc_feature: MA Experiment ID: 20000224 Result: Up-regulated in Transcription
  misc_feature: MA Experiment ID: 20000315 Result: Down-regulated in Transcription
  misc_feature: MA Experiment 20000315 PARAMETER Experiment Name: At_14day_Shoots-Roots_Sub_P Parameter: Age (day) Value: 14
  misc_feature: MA Experiment 20000315 PARAMETER Experiment Name: At_14day_Shoots-Roots_Sub_P Parameter: Organism Value: A. thaliana
  misc_feature: MA Experiment 20000315 PARAMETER Experiment Name: At_14day_Shoots-Roots_Sub_P Parameter: Plant Line Value: WS
  misc_feature: MA Experiment 20000315 PARAMETER Experiment Name: At_14day_Shoots-Roots_Sub_P Parameter: Tissue Value: Shoots vs. Whole Plant
  misc_feature: MA Experiment ID: 20000440 Result: Up-regulated in Transcription
  misc_feature: MA Experiment 20000440 PARAMETER Experiment Name: At_Closed-Flower__Sub_P Parameter: Tissue Value: Closed Flower vs. Whole Plant
atggcaaaaagtagacaactcgaatcgtcgattgatcggctgctgaacgaagagaaacagatgaggctcgcagaaaatgtcgccggaactagaaaagcagctaccgagattcttaagctttgtttcgaagctaaggattggaaacttctcaacgaacagattttgaatctctcgaagaaacgtggtcagcttaagcaggctgtacaatccatggtgcaacaagcaatgcagtatattgatcagacactagacatagaaactcggattgagcttattaagactctaaacaatgtagctgctggaaagatatatgtcgaaatcgagagagctcgtttgaccaagatgcttgctaagattaaggaagaacaaggtttgattgctgaagctgcggatctcatgcaagaagttgctgtggagacatttggtgctatggcaaaaactgagaaaattgctttcattcttgaacaagtccgcttgtgtttggatcaaaaagattttgtccgtgcacaaattttatctaggaagatcaacccaagagtgtttgatgcagataccacgaaggagaaaaagaagcctaaggaaggtgaaaacatggtagaggaggctccggctgatatacctacattgttggtgctaaaacggatttactatgagctaatgattcggtattattctcacaacaatgagtacattgagatatgccgtagctacaaggcgatatatgatatcccttctgtaaaggaaaacccagaacaatggattccagtcctgagaaagatttgctggtttttggccttggcaccacatgatccaatgcaatcgagcctactcaatgcaaccttggaagataaaaagttatcagagattcctgatttcaagatgcttctaaaacagattgttacaatggaggtgattcagtggacatctctctggaataaatacaaggacgagtttgagaatgagaaaaacatgattggaggctctttgggtgacaaagctggtgaagatctcaaactaagaataatcgaacacaatattctcgttgtctcaaagtactactcaaggattacctttaagagacttgcagaacttttatgcctaaccactgaggaagcagagaagcatctatctgaaatggttgtgtccaaagccttgatagcaaaaatcgacagaccatcaggaataatctgcttccagattgttaaagacagcaacgaaatcctcaactcgtgggcaacaaacttggagaagcttttggatcttgttgaaaagagttgtcaccaaattcacaaagaaacaatggttcataaagttgcactaagagcttga

SEQ ID NO: 91301 - protein, 442 aa, Arabidopsis thaliana
  peptide (1)..(442): Ceres Seq. ID no. 12727175
  misc_feature (290)..(400): Pfam Name: PCI domain Pfam Description: PCI domain
  misc_feature (1)..(442): Homolog of NCBI NO: 10177207 NR Description: proteasome regulatory subunit-like [Arabidopsis
  misc_feature (1)..(442): Homolog of NCBI NO: 30698065 NR Description: 26S proteasome regulatory subunit (RPN5), [Arabidopsis thaliana] >gi|17063181|gb|AAL32985.1| [Arabidopsis thaliana] >gi|17063193|gb|AAL32972.1|
  misc_feature (1)..(441): Homolog of NCBI NO: 15242545 NR Description: 26S proteasome regulatory subunit (RPN5), protein id: At5g09900.1, supported by cDNA: gi_14334433
  misc_feature (4)..(442): Homolog of NCBI NO: 27573351 NR Description: putative proteasome regulatory non-ATPase subunit
  misc_feature (175)..(442): Homolog of NCBI NO: 17298157 NR Description: 26S proteasome regulatory particle non-ATPase
  misc_feature (1)..(438): Homolog of NCBI NO: 13385384 NR Description: proteasome 26S non-ATPase subunit 12 [Mus >gi|12841378|dbj|BAB25184.1| unnamed protein product [Mus >gi|12845096|dbj|BAB26619.1| unnamed protein product [Mus
  misc_feature (1)..(438): Homolog of NCBI NO: 12857304 NR Description: unnamed protein product [Mus musculus]
  misc_feature (1)..(438): Homolog of NCBI NO: 27503944 NR Description: Similar to proteasome (prosome, macropain) 26S
  misc_feature (1)..(438): Homolog of NCBI NO: 20978555 NR Description: 26S proteasome non-ATPase regulatory subunit 12 proteasome regulatory subunit p55) >gi|12841273|dbj|BAB25140.1|
  misc_feature (1)..(438): Homolog of NCBI NO: 40741155 NR Description: hypothetical protein AN4775.2 [Aspergillus
MAKSRQLESSIDRLLNEEKQMRLAENVAGTRKAATEILKLCFEAKDWKLLNEQILNLSKKRGQLKQAVQSMVQQAMQYIDQTLDIETRIELIKTLNNVAAGKIYVEIERARLTKMLAKIKEEQGLIAEAADLMQEVAVETFGAMAKTEKIAFILEQVRLCLDQKDFVRAQILSRKINPRVFDADTTKEKKKPKEGENMVEEAPADIPTLLVLKRIYYELMIRYYSHNNEYIEICRSYKAIYDIPSVKENPEQWIPVLRKICWFLALAPHDPMQSSLLNATLEDKKLSEIPDFKMLLKQIVTMEVIQWTSLWNKYKDEFENEKNMIGGSLGDKAGEDLKLRIIEHNILVVSKYYSRITFKRLAELLCLTTEEAEKHLSEMVVSKALIAKIDRPSGIICFQIVKDSNEILNSWATNLEKLLDLVEKSCHQIHKETMVHKVALRA

SEQ ID NO: 91302 - protein, 422 aa, Arabidopsis thaliana; identical to SEQ ID NO: 25306
  peptide (1)..(422): Ceres Seq. ID no. 12727176
  misc_feature (270)..(380): Pfam Name: PCI domain Pfam Description: PCI domain
  misc_feature (1)..(422): Homolog of NCBI NO: 10177207 NR Description: proteasome regulatory subunit-like [Arabidopsis
  misc_feature (1)..(422): Homolog of NCBI NO: 30698065 NR Description: 26S proteasome regulatory subunit (RPN5), [Arabidopsis thaliana] >gi|17063181|gb|AAL32985.1| [Arabidopsis thaliana] >gi|17063193|gb|AAL32972.1|
  misc_feature (1)..(421): Homolog of NCBI NO: 15242545 NR Description: 26S proteasome regulatory subunit (RPN5), protein id: At5g09900.1, supported by cDNA: gi_14334433
  misc_feature (1)..(422): Homolog of NCBI NO: 27573351 NR Description: putative proteasome regulatory non-ATPase subunit
  misc_feature (155)..(422): Homolog of NCBI NO: 17298157 NR Description: 26S proteasome regulatory particle non-ATPase
  misc_feature (1)..(418): Homolog of NCBI NO: 13385384 NR Description: proteasome 26S non-ATPase subunit 12 [Mus >gi|12841378|dbj|BAB25184.1| unnamed protein product [Mus >gi|12845096|dbj|BAB26619.1| unnamed protein product [Mus
  misc_feature (1)..(418): Homolog of NCBI NO: 12857304 NR Description: unnamed protein product [Mus musculus]
  misc_feature (1)..(418): Homolog of NCBI NO: 27503944 NR Description: Similar to proteasome (prosome, macropain) 26S
  misc_feature (1)..(418): Homolog of NCBI NO: 20978555 NR Description: 26S proteasome non-ATPase regulatory subunit 12 proteasome regulatory subunit p55) >gi|12841273|dbj|BAB25140.1|
  misc_feature (1)..(418): Homolog of NCBI NO: 40741155 NR Description: hypothetical protein AN4775.2 [Aspergillus

SEQ ID NO: 91303 - protein, 372 aa, Arabidopsis thaliana
  peptide (1)..(372): Ceres Seq. ID no. 12727177
  misc_feature (220)..(330): Pfam Name: PCI domain Pfam Description: PCI domain
  misc_feature (1)..(372): Homolog of NCBI NO: 10177207 NR Description: proteasome regulatory subunit-like [Arabidopsis
  misc_feature (1)..(372): Homolog of NCBI NO: 30698065 NR Description: 26S proteasome regulatory subunit (RPN5), [Arabidopsis thaliana] >gi|17063181|gb|AAL32985.1| [Arabidopsis thaliana] >gi|17063193|gb|AAL32972.1|
  misc_feature (1)..(371): Homolog of NCBI NO: 15242545 NR Description: 26S proteasome regulatory subunit (RPN5), protein id: At5g09900.1, supported by cDNA: gi_14334433
  misc_feature (1)..(372): Homolog of NCBI NO: 27573351 NR Description: putative proteasome regulatory non-ATPase subunit
  misc_feature (105)..(372): Homolog of NCBI NO: 17298157 NR Description: 26S proteasome regulatory particle non-ATPase
  misc_feature (1)..(368): Homolog of NCBI NO: 13385384 NR Description: proteasome 26S non-ATPase subunit 12 [Mus >gi|12841378|dbj|BAB25184.1| unnamed protein product [Mus >gi|12845096|dbj|BAB26619.1| unnamed protein product [Mus
  misc_feature (1)..(368): Homolog of NCBI NO: 12857304 NR Description: unnamed protein product [Mus musculus]
  misc_feature (1)..(368): Homolog of NCBI NO: 27503944 NR Description: Similar to proteasome (prosome, macropain) 26S
  misc_feature (1)..(368): Homolog of NCBI NO: 20978555 NR Description: 26S proteasome non-ATPase regulatory subunit 12 proteasome regulatory subunit p55) >gi|12841273|dbj|BAB25140.1|
  misc_feature (1)..(368): Homolog of NCBI NO: 40741155 NR Description: hypothetical protein AN4775.2 [Aspergillus
MVQQAMQYIDQTLDIETRIELIKTLNNVAAGKIYVEIERARLTKMLAKIKEEQGLIAEAADLMQEVAVETFGAMAKTEKIAFILEQVRLCLDQKDFVRAQILSRKINPRVFDADTTKEKKKPKEGENMVEEAPADIPTLLVLKRIYYELMIRYYSHNNEYIEICRSYKAIYDIPSVKENPEQWIPVLRKICWFLALAPHDPMQSSLLNATLEDKKLSEIPDFKMLLKQIVTMEVIQWTSLWNKYKDEFENEKNMIGGSLGDKAGEDLKLRIIEHNILVVSKYYSRITFKRLAELLCLTTEEAEKHLSEMVVSKALIAKIDRPSGIICFQIVKDSNEILNSWATNLEKLLDLVEKSCHQIHKETMVHKVALRA

SEQ ID NO: 91304 - DNA, 585 bp, Arabidopsis thaliana
  misc_feature (1)..(585): Ceres Seq. ID no. 12727180
  misc_feature: MA Experiment ID: 20000173 Result: Down-regulated in Transcription
  misc_feature: MA Experiment 20000173 PARAMETER Experiment Name: At_42deg_Heat_P Parameter: Age (day) Value: 14
  misc_feature: MA Experiment 20000173 PARAMETER Experiment Name: At_42deg_Heat_P Parameter: Organism Value: A. thaliana
  misc_feature: MA Experiment 20000173 PARAMETER Experiment Name: At_42deg_Heat_P Parameter: Plant Line Value: WS
  misc_feature: MA Experiment 20000173 PARAMETER Experiment Name: At_42deg_Heat_P Parameter: Temperature (deg C) Value: 42 vs. 22
  misc_feature: MA Experiment 20000173 PARAMETER Experiment Name: At_42deg_Heat_P Parameter: Timepoint (hr) Value: 6
  misc_feature: MA Experiment 20000173 PARAMETER Experiment Name: At_42deg_Heat_P Parameter: Tissue Value: Aerial
  misc_feature: MA Experiment ID: 20000182 Result: Up-regulated in Transcription
  misc_feature: MA Experiment 20000182 PARAMETER Experiment Name: At_2mM_SA_P Parameter: Age (day) Value: 14
  misc_feature: MA Experiment 20000182 PARAMETER Experiment Name: At_2mM_SA_P Parameter: Organism Value: A. thaliana
  misc_feature: MA Experiment 20000182 PARAMETER Experiment Name: At_2mM_SA_P Parameter: Plant Line Value: WS
  misc_feature: MA Experiment 20000182 PARAMETER Experiment Name: At_2mM_SA_P Parameter: Timepoint (hr) Value: 6
  misc_feature: MA Experiment 20000182 PARAMETER Experiment Name: At_2mM_SA_P Parameter: Tissue Value: Aerial
  misc_feature: MA Experiment 20000182 PARAMETER Experiment Name: At_2mM_SA_P Parameter: Treatment Value: 2mM SA vs. No Treatment
  misc_feature: MA Experiment ID: 20000184 Result: Down-regulated in Transcription
  misc_feature: MA Experiment 20000184 PARAMETER Experiment Name: At_Shoots__P Parameter: Age (day) Value: 7
  misc_feature: MA Experiment 20000184 PARAMETER Experiment Name: At_Shoots__P Parameter: Tissue Value: Shoots vs. Whole Plant
  misc_feature: MA Experiment ID: 20000234 Result: Down-regulated in Transcription
  misc_feature: MA Experiment 20000234 PARAMETER Experiment Name: At_Siliques_P Parameter: Age (day) Value: 21
  misc_feature: MA Experiment 20000234 PARAMETER Experiment Name: At_Siliques_P Parameter: Organism Value: A. thaliana
  misc_feature: MA Experiment 20000234 PARAMETER Experiment Name: At_Siliques_P Parameter: Plant Line Value: WS
  misc_feature: MA Experiment 20000234 PARAMETER Experiment Name: At_Siliques_P Parameter: Tissue Value: Less Than 5mm Siliques vs. Whole Plant
  misc_feature: MA Experiment ID: 20000438 Result: Down-regulated in Transcription
  misc_feature: MA Experiment 20000438 PARAMETER Experiment Name: At_Shoots__P Parameter: Age (day) Value: 14
  misc_feature: MA Experiment 20000438 PARAMETER Experiment Name: At_Shoots__P Parameter: Tissue Value: Shoots vs. Whole Plant
  misc_feature: MA Experiment ID: 20000456 Result: Up-regulated in Transcription
  misc_feature: MA Experiment 20000456 PARAMETER Experiment Name: At_100uM_BA_P Parameter: Age (day) Value: 14
  misc_feature: MA Experiment 20000456 PARAMETER Experiment Name: At_100uM_BA_P Parameter: Organism Value: A. thaliana
  misc_feature: MA Experiment 20000456 PARAMETER Experiment Name: At_100uM_BA_P Parameter: Plant Line Value: WS
  misc_feature: MA Experiment 20000456 PARAMETER Experiment Name: At_100uM_BA_P Parameter: Timepoint (hr) Value: 6
  misc_feature: MA Experiment 20000456 PARAMETER Experiment Name: At_100uM_BA_P Parameter: Tissue Value: Aerial
  misc_feature: MA Experiment 20000456 PARAMETER Experiment Name: At_100uM_BA_P Parameter: Treatment Value: 100uM BA vs. No Treatment
  misc_feature: MA Experiment ID: 20000527 Result: Down-regulated in Transcription
  misc_feature: MA Experiment 20000527 PARAMETER Experiment Name: At_10percent_PEG_P Parameter: Age (day) Value: 20
  misc_feature: MA Experiment 20000527 PARAMETER Experiment Name: At_10percent_PEG_P Parameter: Organism Value: A. thaliana
  misc_feature: MA Experiment 20000527 PARAMETER Experiment Name: At_10percent_PEG_P Parameter: Plant Line Value: WS
  misc_feature: MA Experiment 20000527 PARAMETER Experiment Name: At_10percent_PEG_P Parameter: Timepoint (day) Value: 20
  misc_feature: MA Experiment 20000527 PARAMETER Experiment Name: At_10percent_PEG_P Parameter: Tissue Value: Whole Plant
  misc_feature: MA Experiment 20000527 PARAMETER Experiment Name: At_10percent_PEG_P Parameter: Treatment Value: 10percent PEG vs. No Treatment
  misc_feature: MA Experiment ID: 20000573 Result: Up-regulated in Transcription
  misc_feature: MA Experiment 20000573 PARAMETER Experiment Name: At_100uM_ABA_Mutants__P Parameter: Organism Value: A. thaliana
  misc_feature: MA Experiment 20000573 PARAMETER Experiment Name: At_100uM_ABA_Mutants__P Parameter: Plant Line Value: CS22 vs. Ler wt
  misc_feature: MA Experiment 20000573 PARAMETER Experiment Name: At_100uM_ABA_Mutants__P Parameter: Timepoint (hr) Value: N/A
  misc_feature: MA Experiment 20000573 PARAMETER Experiment Name: At_100uM_ABA_Mutants__P Parameter: Tissue Value: Whole Plant
  misc_feature: MA Experiment 20000573 PARAMETER Experiment Name: At_100uM_ABA_Mutants__P Parameter: Treatment Value: None
  misc_feature: MA Experiment ID: 20001556 Result: Down-regulated in Transcription
  misc_feature: MA Experiment 20001556 PARAMETER Experiment Name: At_Drought_Soil_Dry_P Parameter: Age (day) Value: 26
  misc_feature: MA Experiment 20001556 PARAMETER Experiment Name: At_Drought_Soil_Dry_P Parameter: Organism Value: A. thaliana
  misc_feature: MA Experiment 20001556 PARAMETER Experiment Name: At_Drought_Soil_Dry_P Parameter: Plant Line Value: WS
  misc_feature: MA Experiment 20001556 PARAMETER Experiment Name: At_Drought_Soil_Dry_P Parameter: Post Timepoint (hr) Value: None
  misc_feature: MA Experiment 20001556 PARAMETER Experiment Name: At_Drought_Soil_Dry_P Parameter: Post-Treatment Value: None
  misc_feature: MA Experiment 20001556 PARAMETER Experiment Name: At_Drought_Soil_Dry_P Parameter: Timepoint (day) Value: 12
  misc_feature: MA Experiment 20001556 PARAMETER Experiment Name: At_Drought_Soil_Dry_P Parameter: Treatment Value: Drought vs. No Drought
  misc_feature: MA Experiment ID: 20001557 Result: Down-regulated in Transcription
  misc_feature: MA Experiment 20001557 PARAMETER Experiment Name: At_Drought_Soil_Dry_P Parameter: Age (day) Value: 27
  misc_feature: MA Experiment 20001557 PARAMETER Experiment Name: At_Drought_Soil_Dry_P Parameter: Organism Value: A. thaliana
  misc_feature: MA Experiment 20001557 PARAMETER Experiment Name: At_Drought_Soil_Dry_P Parameter: Plant Line Value: WS
  misc_feature: MA Experiment 20001557 PARAMETER Experiment Name: At_Drought_Soil_Dry_P Parameter: Post Timepoint (hr) Value: 3
  misc_feature: MA Experiment 20001557 PARAMETER Experiment Name: At_Drought_Soil_Dry_P Parameter: Post-Treatment Value: Re-Water vs. No Drought
  misc_feature: MA Experiment 20001557 PARAMETER Experiment Name: At_Drought_Soil_Dry_P Parameter: Timepoint (day) Value: 13
  misc_feature: MA Experiment 20001557 PARAMETER Experiment Name: At_Drought_Soil_Dry_P Parameter: Treatment Value: Drought vs. No Drought
  misc_feature: MA Experiment ID: 20001558 Result: Down-regulated in Transcription
  misc_feature: MA Experiment 20001558 PARAMETER Experiment Name: At_Drought_Soil_Dry_P Parameter: Age (day) Value: 27
  misc_feature: MA Experiment 20001558 PARAMETER Experiment Name: At_Drought_Soil_Dry_P Parameter: Organism Value: A. thaliana
  misc_feature: MA Experiment 20001558 PARAMETER Experiment Name: At_Drought_Soil_Dry_P Parameter: Plant Line Value: WS
  misc_feature: MA Experiment 20001558 PARAMETER Experiment Name: At_Drought_Soil_Dry_P Parameter: Post Timepoint (hr) Value: 6
  misc_feature: MA Experiment 20001558 PARAMETER Experiment Name: At_Drought_Soil_Dry_P Parameter: Post-Treatment Value: Re-Water vs. No Drought
  misc_feature: MA Experiment 20001558 PARAMETER Experiment Name: At_Drought_Soil_Dry_P Parameter: Timepoint (day) Value: 13
  misc_feature: MA Experiment 20001558 PARAMETER Experiment Name: At_Drought_Soil_Dry_P Parameter: Treatment Value: Drought vs. No Drought
  misc_feature: MA Experiment ID: 20001560 Result: Down-regulated in Transcription
  misc_feature: MA Experiment 20001560 PARAMETER Experiment Name: At_Drought_Soil_Dry_P Parameter: Age (day) Value: 28
  misc_feature: MA Experiment 20001560 PARAMETER Experiment Name: At_Drought_Soil_Dry_P Parameter: Organism Value: A. thaliana
  misc_feature: MA Experiment 20001560 PARAMETER Experiment Name: At_Drought_Soil_Dry_P Parameter: Plant Line Value: WS
  misc_feature: MA Experiment 20001560 PARAMETER Experiment Name: At_Drought_Soil_Dry_P Parameter: Post Timepoint (hr) Value: None
  misc_feature: MA Experiment 20001560 PARAMETER Experiment Name: At_Drought_Soil_Dry_P Parameter: Post-Treatment Value: None
  misc_feature: MA Experiment 20001560 PARAMETER Experiment Name: At_Drought_Soil_Dry_P Parameter: Timepoint (day) Value: 14
  misc_feature: MA Experiment 20001560 PARAMETER Experiment Name: At_Drought_Soil_Dry_P Parameter: Treatment Value: Drought vs. No Drought
  misc_feature: MA Experiment ID: 20001768 Result: Up-regulated in Transcription
  misc_feature: MA Experiment 20001768 PARAMETER Experiment Name: At_Far-red-enriched-adult_P Parameter: Age (day) Value: 28
  misc_feature: MA Experiment 20001768 PARAMETER Experiment Name: At_Far-red-enriched-adult_P Parameter: Light Value: Far-red enriched vs. White
  misc_feature: MA Experiment 20001768 PARAMETER Experiment Name: At_Far-red-enriched-adult_P Parameter: Organism Value: A. thaliana
  misc_feature: MA Experiment 20001768 PARAMETER Experiment Name: At_Far-red-enriched-adult_P Parameter: Plant Line Value: Columbia
  misc_feature: MA Experiment 20001768 PARAMETER Experiment Name: At_Far-red-enriched-adult_P Parameter: Timepoint (hr) Value: 1
  misc_feature: MA Experiment 20001768 PARAMETER Experiment Name: At_Far-red-enriched-adult_P Parameter: Tissue Value: Aerial
  misc_feature: MA Experiment ID: 20001904 Result: Down-regulated in Transcription
  misc_feature: MA Experiment 20001904 PARAMETER Experiment Name: At_Drought_Reproduction_P Parameter: Age (day) Value: 37
  misc_feature: MA Experiment 20001904 PARAMETER Experiment Name: At_Drought_Reproduction_P Parameter: Organism Value: A. thaliana
  misc_feature: MA Experiment 20001904 PARAMETER Experiment Name: At_Drought_Reproduction_P Parameter: Plant Line Value: WS
  misc_feature: MA Experiment 20001904 PARAMETER Experiment Name: At_Drought_Reproduction_P Parameter: Timepoint (day) Value: 7
  misc_feature: MA Experiment 20001904 PARAMETER Experiment Name: At_Drought_Reproduction_P Parameter: Tissue Value: Rosettes
  misc_feature: MA Experiment 20001904 PARAMETER Experiment Name: At_Drought_Reproduction_P Parameter: Treatment Value: Drought vs. No Drought
  misc_feature: MA Experiment ID: 20001905 Result: Down-regulated in Transcription
  misc_feature: MA Experiment 20001905 PARAMETER Experiment Name: At_Drought_Reproduction_P Parameter: Age (day) Value: 40
  misc_feature: MA Experiment 20001905 PARAMETER Experiment Name: At_Drought_Reproduction_P Parameter: Organism Value: A. thaliana
  misc_feature: MA Experiment 20001905 PARAMETER Experiment Name: At_Drought_Reproduction_P Parameter: Plant Line Value: WS
  misc_feature: MA Experiment 20001905 PARAMETER Experiment Name: At_Drought_Reproduction_P Parameter: Timepoint (day) Value: 10
  misc_feature: MA Experiment 20001905 PARAMETER Experiment Name: At_Drought_Reproduction_P Parameter: Tissue Value: Rosettes
  misc_feature: MA Experiment 20001905 PARAMETER Experiment Name: At_Drought_Reproduction_P Parameter: Treatment Value: Drought vs. No Drought
atgaatatctctcaaaaccctagccctaattttacgtacttctccgatgaaaactttattaatccgtttatggataacaacgatttctcaaatttgatgttctttgacatagatgaaggaggtaacaatggattaatcgaggaagagatctcatctccgacaagcatcgtttcgtcggagacatttaccggggaaagcggcggatccggcagcgcaacaacgttgagtaaaaaggaatcaactaatagaggaagtaaagagagtgatcagacgaaggagacgggtcatcgagttgcatttagaacgagatcgaagattgatgtgatggatgatggttttaaatggaggaagtatggcaagaaatctgtcaaaaacaacattaacaagaggaattactacaaatgctcaagtgaaggttgctcggtgaagaagagggtagagagagatggtgacgatgcagcttatgtaattacaacatatgaaggagtccataaccatgagagtctctctaatgtctattacaatgaaatggttttatcttatgatcatgataactggaaccaacactctcttcttcgatcttaa

SEQ ID NO: 91305 - protein, 194 aa, Arabidopsis thaliana
  peptide (1)..(194): Ceres Seq. ID no. 12727181
  misc_feature (109)..(168): Pfam Name: WRKY DNA -binding domain Pfam Description: WRKY DNA -binding domain
  misc_feature (1)..(194): Homolog of NCBI NO: 22328061 NR Description: WRKY family transcription factor; protein id: supported by cDNA: gi_16798361 [Arabidopsis thaliana]
  misc_feature (1)..(144): Homolog of NCBI NO: 8843745 NR Description: gb|AAF03448.1~gene_id:MXK3.3~similar to unknown
  misc_feature (54)..(170): Homolog of NCBI NO: 22327079 NR Description: WRKY family transcription factor; protein id: supported by cDNA: gi_18252116 [Arabidopsis thaliana]
  misc_feature (84)..(166): Homolog of NCBI NO: 34906314 NR Description: unnamed protein product [Oryza sativa (japonica group)] >gi|9558431|dbj|BAB03367.1| unnamed protein product
  misc_feature (92)..(174): Homolog of NCBI NO: 34910570 NR Description: B1131B07.13 [Oryza sativa (japonica
  misc_feature (93)..(166): Homolog of NCBI NO: 34912126 NR Description: OSJNBb0024F06.15 [Oryza sativa (japonica
  misc_feature (13)..(166): Homolog of NCBI NO: 15220582 NR Description: WRKY family transcription factor; protein id: supported by cDNA: gi_15991739 [Arabidopsis thaliana]
  misc_feature (13)..(166): Homolog of NCBI NO: 25518132 NR Description: F1N18.10 protein - Arabidopsis thaliana
  misc_feature (8)..(166): Homolog of NCBI NO: 15239913 NR Description: WRKY family transcription factor; protein id: supported by cDNA: gi_17064165, supported by cDNA: gi_17380791, by cDNA: gi_20259612 [Arabidopsis thaliana]
  misc_feature (6)..(166): Homolog of NCBI NO: 6692107 NR Description: F22C12.23 [Arabidopsis thaliana]
MNISQNPSPNFTYFSDENFINPFMDNNDFSNLMFFDIDEGGNNGLIEEEISSPTSIVSSETFTGESGGSGSATTLSKKESTNRGSKESDQTKETGHRVAFRTRSKIDVMDDGFKWRKYGKKSVKNNINKRNYYKCSSEGCSVKKRVERDGDDAAYVITTYEGVHNHESLSNVYYNEMVLSYDHDNWNQHSLLRS

SEQ ID NO: 91306 - protein, 171 aa, Arabidopsis thaliana
  peptide (1)..(171): Ceres Seq. ID no. 12727182
  misc_feature (86)..(145): Pfam Name: WRKY DNA -binding domain Pfam Description: WRKY DNA -binding domain
  misc_feature (1)..(171): Homolog of NCBI NO: 22328061 NR Description: WRKY family transcription factor; protein id: supported by cDNA: gi_16798361 [Arabidopsis thaliana]
  misc_feature (1)..(121): Homolog of NCBI NO: 8843745 NR Description: gb|AAF03448.1~gene_id:MXK3.3~similar to unknown
  misc_feature (31)..(147): Homolog of NCBI NO: 22327079 NR Description: WRKY family transcription factor; protein id: supported by cDNA: gi_18252116 [Arabidopsis thaliana]
  misc_feature (61)..(143): Homolog of NCBI NO: 34906314 NR Description: unnamed protein product [Oryza sativa (japonica group)] >gi|9558431|dbj|BAB03367.1| unnamed protein product
  misc_feature (69)..(151): Homolog of NCBI NO: 34910570 NR Description: B1131B07.13 [Oryza sativa (japonica
  misc_feature (70)..(143): Homolog of NCBI NO: 34912126 NR Description: OSJNBb0024F06.15 [Oryza sativa (japonica
  misc_feature (1)..(143): Homolog of NCBI NO: 15220582 NR Description: WRKY family transcription factor; protein id: supported by cDNA: gi_15991739 [Arabidopsis thaliana]
  misc_feature (1)..(143): Homolog of NCBI NO: 25518132 NR Description: F1N18.10 protein - Arabidopsis thaliana
  misc_feature (1)..(143): Homolog of NCBI NO: 15239913 NR Description: WRKY family transcription factor; protein id: supported by cDNA: gi_17064165, supported by cDNA: gi_17380791, by cDNA: gi_20259612 [Arabidopsis thaliana]
  misc_feature (1)..(143): Homolog of NCBI NO: 6692107 NR Description: F22C12.23 [Arabidopsis thaliana]
MDNNDFSNLMFFDIDEGGNNGLIEEEISSPTSIVSSETFTGESGGSGSATTLSKKESTNRGSKESDQTKETGHRVAFRTRSKIDVMDDGFKWRKYGKKSVKNNINKRNYYKCSSEGCSVKKRVERDGDDAAYVITTYEGVHNHESLSNVYYNEMVLSYDHDNWNQHSLLRS

SEQ ID NO: 91307 - protein, 162 aa, Arabidopsis thaliana
  peptide (1)..(162): Ceres Seq. ID no. 12727183
  misc_feature (77)..(136): Pfam Name: WRKY DNA -binding domain Pfam Description: WRKY DNA -binding domain
  misc_feature (1)..(162): Homolog of NCBI NO: 22328061 NR Description: WRKY family transcription factor; protein id: supported by cDNA: gi_16798361 [Arabidopsis thaliana]
  misc_feature (1)..(112): Homolog of NCBI NO: 8843745 NR Description: gb|AAF03448.1~gene_id:MXK3.3~similar to unknown
  misc_feature (22)..(138): Homolog of NCBI NO: 22327079 NR Description: WRKY family transcription factor; protein id: supported by cDNA: gi_18252116 [Arabidopsis thaliana]
  misc_feature (52)..(134): Homolog of NCBI NO: 34906314 NR Description: unnamed protein product [Oryza sativa (japonica group)] >gi|9558431|dbj|BAB03367.1| unnamed protein product
  misc_feature (60)..(142): Homolog of NCBI NO: 34910570 NR Description: B1131B07.13 [Oryza sativa (japonica
  misc_feature (61)..(134): Homolog of NCBI NO: 34912126 NR Description: OSJNBb0024F06.15 [Oryza sativa (japonica
  misc_feature (1)..(134): Homolog of NCBI NO: 15220582 NR Description: WRKY family transcription factor; protein id: supported by cDNA: gi_15991739 [Arabidopsis thaliana]
  misc_feature (1)..(134): Homolog of NCBI NO: 25518132 NR Description: F1N18.10 protein - Arabidopsis thaliana
  misc_feature (1)..(134): Homolog of NCBI NO: 15239913 NR Description: WRKY family transcription factor; protein id: supported by cDNA: gi_17064165, supported by cDNA: gi_17380791, by cDNA: gi_20259612 [Arabidopsis thaliana]
  misc_feature (1)..(134): Homolog of NCBI NO: 6692107 NR Description: F22C12.23 [Arabidopsis thaliana]
MFFDIDEGGNNGLIEEEISSPTSIVSSETFTGESGGSGSATTLSKKESTNRGSKESDQTKETGHRVAFRTRSKIDVMDDGFKWRKYGKKSVKNNINKRNYYKCSSEGCSVKKRVERDGDDAAYVITTYEGVHNHESLSNVYYNEMVLSYDHDNWNQHSLLRS

SEQ ID NO: 91308 - DNA, 621 bp, Arabidopsis thaliana
  misc_feature (1)..(621): Ceres Seq. ID no. 12727191
  misc_feature: MA Experiment ID: 20000179 Result: Down-regulated in Transcription
  misc_feature: MA Experiment 20000179 PARAMETER Experiment Name: At_Germinating_Seeds_P Parameter: Age (hr) Value: 6 vs. 0
  misc_feature: MA Experiment 20000179 PARAMETER Experiment Name: At_Germinating_Seeds_P Parameter: Tissue Value: Germinating Seeds
  misc_feature: MA Experiment ID: 20000180 Result: Down-regulated in Transcription
  misc_feature: MA Experiment 20000180 PARAMETER Experiment Name: At_Germinating_Seeds_P Parameter: Age (hr) Value: 24 vs. 0
  misc_feature: MA Experiment 20000180 PARAMETER Experiment Name: At_Germinating_Seeds_P Parameter: Tissue Value: Germinating Seeds
  misc_feature: MA Experiment ID: 20000234 Result: Up-regulated in Transcription
  misc_feature: MA Experiment 20000234 PARAMETER Experiment Name: At_Siliques_P Parameter: Age (day) Value: 21
  misc_feature: MA Experiment 20000234 PARAMETER Experiment Name: At_Siliques_P Parameter: Organism Value: A. thaliana
  misc_feature: MA Experiment 20000234 PARAMETER Experiment Name: At_Siliques_P Parameter: Plant Line Value: WS
  misc_feature: MA Experiment 20000234 PARAMETER Experiment Name: At_Siliques_P Parameter: Tissue Value: Less Than 5mm Siliques vs. Whole Plant
  misc_feature: MA Experiment ID: 20000235 Result: Up-regulated in Transcription
  misc_feature: MA Experiment 20000235 PARAMETER Experiment Name: At_Siliques_P Parameter: Age (day) Value: 21
  misc_feature: MA Experiment 20000235 PARAMETER Experiment Name: At_Siliques_P Parameter: Organism Value: A. thaliana
  misc_feature: MA Experiment 20000235 PARAMETER Experiment Name: At_Siliques_P Parameter: Plant Line Value: WS
  misc_feature: MA Experiment 20000235 PARAMETER Experiment Name: At_Siliques_P Parameter: Tissue Value: 5-10mm Siliques vs. Whole Plant
  misc_feature: MA Experiment ID: 20000264 Result: Up-regulated in Transcription
  misc_feature: MA Experiment 20000264 PARAMETER Experiment Name: At_Open_Flower_P Parameter: Age (day) Value: 21
  misc_feature: MA Experiment 20000264 PARAMETER Experiment Name: At_Open_Flower_P Parameter: Plant Line Value: WS
  misc_feature: MA Experiment 20000264 PARAMETER Experiment Name: At_Open_Flower_P Parameter: Tissue Value: Open Flower vs. Whole Plant
  misc_feature: MA Experiment ID: 20000265 Result: Up-regulated in Transcription
  misc_feature: MA Experiment 20000265 PARAMETER Experiment Name: At_Open_Flower_P Parameter: Age (day) Value: 21
  misc_feature: MA Experiment 20000265 PARAMETER Experiment Name: At_Open_Flower_P Parameter: Plant Line Value: WS
  misc_feature: MA Experiment 20000265 PARAMETER Experiment Name: At_Open_Flower_P Parameter: Tissue Value: Closed Flower vs. Whole Plant
  misc_feature: MA Experiment ID: 20000286 Result: Up-regulated in Transcription
  misc_feature: MA Experiment 20000286 PARAMETER Experiment Name: At_Open_Flower_P Parameter: Age (day) Value: 21
  misc_feature: MA Experiment 20000286 PARAMETER Experiment Name: At_Open_Flower_P Parameter: Plant Line Value: WS
  misc_feature: MA Experiment 20000286 PARAMETER Experiment Name: At_Open_Flower_P Parameter: Tissue Value: Half Open vs. Whole Plant
  misc_feature: MA Experiment ID: 20000794 Result: Up-regulated in Transcription
  misc_feature: MA Experiment 20000794 PARAMETER Experiment Name: At_Petals_P Parameter: Age (day) Value: 23-25 days
  misc_feature: MA Experiment 20000794 PARAMETER Experiment Name: At_Petals_P Parameter: Plant Line Value: WS
  misc_feature: MA Experiment 20000794 PARAMETER Experiment Name: At_Petals_P Parameter: Tissue Value: Petals vs. Whole plant
  misc_feature: MA Experiment ID: 20001906 Result: Up-regulated in Transcription
  misc_feature: MA Experiment 20001906 PARAMETER Experiment Name: At_Drought_Reproduction_P Parameter: Age (day) Value: 35
  misc_feature: MA Experiment 20001906 PARAMETER Experiment Name: At_Drought_Reproduction_P Parameter: Organism Value: A. thaliana
  misc_feature: MA Experiment 20001906 PARAMETER Experiment Name: At_Drought_Reproduction_P Parameter: Plant Line Value: WS
  misc_feature: MA Experiment 20001906 PARAMETER Experiment Name: At_Drought_Reproduction_P Parameter: Timepoint (day) Value: 5
  misc_feature: MA Experiment 20001906 PARAMETER Experiment Name: At_Drought_Reproduction_P Parameter: Tissue Value: Siliques
  misc_feature: MA Experiment 20001906 PARAMETER Experiment Name: At_Drought_Reproduction_P Parameter: Treatment Value: Drought vs. No Drought
  misc_feature: MA Experiment ID: 20001911 Result: Up-regulated in Transcription
  misc_feature: MA Experiment 20001911 PARAMETER Experiment Name: At_Drought_Reproduction_P Parameter: Age (day) Value: 40
  misc_feature: MA Experiment 20001911 PARAMETER Experiment Name: At_Drought_Reproduction_P Parameter: Organism Value: A. thaliana
  misc_feature: MA Experiment 20001911 PARAMETER Experiment Name: At_Drought_Reproduction_P Parameter: Plant Line Value: WS
  misc_feature: MA Experiment 20001911 PARAMETER Experiment Name: At_Drought_Reproduction_P Parameter: Timepoint (day) Value: 10
  misc_feature: MA Experiment 20001911 PARAMETER Experiment Name: At_Drought_Reproduction_P Parameter: Tissue Value: Flowers
  misc_feature: MA Experiment 20001911 PARAMETER Experiment Name: At_Drought_Reproduction_P Parameter: Treatment Value: Drought vs. No Drought
atgggagatttaggaaaagggtacaagctagtgttcttgggggatcaaggcgtagggaaaacgagcatcatcacttgtttcatgtacggtaaattcgacaccagttatcaggcaacaattggaatagactttttgtcaaaaacaacgcggtatgaagataggacttttcgtctgcaattgtgggatactgcaggacaagagagatttaaaagcctagtaccaagttatatcagagattcttctgttgctgttattgtctatgatgttgccagtaagcaatcatttataaacacctccaagtggatcgaagaagttcgtgcagaaagaggcagctatgtcattattgttcttgttggtaacaaaaccgatcttgttaataaaaggcaagtttcgatagaggaaggggagaataaagctcgtgagtttggagctttgttcatggagactagtgctaaagctggattcaacattaagcctttgttctgtaagattacatcggcgttacaaggaaacgaggcagtttcttggacgaaacaagaggatttggtggatgtgaatctaaagccactcatgttttcatctcaggcaaatcatcaacaagaaagcaattgttcttgttaa

SEQ ID NO: 91309 - protein, 206 aa, Arabidopsis thaliana
  peptide (1)..(206): Ceres Seq. ID no. 12727192
  misc_feature (9)..(170): Pfam Name: Ras family Pfam Description: Ras family
  misc_feature (1)..(206): Homolog of NCBI NO: 15238317 NR Description: GTP-binding protein, putative; protein id:
  misc_feature (8)..(206): Homolog of NCBI NO: 15238112 NR Description: Ras family GTP-binding protein, putative; protein
  misc_feature (8)..(206): Homolog of NCBI NO: 15227173 NR Description: GTP-binding protein, putative; protein id:
  misc_feature (8)..(206): Homolog of NCBI NO: 34901804 NR Description: putative ras-related protein Rab-6A [Oryza sativa
  misc_feature (8)..(206): Homolog of NCBI NO: 15224916 NR Description: GTP-binding protein, putative; protein id:
  misc_feature (8)..(206): Homolog of NCBI NO: 7438385 NR Description: GTP-binding protein Rab6 - common tobacco
  misc_feature (8)..(206): Homolog of NCBI NO: 15236081 NR Description: GTP-binding protein, putative; protein id: supported by cDNA: gi_13272476, supported by cDNA: gi_14423429
  misc_feature (2)..(206): Homolog of NCBI NO: 13195674 NR Description: RAB6, member RAS oncogene family [Mus musculus]
  misc_feature (2)..(206): Homolog of NCBI NO: 38679888 NR Description: RAB6A, member RAS oncogene family isoform b;
  misc_feature (2)..(206): Homolog of NCBI NO: 17512290 NR Description: Similar to RAB6C, member RAS oncogene family [Mus
MGDLGKGYKLVFLGDQGVGKTSIITCFMYGKFDTSYQATIGIDFLSKTTRYEDRTFRLQLWDTAGQERFKSLVPSYIRDSSVAVIVYDVASKQSFINTSKWIEEVRAERGSYVIIVLVGNKTDLVNKRQVSIEEGENKAREFGALFMETSAKAGFNIKPLFCKITSALQGNEAVSWTKQEDLVDVNLKPLMFSSQANHQQESNCSC

SEQ ID NO: 91310 - protein, 179 aa, Arabidopsis thaliana
  peptide (1)..(179): Ceres Seq. ID no. 12727193
  misc_feature (1)..(143): Pfam Name: Ras family Pfam Description: Ras family
  misc_feature (1)..(179): Homolog of NCBI NO: 15238317 NR Description: GTP-binding protein, putative; protein id:
  misc_feature (1)..(179): Homolog of NCBI NO: 15238112 NR Description: Ras family GTP-binding protein, putative; protein
  misc_feature (1)..(179): Homolog of NCBI NO: 15227173 NR Description: GTP-binding protein, putative; protein id:
  misc_feature (1)..(179): Homolog of NCBI NO: 34901804 NR Description: putative ras-related protein Rab-6A [Oryza sativa
  misc_feature (1)..(179): Homolog of NCBI NO: 15224916 NR Description: GTP-binding protein, putative; protein id:
  misc_feature (1)..(179): Homolog of NCBI NO: 7438385 NR Description: GTP-binding protein Rab6 - common tobacco
  misc_feature (1)..(179): Homolog of NCBI NO: 15236081 NR Description: GTP-binding protein, putative; protein id: supported by cDNA: gi_13272476, supported by cDNA: gi_14423429
  misc_feature (1)..(179): Homolog of NCBI NO: 13195674 NR Description: RAB6, member RAS oncogene family [Mus musculus]
  misc_feature (1)..(179): Homolog of NCBI NO: 38679888 NR Description: RAB6A, member RAS oncogene family isoform b;
  misc_feature (1)..(179): Homolog of NCBI NO: 17512290 NR Description: Similar to RAB6C, member RAS oncogene family [Mus
MYGKFDTSYQATIGIDFLSKTTRYEDRTFRLQLWDTAGQERFKSLVPSYIRDSSVAVIVYDVASKQSFINTSKWIEEVRAERGSYVIIVLVGNKTDLVNKRQVSIEEGENKAREFGALFMETSAKAGFNIKPLFCKITSALQGNEAVSWTKQEDLVDVNLKPLMFSSQANHQQESNCSC

SEQ ID NO: 91311 - DNA, 1146 bp, Arabidopsis thaliana
  misc_feature (1)..(1146): Ceres Seq. ID no. 12727205
  misc_feature: MA Experiment ID: 108561 Result: Up-regulated in Transcription
  misc_feature: MA Experiment 108561 PARAMETER Experiment Name: At_100uM_ABA_cDNA_P Parameter: Timepoint (hr) Value: 6
  misc_feature: MA Experiment 108561 PARAMETER Experiment Name: At_100uM_ABA_cDNA_P Parameter: Tissue Value: Aerial
  misc_feature: MA Experiment 108561 PARAMETER Experiment Name: At_100uM_ABA_cDNA_P Parameter: Treatment Value: 100uM ABA vs. No Treatment
  misc_feature: MA Experiment ID: 108573 Result: Up-regulated in Transcription
  misc_feature: MA Experiment 108573 PARAMETER Experiment Name: At_Drought_cDNA_P Parameter: Timepoint (hr) Value: 6
  misc_feature: MA Experiment 108573 PARAMETER Experiment Name: At_Drought_cDNA_P Parameter: Tissue Value: Aerial
  misc_feature: MA Experiment 108573 PARAMETER Experiment Name: At_Drought_cDNA_P Parameter: Treatment Value: Drought vs. No Drought
  misc_feature: MA Experiment ID: 108574 Result: Up-regulated in Transcription
  misc_feature: MA Experiment 108574 PARAMETER Experiment Name: At_Wounding__cDNA_P Parameter: Timepoint (hr) Value: 1
  misc_feature: MA Experiment 108574 PARAMETER Experiment Name: At_Wounding__cDNA_P Parameter: Tissue Value: Aerial
  misc_feature: MA Experiment 108574 PARAMETER Experiment Name: At_Wounding__cDNA_P Parameter: Treatment Value: Wounding vs. No Wounding
  misc_feature: MA Experiment ID: 108579 Result: Up-regulated in Transcription
  misc_feature: MA Experiment 108579 PARAMETER Experiment Name: At_4deg_Cold_cDNA_P Parameter: Temperature (deg C) Value: 4 vs. 22
  misc_feature: MA Experiment 108579 PARAMETER Experiment Name: At_4deg_Cold_cDNA_P Parameter: Timepoint (hr) Value: 6
  misc_feature: MA Experiment 108579 PARAMETER Experiment Name: At_4deg_Cold_cDNA_P Parameter: Tissue Value: Aerial
  misc_feature: MA Experiment ID: 108585 Result: Up-regulated in Transcription
  misc_feature: MA Experiment 108585 PARAMETER Experiment Name: At_5mM_NaNP_cDNA_P Parameter: Timepoint (hr) Value: 6
  misc_feature: MA Experiment 108585 PARAMETER Experiment Name: At_5mM_NaNP_cDNA_P Parameter: Tissue Value: Aerial
  misc_feature: MA Experiment 108585 PARAMETER Experiment Name: At_5mM_NaNP_cDNA_P Parameter: Treatment Value: null
atggtgagccaaaacgtcgtcgtatcagacgccaagaccgggatcataacggtctctacagtctctaactcctctgtctttactcctaccgctcaaaaaccaccgactgctcctggttacatctcagtttccaagaaaaaactcctcaaaaaccttgaaatcaatggagctgatcaaagtcaaagacttaactcttgggttgactccatgagagcttcttctcctacccatctcaaatcactttcctctttctcttccgaagaagaacacaattcttggatcaaacgacatccatcagcacttaacatgttcgaacgaatcatcgaagaagcaagaggaaaacaaatcgtcatgtttcttgattatgacggtactctttctccgatcgtggatgatccagacagagctttcatgactagcaagatgagaagaacagtgaaaaaaatggctaagtgttttccaacttccatagttactggtagatgcatcgacaaggtttatagctttgtgaagctagcagaactgtattatgctggaagccatgggatggatattaaaggcccaactaaaggtttctcaagatacaataaggataaaccatccgttctttaccaaccagccggcgactttcttcccatgatcgatgaggtttataaacaattagtggagaaaaccaaatctacaccaggagccaaagtggagaacaacaagttctgtctttctgtgcacttccgttgtgttgacgagaagaaatggagcgagctggcttcaaaagttcggtcggtggtaaagaactatccgacgttgaaactgtctcaaggtcgaaaggtttttgaaatccgacctataattaaatggaacaaaggcaaggctcttgagtttttgttagagtcactcggatttgaaaactgtaacgatgtatttccaatttacattggtgatgataaaaccgatgaagatgcatttaagctactacgagggagaggacaaggctttggtattcttgtctccaagttccccaaagacaccagtgcgtcgtattctttacaagacccacctgaggcaagtacttatacaaatagatatatcaatttacgcatatataaaccgtatatgtttatgtacgtattagttacgcaattataa

SEQ ID NO: 91312 - protein, 381 aa, Arabidopsis thaliana
  peptide (1)..(381): Ceres Seq. ID no. 12727206
  misc_feature (119)..(353): Pfam Name: Trehalose-phosphatase Pfam Description: Trehalose-phosphatase
  misc_feature (1)..(381): Homolog of NCBI NO: 15238360 NR Description: trehalose-6-phosphate phosphatase; protein id:
  misc_feature (3)..(372): Homolog of NCBI NO: 30683008 NR Description: trehalose-6-phosphate phosphatase, putative
  misc_feature (3)..(356): Homolog of NCBI NO: 11282598 NR Description: trehalose-6-phosphate phosphatase-like protein -
  misc_feature (41)..(363): Homolog of NCBI NO: 30692524 NR Description: trehalose-6-phosphate phosphatase, putative thaliana] >gi|26452744|dbj|BAC43453.1| putative protein thaliana] >gi|28973301|gb|AAO63975.1| unknown protein
  misc_feature (1)..(363): Homolog of NCBI NO: 18399940 NR Description: trehalose-phosphatase, putative; protein id:
  misc_feature (1)..(363): Homolog of NCBI NO: 21554408 NR Description: trehalose-phosphatase, putative [Arabidopsis
  misc_feature (1)..(363): Homolog of NCBI NO: 25354597 NR Description: probable trehalose-phosphatase [imported] -
  misc_feature (1)..(363): Homolog of NCBI NO: 15218205 NR Description: trehalose-6-phosphate phosphatase (AtTPPB); id: At1g78090.1, supported by cDNA: gi_2944179 [Arabidopsis
  misc_feature (1)..(363): Homolog of NCBI NO: 25354595 NR Description: trehalose-phosphatase (EC 3.1.3.12) B [imported] -
  misc_feature (103)..(363): Homolog of NCBI NO: 15227161 NR Description: putative trehalose-6-phosphate phosphatase;
MVSQNVVVSDAKTGIITVSTVSNSSVFTPTAQKPPTAPGYISVSKKKLLKNLEINGADQSQRLNSWVDSMRASSPTHLKSLSSFSSEEEHNSWIKRHPSALNMFERIIEEARGKQIVMFLDYDGTLSPIVDDPDRAFMTSKMRRTVKKMAKCFPTSIVTGRCIDKVYSFVKLAELYYAGSHGMDIKGPTKGFSRYNKDKPSVLYQPAGDFLPMIDEVYKQLVEKTKSTPGAKVENNKFCLSVHFRCVDEKKWSELASKVRSVVKNYPTLKLSQGRKVFEIRPIIKWNKGKALEFLLESLGFENCNDVFPIYIGDDKTDEDAFKLLRGRGQGFGILVSKFPKDTSASYSLQDPPEASTYTNRYINLRIYKPYMFMYVLVTQL

SEQ ID NO: 91313 - protein, 312 aa, Arabidopsis thaliana
  peptide (1)..(312): Ceres Seq. ID no. 12727207
  misc_feature (50)..(284): Pfam Name: Trehalose-phosphatase Pfam Description: Trehalose-phosphatase
  misc_feature (1)..(312): Homolog of NCBI NO: 15238360 NR Description: trehalose-6-phosphate phosphatase; protein id:
  misc_feature (1)..(303): Homolog of NCBI NO: 30683008 NR Description: trehalose-6-phosphate phosphatase, putative
  misc_feature (1)..(287): Homolog of NCBI NO: 11282598 NR Description: trehalose-6-phosphate phosphatase-like protein -
  misc_feature (1)..(294): Homolog of NCBI NO: 30692524 NR Description: trehalose-6-phosphate phosphatase, putative thaliana] >gi|26452744|dbj|BAC43453.1| putative protein thaliana] >gi|28973301|gb|AAO63975.1| unknown protein
  misc_feature (1)..(294): Homolog of NCBI NO: 18399940 NR Description: trehalose-phosphatase, putative; protein id:
  misc_feature (1)..(294): Homolog of NCBI NO: 21554408 NR Description: trehalose-phosphatase, putative [Arabidopsis
  misc_feature (1)..(294): Homolog of NCBI NO: 25354597 NR Description: probable trehalose-phosphatase [imported] -
  misc_feature (1)..(294): Homolog of NCBI NO: 15218205 NR Description: trehalose-6-phosphate phosphatase (AtTPPB); id: At1g78090.1, supported by cDNA: gi_2944179 [Arabidopsis
  misc_feature (1)..(294): Homolog of NCBI NO: 25354595 NR Description: trehalose-phosphatase (EC 3.1.3.12) B [imported] -
  misc_feature (34)..(294): Homolog of NCBI NO: 15227161 NR Description: putative trehalose-6-phosphate phosphatase;
MRASSPTHLKSLSSFSSEEEHNSWIKRHPSALNMFERIIEEARGKQIVMFLDYDGTLSPIVDDPDRAFMTSKMRRTVKKMAKCFPTSIVTGRCIDKVYSFVKLAELYYAGSHGMDIKGPTKGFSRYNKDKPSVLYQPAGDFLPMIDEVYKQLVEKTKSTPGAKVENNKFCLSVHFRCVDEKKWSELASKVRSVVKNYPTLKLSQGRKVFEIRPIIKWNKGKALEFLLESLGFENCNDVFPIYIGDDKTDEDAFKLLRGRGQGFGILVSKFPKDTSASYSLQDPPEASTYTNRYINLRIYKPYMFMYVLVTQL

SEQ ID NO: 91314 - protein, 279 aa, Arabidopsis thaliana
  peptide (1)..(279): Ceres Seq. ID no. 12727208
  misc_feature (17)..(251): Pfam Name: Trehalose-phosphatase Pfam Description: Trehalose-phosphatase
  misc_feature (1)..(279): Homolog of NCBI NO: 15238360 NR Description: trehalose-6-phosphate phosphatase; protein id:
  misc_feature (1)..(270): Homolog of NCBI NO: 30683008 NR Description: trehalose-6-phosphate phosphatase, putative
  misc_feature (1)..(254): Homolog of NCBI NO: 11282598 NR Description: trehalose-6-phosphate phosphatase-like protein -
  misc_feature (1)..(261): Homolog of NCBI NO: 30692524 NR Description: trehalose-6-phosphate phosphatase, putative thaliana] >gi|26452744|dbj|BAC43453.1| putative protein thaliana] >gi|28973301|gb|AAO63975.1| unknown protein
  misc_feature (1)..(261): Homolog of NCBI NO: 18399940 NR Description: trehalose-phosphatase, putative; protein id:
  misc_feature (1)..(261): Homolog of NCBI NO: 21554408 NR Description: trehalose-phosphatase, putative [Arabidopsis
  misc_feature (1)..(261): Homolog of NCBI NO: 25354597 NR Description: probable trehalose-phosphatase [imported] -
  misc_feature (1)..(261): Homolog of NCBI NO: 15218205 NR Description: trehalose-6-phosphate phosphatase (AtTPPB); id: At1g78090.1, supported by cDNA: gi_2944179 [Arabidopsis
  misc_feature (1)..(261): Homolog of NCBI NO: 25354595 NR Description: trehalose-phosphatase (EC 3.1.3.12) B [imported] -
  misc_feature (1)..(261): Homolog of NCBI NO: 15227161 NR Description: putative trehalose-6-phosphate phosphatase;
MFERIIEEARGKQIVMFLDYDGTLSPIVDDPDRAFMTSKMRRTVKKMAKCFPTSIVTGRCIDKVYSFVKLAELYYAGSHGMDIKGPTKGFSRYNKDKPSVLYQPAGDFLPMIDEVYKQLVEKTKSTPGAKVENNKFCLSVHFRCVDEKKWSELASKVRSVVKNYPTLKLSQGRKVFEIRPIIKWNKGKALEFLLESLGFENCNDVFPIYIGDDKTDEDAFKLLRGRGQGFGILVSKFPKDTSASYSLQDPPEASTYTNRYINLRIYKPYMFMYVLVTQL

SEQ ID NO: 91315 - DNA, 1089 bp, Arabidopsis thaliana
  misc_feature (1)..(1089): Ceres Seq. ID no. 12727221
  misc_feature: MA Experiment ID: 20000185 Result: Up-regulated in Transcription
  misc_feature: MA Experiment 20000185 PARAMETER Experiment Name: At_Roots__P Parameter: Age (day) Value: 7 vs. 21
  misc_feature: MA Experiment 20000185 PARAMETER Experiment Name: At_Roots__P Parameter: Organism Value: A. thaliana
  misc_feature: MA Experiment 20000185 PARAMETER Experiment Name: At_Roots__P Parameter: Tissue Value: Roots vs. Whole Plant
  misc_feature: MA Experiment ID: 20000439 Result: Up-regulated in Transcription
  misc_feature: MA Experiment 20000439 PARAMETER Experiment Name: At_Roots__P Parameter: Age (day) Value: 14 vs. 21
  misc_feature: MA Experiment 20000439 PARAMETER Experiment Name: At_Roots__P Parameter: Organism Value: A. thaliana
  misc_feature: MA Experiment 20000439 PARAMETER Experiment Name: At_Roots__P Parameter: Tissue Value: Roots vs. Whole Plant
atggaatccggcaatagtagtagcatgcaatcctcaagcggcggtggtggtggaggagatcaagaagagtacgactcacgcgccgatcaatcaatttctgctttatttaaccacaacaacaacaacaacaacccaaccaccgtctcccccaacatcgctgttccaacacagcttgacgctctcatagctaactacttcaacacttcttggtcagcggataatcctctatggtctacaacggctacgcagcccaccgatggctctagaccagtaccaccgccgatttcgtcagaacaagtcttcttcacaaacccacttcaacaaaatctgagaacagttcctaacacaaacacaactagtcccatttgttccgtcccaaccgacaagaaaaacggtcttgcgacaacacggaatccaaagaagagatctcgagtctcgagacgagcgcctacgactgttttgaccaccgacacatccaacttcagagccatggttcaagaattcacgggtaatccttcaactcctttcaccggattatcttcatcttttccaagatcacgatttgatctcttcggttcttcttcttcttcatcctcacgacccatgaaaccctttcctcacaaactcatctctccatcgacgttgaatcatcattaccttcctccttcttcagagtaccatcatcatcatcagcatcagaatcttctccttaatatgaacacgccaaatatctcaaacccttttctcaacaactctttaacggatcaaccgaaaccctcgagcttgagaacgagtaatggttttggacacgtggacgttggaacaaactttgaggggcttcacaacattatcgtctcttcttcatcgtcgatgacacagccaaccctaaatactatccatggaccagaaaagagtactgaagccgaaaatgataataatatgctaagatccatcaatggtaatgatcaacccatggtccaaagatccgatggttacacacaacctggtgcttctggatccgagaataatctatcggccgtgagaagtgaaggtatggtggaattatcttggatctcttcttctgattag

SEQ ID NO: 91316 - protein, 362 aa, Arabidopsis thaliana
  peptide (1)..(362): Ceres Seq. ID no. 12727222
  misc_feature (147)..(177): Pfam Name: VQ motif Pfam Description: VQ motif
  misc_feature (1)..(362): Homolog of NCBI NO: 15238363 NR Description: putative protein; protein id: At5g65170.1 thaliana] >gi|10178179|dbj|BAB11653.1|
  misc_feature (134)..(226): Homolog of NCBI NO: 15220238 NR Description: hypothetical protein; protein id: At1g35830.1
  misc_feature (91)..(276): Homolog of NCBI NO: 15235990 NR Description: putative protein; protein id: At4g39720.1
  misc_feature (96)..(266): Homolog of NCBI NO: 18403283 NR Description: expressed protein; protein id: At3g22160.1, by cDNA: 8081. [Arabidopsis thaliana] emb|CAB10291.1~gene_id:MKA23.7~similar to unknown protein
  misc_feature (97)..(201): Homolog of NCBI NO: 21593100 NR Description: unknown [Arabidopsis thaliana]
  misc_feature (97)..(201): Homolog of NCBI NO: 18414384 NR Description: expressed protein; protein id: At4g15120.1, by cDNA: 36129. [Arabidopsis thaliana] >gi|7485016|pir||A71415
  misc_feature (134)..(192): Homolog of NCBI NO: 22535682 NR Description: hypothetical protein~predicted by GeneMark.hmm
MESGNSSSMQSSSGGGGGGDQEEYDSRADQSISALFNHNNNNNNPTTVSPNIAVPTQLDALIANYFNTSWSADNPLWSTTATQPTDGSRPVPPPISSEQVFFTNPLQQNLRTVPNTNTTSPICSVPTDKKNGLATTRNPKKRSRVSRRAPTTVLTTDTSNFRAMVQEFTGNPSTPFTGLSSSFPRSRFDLFGSSSSSSSRPMKPFPHKLISPSTLNHHYLPPSSEYHHHHQHQNLLLNMNTPNISNPFLNNSLTDQPKPSSLRTSNGFGHVDVGTNFEGLHNIIVSSSSSMTQPTLNTIHGPEKSTEAENDNNMLRSINGNDQPMVQRSDGYTQPGASGSENNLSAVRSEGMVELSWISSSD

SEQ ID NO: 91317 - protein, 354 aa, Arabidopsis thaliana
  peptide (1)..(354): Ceres Seq. ID no. 12727223
  misc_feature (139)..(169): Pfam Name: VQ motif Pfam Description: VQ motif
  misc_feature (1)..(354): Homolog of NCBI NO: 15238363 NR Description: putative protein; protein id: At5g65170.1 thaliana] >gi|10178179|dbj|BAB11653.1|
  misc_feature (126)..(218): Homolog of NCBI NO: 15220238 NR Description: hypothetical protein; protein id: At1g35830.1
  misc_feature (83)..(268): Homolog of NCBI NO: 15235990 NR Description: putative protein; protein id: At4g39720.1
  misc_feature (88)..(258): Homolog of NCBI NO: 18403283 NR Description: expressed protein; protein id: At3g22160.1, by cDNA: 8081. [Arabidopsis thaliana] emb|CAB10291.1~gene_id:MKA23.7~similar to unknown protein
  misc_feature (89)..(193): Homolog of NCBI NO: 21593100 NR Description: unknown [Arabidopsis thaliana]
  misc_feature (89)..(193): Homolog of NCBI NO: 18414384 NR Description: expressed protein; protein id: At4g15120.1, by cDNA: 36129. [Arabidopsis thaliana] >gi|7485016|pir||A71415
  misc_feature (126)..(184): Homolog of NCBI NO: 22535682 NR Description: hypothetical protein~predicted by GeneMark.hmm
MQSSSGGGGGGDQEEYDSRADQSISALFNHNNNNNNPTTVSPNIAVPTQLDALIANYFNTSWSADNPLWSTTATQPTDGSRPVPPPISSEQVFFTNPLQQNLRTVPNTNTTSPICSVPTDKKNGLATTRNPKKRSRVSRRAPTTVLTTDTSNFRAMVQEFTGNPSTPFTGLSSSFPRSRFDLFGSSSSSSSRPMKPFPHKLISPSTLNHHYLPPSSEYHHHHQHQNLLLNMNTPNISNPFLNNSLTDQPKPSSLRTSNGFGHVDVGTNFEGLHNIIVSSSSSMTQPTLNTIHGPEKSTEAENDNNMLRSINGNDQPMVQRSDGYTQPGASGSENNLSAVRSEGMVELSWISSSD

SEQ ID NO: 91318 - protein, 199 aa, Arabidopsis thaliana
  peptide (1)..(199): Ceres Seq. ID no. 12727224
  misc_feature (1)..(199): Homolog of NCBI NO: 15238363 NR Description: putative protein; protein id: At5g65170.1 thaliana] >gi|10178179|dbj|BAB11653.1|
  misc_feature (1)..(63): Homolog of NCBI NO: 15220238 NR Description: hypothetical protein; protein id: At1g35830.1
  misc_feature (1)..(113): Homolog of NCBI NO: 15235990 NR Description: putative protein; protein id: At4g39720.1
  misc_feature (1)..(103): Homolog of NCBI NO: 18403283 NR Description: expressed protein; protein id: At3g22160.1, by cDNA: 8081. [Arabidopsis thaliana] emb|CAB10291.1~gene_id:MKA23.7~similar to unknown protein
  misc_feature (1)..(38): Homolog of NCBI NO: 21593100 NR Description: unknown [Arabidopsis thaliana]
  misc_feature (1)..(38): Homolog of NCBI NO: 18414384 NR Description: expressed protein; protein id: At4g15120.1, by cDNA: 36129. [Arabidopsis thaliana] >gi|7485016|pir||A71415
  misc_feature (1)..(29): Homolog of NCBI NO: 22535682 NR Description: hypothetical protein~predicted by GeneMark.hmm
MVQEFTGNPSTPFTGLSSSFPRSRFDLFGSSSSSSSRPMKPFPHKLISPSTLNHHYLPPSSEYHHHHQHQNLLLNMNTPNISNPFLNNSLTDQPKPSSLRTSNGFGHVDVGTNFEGLHNIIVSSSSSMTQPTLNTIHGPEKSTEAENDNNMLRSINGNDQPMVQRSDGYTQPGASGSENNLSAVRSEGMVELSWISSSD

SEQ ID NO: 91319 - DNA, 411 bp, Arabidopsis thaliana
  misc_feature (1)..(411): Ceres Seq. ID no. 12727235
  misc_feature: MA Experiment ID: 20000328 Result: Down-regulated in Transcription
  misc_feature: MA Experiment 20000328 PARAMETER Experiment Name: At_42deg_Heat_Sub_P Parameter: Age (day) Value: 14
  misc_feature: MA Experiment 20000328 PARAMETER Experiment Name: At_42deg_Heat_Sub_P Parameter: Organism Value: A. thaliana
  misc_feature: MA Experiment 20000328 PARAMETER Experiment Name: At_42deg_Heat_Sub_P Parameter: Plant Line Value: WS
  misc_feature: MA Experiment 20000328 PARAMETER Experiment Name: At_42deg_Heat_Sub_P Parameter: Temperature (deg C) Value: 42 vs. 22
  misc_feature: MA Experiment 20000328 PARAMETER Experiment Name: At_42deg_Heat_Sub_P Parameter: Timepoint (hr) Value: 6
  misc_feature: MA Experiment 20000328 PARAMETER Experiment Name: At_42deg_Heat_Sub_P Parameter: Tissue Value: Aerial
atggctcgtaccaagcaaaccgcaaggaaatccaccggaggaaaagccccaaggaaacaactcgcaacaaaggcggcgaggaaatcagctccggcgaccggaggagtaaagaagccacacagattccgtcctggaactgttgccctaagagaaatcaggaagtatcagaagagcactgagcttctgatccgcaagcttccgttccagcgtttggttcgtgagatcgctcaggatttcaaaacagatctgcgtttccagagcagcgccgtcgcagcacttcaggaagcggctgaagcatacctcgttggattgtttgaagacaccaatctttgcgcgattcatgctaagagagtcactatcatgcctaaggatattcaattggcgaggagaattagaggcgagagggcttaa

SEQ ID NO: 91320 - protein, 136 aa, Arabidopsis thaliana; identical to SEQ ID NO: 8709
  peptide (1)..(136): Ceres Seq. ID no. 12727236
  misc_feature (17)..(135): Pfam Name: Core histone H2A/H2B/H3/H4 Pfam Description: Core histone H2A/H2B/H3/H4
  misc_feature (1)..(136): Homolog of NCBI NO: 15232146 NR Description: histone H3, putative; protein id: At3g27360.1, by cDNA: gi_14335141, supported by cDNA: gi_18655352 [Arabidopsis >gi|15238433|ref|NP_201339.1| histone H3 (sp|P05203); id:
  misc_feature (1)..(136): Homolog of NCBI NO: 122087 NR Description: Histone H3 >gi|81849|pir||S04520 histone H3
  misc_feature (1)..(136): Homolog of NCBI NO: 1362108 NR Description: histone H3 homolog - common tobacco
  misc_feature (1)..(136): Homolog of NCBI NO: 166384 NR Description: histone H3 (H3-1.1)
  misc_feature (2)..(136): Homolog of NCBI NO: 70753 NR Description: histone H3 - garden pea (tentative sequence)
  misc_feature (2)..(136): Homolog of NCBI NO: 122083 NR Description: Histone H3 >gi|70751|pir||HSEAH3 histone H3 -
  misc_feature (1)..(136): Homolog of NCBI NO: 122070 NR Description: Histone H3 >gi|82483|pir||A25564 histone H3 - >gi|169793|gb|AAA33907.1| histone 3 >gi|940018|gb|AAA74190.1|
  misc_feature (1)..(136): Homolog of NCBI NO: 7305139 NR Description: histone 1, H3f; histone gene complex 1 [Mus
  misc_feature (1)..(136): Homolog of NCBI NO: 30061401 NR Description: histone 2, H3ca1 [Mus musculus]
  misc_feature (1)..(136): Homolog of NCBI NO: 37546835 NR Description: similar to histone protein Hist2h3c1 [Homo

SEQ ID NO: 91321 - DNA, 3846 bp, Arabidopsis thaliana
  misc_feature (1)..(3846): Ceres Seq. ID no. 12727244
  misc_feature: MA Experiment ID: 20000173 Result: Down-regulated in Transcription
  misc_feature: MA Experiment 20000173 PARAMETER Experiment Name: At_42deg_Heat_P Parameter: Age (day) Value: 14
  misc_feature: MA Experiment 20000173 PARAMETER Experiment Name: At_42deg_Heat_P Parameter: Organism Value: A. thaliana
  misc_feature: MA Experiment 20000173 PARAMETER Experiment Name: At_42deg_Heat_P Parameter: Plant Line Value: WS
  misc_feature: MA Experiment 20000173 PARAMETER Experiment Name: At_42deg_Heat_P Parameter: Temperature (deg C) Value: 42 vs. 22
  misc_feature: MA Experiment 20000173 PARAMETER Experiment Name: At_42deg_Heat_P Parameter: Timepoint (hr) Value: 6
  misc_feature: MA Experiment 20000173 PARAMETER Experiment Name: At_42deg_Heat_P Parameter: Tissue Value: Aerial
  misc_feature: MA Experiment ID: 20000794 Result: Up-regulated in Transcription
  misc_feature: MA Experiment 20000794 PARAMETER Experiment Name: At_Petals_P Parameter: Age (day) Value: 23-25 days
  misc_feature: MA Experiment 20000794 PARAMETER Experiment Name: At_Petals_P Parameter: Plant Line Value: WS
  misc_feature: MA Experiment 20000794 PARAMETER Experiment Name: At_Petals_P Parameter: Tissue Value: Petals vs. Whole plant
atggcggagcagaagagtaccaatatgtggaactgggaggtgactgggttcgaatcgaagaagtcgccttctagtgaggaaggcgttcatcggacaccgtcttctatgcttcgacggtactcgatcccgaagaactcgcttccaccgcactcgtcggagcttgcgtctaaggttcagagtttgaaggataaagttcagcttgcaaaggacgattatgtgggattgagacaggaagctactgatcttcaagagtactccaatgcgaagcttgaaagggttacacgttatttaggtgttctggctgataaaagtcgtaaactggatcaatatgcacttgagactgaggctaggatatctccacttatcaatgagaagaagagactgttcaatgacttactgacgaccaaagggaatgtaaaggtattttgtcgagcaagacccttatttgaagacgagggtccctctatcattgaatttcctgataactgcactatacgcgtaaacactagtgatgatactctgtccaatcccaagaaggaatttgaatttgatagagtttatgggcctcaagttggacaagcttcactgttcagtgatgtccaaccttttgtgcaatccgctctggatggatcgaacgtttctatatttgcgtatggccaaactcacgcggggaagacatacaccatggttgcccctcctttccctttcctctctgaaattagatataggtcttgtttggaaggatctaatcaggaccgtggtttatatgctcgttgttttgaggaacttatggacttggccaattctgattcaacttccgcatctcagttcagtttctctgtttcagtgtttgagctttataacgaacaggtcagggatttactctcgggttgtcagagcaatttgccaaagatcaatatgggtttacgcgaatcggttatagaactttcacaggaaaaagttgataatccatcagagttcatgagagtcctgaactctgcatttcagaatagagggaatgataaatcaaagtctactgtgacccatctgattgtctcgatacacatttgttatagcaacacaattacgagagaaaatgtaattagcaagctttctttagttgacctggctggaagtgaaggtttaactgtggaggatgacaatggagatcatgtaactgatctgctccatgtaacaaattcaatttccgcgctgggagatgttttatcatctttgacgtcaaaaagagataccattccttacgagaactcatttcttacaagaatacttgcagattcactaggagggagctccaaaacattgatgatcgtcaacatttgtccaagtgcacggaacttgtctgaaataatgtcgtgtctcaactatgctgctagagctcgaaatactgtaccaagccttgggaatcgagacacaattaagaaatggagagacgtggcaaatgatgctcggaaggaggtattggagaaagagagggaaaatcagcgtctaaaacaagaggttacgggtttaaaacaagcacttaaagaagcaaatgaccaatgtgtactgctctataatgaagtacagagagcgtggagagtttcattcacactgcaatcagatttaaagtcagagaatgcgatggttgtagacaaacataaaatagaaaaggagcagaattttcagttaagaaatcaaatagctcaacttttacagttagaacaggaacaaaagctgcaggcgcaacaacaagattccaccattcaaaatctccagtctaaagtgaaagacttagaatcacaactaagtaaagctctgaagtctgacatgacaagatcgagagatcccttggaacctcagcccagagcagctgagaacacactcgattcttctgcagttaccaagaaacttgaggaagaattgaaaaaacgtgatgcactgattgagaggttgcatgaagaaaatgaaaaattgttcgacagattaacagaaaagtcagtggctagctcgactcaggtatctagcccctcatcaaaagcttcaccaacagtgcagcctgcagatgttgacagcgcgggcactttaccgtcttcagtggataaaaatgagggcacgattacattagtaaaatccagctctgaattagtaaaaaccactccagctggagaatacttaacagctgcattgaatgattttgatcccgaacaatatgaaggtcttgcagccatagctgatggcgcaaacaagcttctgatgctggtcttagcagctgtcataaaggctggtgcttccagagagcatgaaatccttgctgagatcagagattctgtcttttcatttatccggaaaatggaaccaaggagagtaatggatacaatgcttgtttctcgagtcaggatattgtacataaggtccttacttgcacgatcacctgagcttcagtcgatcaaggtttctcctgttgaacgctttttggagaagccatatactggtcgaactagaagctccagcgggagtagcagcccaggtagatcaccagttcgatattatgatgagcagatttatggctttaaagttaatttaaagccagaaaagaaaagtaagttggtatctgtagtttcaagaatccgtggacatgaccaggatactgggaggcagcaagtgactggaggaaagctgagggagatacaagatgaagccaaaagttttgccattggaaacaaacccttagctgctttatttgttcacactccggctggtgaactgcaaagacagattaggtcatggcttgcagaaagttttgagtttctctctgttacagcagatgatgtttcaggagtaaccactggccaattagagcttctttccacagcaattatggatggctggatggctggagtaggagctgcggtgccacctcacacagacgctttaggacagcttttgtctgagtatgcaaaacgagtctacacttctcagatgcagcatctaaaggatattgccggtactttggcttcggaagaggcagaagatgctggtcaagtcgcgaagcttcgatcagctctcgagtctgttgaccacaaaagaagaaagattttgcaacaaatgagaagtgatgcagctttgtttaccttggaagaaggcagttcccctgttcaaaatccatctacagcagccgaagactcgagattagcctccctcatttctctggatgccatactgaagcaagtcaaggaaataacaagacaagcctctgtccacgttttgagtaaaagcaagaaaaaggcattgcttgagtctcttgatgaacttaacgaacgaatgccttctctgcttgatgttgatcatccatgtgcacagagagaaattgatacggctcaccagttggtcgagacaattccagaacaagaggacaatcttcaagacgaaaagagaccttcaatagattcaatatcttcgactgaaaccgatgtgtctcaatggaatgttttgcaattcaacacaggaggctcttcagctccattcatcataaaatgcggagctaactccaactcagagctcgtgatcaaagcggatgcccgtattcaagaacctaaaggaggcgaaatagtgagagttgtgccaagaccttcggttttagaaaacatgagcttagaggaaatgaaacaagtgtttggtcagttgcccgaagctctaagttcactggccttagctagaacagctgatggcacacgggctcgatactctagactctacagaactctagccatgaaggttccctctcttagggacctcgttggagagcttgagaaaggaggagtcttaaaagatacaaaatcgacatga

SEQ ID NO: 91322 - protein, 1281 aa, Arabidopsis thaliana
  peptide (1)..(1281): Ceres Seq. ID no. 12727245
  misc_feature (476)..(815): Pfam Name: Myosin tail Pfam Description: Myosin tail
  misc_feature (317)..(592): Homolog of NCBI NO: 15144517 NR Description: TH65-like protein [Lycopersicon esculentum]
  misc_feature (65)..(236): Homolog of NCBI NO: 15144517 NR Description: TH65-like protein [Lycopersicon esculentum]
  misc_feature (1)..(70): Homolog of NCBI NO: 15144517 NR Description: TH65-like protein [Lycopersicon esculentum]
  misc_feature (486)..(866): Homolog of NCBI NO: 2576255 NR Description: TH65 protein [Arabidopsis thaliana]
  misc_feature (52)..(503): Homolog of NCBI NO: 22329655 NR Description: kinesin-related protein; protein id: At1g18410.1
  misc_feature (66)..(514): Homolog of NCBI NO: 25406299 NR Description: protein kinesin F2P9.27 [imported] - Arabidopsis
  misc_feature (66)..(514): Homolog of NCBI NO: 22330608 NR Description: kinesin-related protein; protein id: At1g73860.1
  misc_feature (66)..(514): Homolog of NCBI NO: 12324217 NR Description: kinesin-related protein; 103921-99132
  misc_feature (123)..(528): Homolog of NCBI NO: 15240982 NR Description: kinesin-related protein; protein id: At5g27550.1
  misc_feature (45)..(631): Homolog of NCBI NO: 15218418 NR Description: kinesin-related protein; protein id: At1g72250.1
MAEQKSTNMWNWEVTGFESKKSPSSEEGVHRTPSSMLRRYSIPKNSLPPHSSELASKVQSLKDKVQLAKDDYVGLRQEATDLQEYSNAKLERVTRYLGVLADKSRKLDQYALETEARISPLINEKKRLFNDLLTTKGNVKVFCRARPLFEDEGPSIIEFPDNCTIRVNTSDDTLSNPKKEFEFDRVYGPQVGQASLFSDVQPFVQSALDGSNVSIFAYGQTHAGKTYTMVAPPFPFLSEIRYRSCLEGSNQDRGLYARCFEELMDLANSDSTSASQFSFSVSVFELYNEQVRDLLSGCQSNLPKINMGLRESVIELSQEKVDNPSEFMRVLNSAFQNRGNDKSKSTVTHLIVSIHICYSNTITRENVISKLSLVDLAGSEGLTVEDDNGDHVTDLLHVTNSISALGDVLSSLTSKRDTIPYENSFLTRILADSLGGSSKTLMIVNICPSARNLSEIMSCLNYAARARNTVPSLGNRDTIKKWRDVANDARKEVLEKERENQRLKQEVTGLKQALKEANDQCVLLYNEVQRAWRVSFTLQSDLKSENAMVVDKHKIEKEQNFQLRNQIAQLLQLEQEQKLQAQQQDSTIQNLQSKVKDLESQLSKALKSDMTRSRDPLEPQPRAAENTLDSSAVTKKLEEELKKRDALIERLHEENEKLFDRLTEKSVASSTQVSSPSSKASPTVQPADVDSAGTLPSSVDKNEGTITLVKSSSELVKTTPAGEYLTAALNDFDPEQYEGLAAIADGANKLLMLVLAAVIKAGASREHEILAEIRDSVFSFIRKMEPRRVMDTMLVSRVRILYIRSLLARSPELQSIKVSPVERFLEKPYTGRTRSSSGSSSPGRSPVRYYDEQIYGFKVNLKPEKKSKLVSVVSRIRGHDQDTGRQQVTGGKLREIQDEAKSFAIGNKPLAALFVHTPAGELQRQIRSWLAESFEFLSVTADDVSGVTTGQLELLSTAIMDGWMAGVGAAVPPHTDALGQLLSEYAKRVYTSQMQHLKDIAGTLASEEAEDAGQVAKLRSALESVDHKRRKILQQMRSDAALFTLEEGSSPVQNPSTAAEDSRLASLISLDAILKQVKEITRQASVHVLSKSKKKALLESLDELNERMPSLLDVDHPCAQREIDTAHQLVETIPEQEDNLQDEKRPSIDSISSTETDVSQWNVLQFNTGGSSAPFIIKCGANSNSELVIKADARIQEPKGGEIVRVVPRPSVLENMSLEEMKQVFGQLPEALSSLALARTADGTRARYSRLYRTLAMKVPSLRDLVGELEKGGVLKDTKST

SEQ ID NO: 91323 - protein, 1273 aa, Arabidopsis thaliana
  peptide (1)..(1273): Ceres Seq. ID no. 12727246
  misc_feature (468)..(807): Pfam Name: Myosin tail Pfam Description: Myosin tail
  misc_feature (309)..(584): Homolog of NCBI NO: 15144517 NR Description: TH65-like protein [Lycopersicon esculentum]
  misc_feature (57)..(228): Homolog of NCBI NO: 15144517 NR Description: TH65-like protein [Lycopersicon esculentum]
  misc_feature (1)..(62): Homolog of NCBI NO: 15144517 NR Description: TH65-like protein [Lycopersicon esculentum]
  misc_feature (478)..(858): Homolog of NCBI NO: 2576255 NR Description: TH65 protein [Arabidopsis thaliana]
  misc_feature (44)..(495): Homolog of NCBI NO: 22329655 NR Description: kinesin-related protein; protein id: At1g18410.1
  misc_feature (58)..(506): Homolog of NCBI NO: 25406299 NR Description: protein kinesin F2P9.27 [imported] - Arabidopsis
  misc_feature (58)..(506): Homolog of NCBI NO: 22330608 NR Description: kinesin-related protein; protein id: At1g73860.1
  misc_feature (58)..(506): Homolog of NCBI NO: 12324217 NR Description: kinesin-related protein; 103921-99132
  misc_feature (115)..(520): Homolog of NCBI NO: 15240982 NR Description: kinesin-related protein; protein id: At5g27550.1
  misc_feature (37)..(623): Homolog of NCBI NO: 15218418 NR Description: kinesin-related protein; protein id: At1g72250.1
MWNWEVTGFESKKSPSSEEGVHRTPSSMLRRYSIPKNSLPPHSSELASKVQSLKDKVQLAKDDYVGLRQEATDLQEYSNAKLERVTRYLGVLADKSRKLDQYALETEARISPLINEKKRLFNDLLTTKGNVKVFCRARPLFEDEGPSIIEFPDNCTIRVNTSDDTLSNPKKEFEFDRVYGPQVGQASLFSDVQPFVQSALDGSNVSIFAYGQTHAGKTYTMVAPPFPFLSEIRYRSCLEGSNQDRGLYARCFEELMDLANSDSTSASQFSFSVSVFELYNEQVRDLLSGCQSNLPKINMGLRESVIELSQEKVDNPSEFMRVLNSAFQNRGNDKSKSTVTHLIVSIHICYSNTITRENVISKLSLVDLAGSEGLTVEDDNGDHVTDLLHVTNSISALGDVLSSLTSKRDTIPYENSFLTRILADSLGGSSKTLMIVNICPSARNLSEIMSCLNYAARARNTVPSLGNRDTIKKWRDVANDARKEVLEKERENQRLKQEVTGLKQALKEANDQCVLLYNEVQRAWRVSFTLQSDLKSENAMVVDKHKIEKEQNFQLRNQIAQLLQLEQEQKLQAQQQDSTIQNLQSKVKDLESQLSKALKSDMTRSRDPLEPQPRAAENTLDSSAVTKKLEEELKKRDALIERLHEENEKLFDRLTEKSVASSTQVSSPSSKASPTVQPADVDSAGTLPSSVDKNEGTITLVKSSSELVKTTPAGEYLTAALNDFDPEQYEGLAAIADGANKLLMLVLAAVIKAGASREHEILAEIRDSVFSFIRKMEPRRVMDTMLVSRVRILYIRSLLARSPELQSIKVSPVERFLEKPYTGRTRSSSGSSSPGRSPVRYYDEQIYGFKVNLKPEKKSKLVSVVSRIRGHDQDTGRQQVTGGKLREIQDEAKSFAIGNKPLAALFVHTPAGELQRQIRSWLAESFEFLSVTADDVSGVTTGQLELLSTAIMDGWMAGVGAAVPPHTDALGQLLSEYAKRVYTSQMQHLKDIAGTLASEEAEDAGQVAKLRSALESVDHKRRKILQQMRSDAALFTLEEGSSPVQNPSTAAEDSRLASLISLDAILKQVKEITRQASVHVLSKSKKKALLESLDELNERMPSLLDVDHPCAQREIDTAHQLVETIPEQEDNLQDEKRPSIDSISSTETDVSQWNVLQFNTGGSSAPFIIKCGANSNSELVIKADARIQEPKGGEIVRVVPRPSVLENMSLEEMKQVFGQLPEALSSLALARTADGTRARYSRLYRTLAMKVPSLRDLVGELEKGGVLKDTKST

SEQ ID NO: 91324 - protein, 1246 aa, Arabidopsis thaliana
  peptide (1)..(1246): Ceres Seq. ID no. 12727247
  misc_feature (441)..(780): Pfam Name: Myosin tail Pfam Description: Myosin tail
  misc_feature (282)..(557): Homolog of NCBI NO: 15144517 NR Description: TH65-like protein [Lycopersicon esculentum]
  misc_feature (30)..(201): Homolog of NCBI NO: 15144517 NR Description: TH65-like protein [Lycopersicon esculentum]
  misc_feature (1)..(35): Homolog of NCBI NO: 15144517 NR Description: TH65-like protein [Lycopersicon esculentum]
  misc_feature (451)..(831): Homolog of NCBI NO: 2576255 NR Description: TH65 protein [Arabidopsis thaliana]
  misc_feature (17)..(468): Homolog of NCBI NO: 22329655 NR Description: kinesin-related protein; protein id: At1g18410.1
  misc_feature (31)..(479): Homolog of NCBI NO: 25406299 NR Description: protein kinesin F2P9.27 [imported] - Arabidopsis
  misc_feature (31)..(479): Homolog of NCBI NO: 22330608 NR Description: kinesin-related protein; protein id: At1g73860.1
  misc_feature (31)..(479): Homolog of NCBI NO: 12324217 NR Description: kinesin-related protein; 103921-99132
  misc_feature (88)..(493): Homolog of NCBI NO: 15240982 NR Description: kinesin-related protein; protein id: At5g27550.1
  misc_feature (10)..(596): Homolog of NCBI NO: 15218418 NR Description: kinesin-related protein; protein id: At1g72250.1
MLRRYSIPKNSLPPHSSELASKVQSLKDKVQLAKDDYVGLRQEATDLQEYSNAKLERVTRYLGVLADKSRKLDQYALETEARISPLINEKKRLFNDLLTTKGNVKVFCRARPLFEDEGPSIIEFPDNCTIRVNTSDDTLSNPKKEFEFDRVYGPQVGQASLFSDVQPFVQSALDGSNVSIFAYGQTHAGKTYTMVAPPFPFLSEIRYRSCLEGSNQDRGLYARCFEELMDLANSDSTSASQFSFSVSVFELYNEQVRDLLSGCQSNLPKINMGLRESVIELSQEKVDNPSEFMRVLNSAFQNRGNDKSKSTVTHLIVSIHICYSNTITRENVISKLSLVDLAGSEGLTVEDDNGDHVTDLLHVTNSISALGDVLSSLTSKRDTIPYENSFLTRILADSLGGSSKTLMIVNICPSARNLSEIMSCLNYAARARNTVPSLGNRDTIKKWRDVANDARKEVLEKERENQRLKQEVTGLKQALKEANDQCVLLYNEVQRAWRVSFTLQSDLKSENAMVVDKHKIEKEQNFQLRNQIAQLLQLEQEQKLQAQQQDSTIQNLQSKVKDLESQLSKALKSDMTRSRDPLEPQPRAAENTLDSSAVTKKLEEELKKRDALIERLHEENEKLFDRLTEKSVASSTQVSSPSSKASPTVQPADVDSAGTLPSSVDKNEGTITLVKSSSELVKTTPAGEYLTAALNDFDPEQYEGLAAIADGANKLLMLVLAAVIKAGASREHEILAEIRDSVFSFIRKMEPRRVMDTMLVSRVRILYIRSLLARSPELQSIKVSPVERFLEKPYTGRTRSSSGSSSPGRSPVRYYDEQIYGFKVNLKPEKKSKLVSVVSRIRGHDQDTGRQQVTGGKLREIQDEAKSFAIGNKPLAALFVHTPAGELQRQIRSWLAESFEFLSVTADDVSGVTTGQLELLSTAIMDGWMAGVGAAVPPHTDALGQLLSEYAKRVYTSQMQHLKDIAGTLASEEAEDAGQVAKLRSALESVDHKRRKILQQMRSDAALFTLEEGSSPVQNPSTAAEDSRLASLISLDAILKQVKEITRQASVHVLSKSKKKALLESLDELNERMPSLLDVDHPCAQREIDTAHQLVETIPEQEDNLQDEKRPSIDSISSTETDVSQWNVLQFNTGGSSAPFIIKCGANSNSELVIKADARIQEPKGGEIVRVVPRPSVLENMSLEEMKQVFGQLPEALSSLALARTADGTRARYSRLYRTLAMKVPSLRDLVGELEKGGVLKDTKST

SEQ ID NO: 91325 - DNA, 1287 bp, Arabidopsis thaliana
  misc_feature (1)..(1287): Ceres Seq. ID no. 12727274
  misc_feature: MA Experiment ID: 20000306 Result: Up-regulated in Transcription
  misc_feature: MA Experiment 20000306 PARAMETER Experiment Name: At_Germinating_Seeds_Sub_P Parameter: Age (hr) Value: 6 vs. 0
  misc_feature: MA Experiment 20000306 PARAMETER Experiment Name: At_Germinating_Seeds_Sub_P Parameter: Organism Value: A. thaliana
  misc_feature: MA Experiment 20000306 PARAMETER Experiment Name: At_Germinating_Seeds_Sub_P Parameter: Plant Line Value: WS
  misc_feature: MA Experiment 20000306 PARAMETER Experiment Name: At_Germinating_Seeds_Sub_P Parameter: Tissue Value: Germinating Seeds
  misc_feature: MA Experiment ID: 20000315 Result: Down-regulated in Transcription
  misc_feature: MA Experiment 20000315 PARAMETER Experiment Name: At_14day_Shoots-Roots_Sub_P Parameter: Age (day) Value: 14
  misc_feature: MA Experiment 20000315 PARAMETER Experiment Name: At_14day_Shoots-Roots_Sub_P Parameter: Organism Value: A. thaliana
  misc_feature: MA Experiment 20000315 PARAMETER Experiment Name: At_14day_Shoots-Roots_Sub_P Parameter: Plant Line Value: WS
  misc_feature: MA Experiment 20000315 PARAMETER Experiment Name: At_14day_Shoots-Roots_Sub_P Parameter: Tissue Value: Shoots vs. Whole Plant
  misc_feature: MA Experiment ID: 20000328 Result: Down-regulated in Transcription
  misc_feature: MA Experiment 20000328 PARAMETER Experiment Name: At_42deg_Heat_Sub_P Parameter: Age (day) Value: 14
  misc_feature: MA Experiment 20000328 PARAMETER Experiment Name: At_42deg_Heat_Sub_P Parameter: Organism Value: A. thaliana
  misc_feature: MA Experiment 20000328 PARAMETER Experiment Name: At_42deg_Heat_Sub_P Parameter: Plant Line Value: WS
  misc_feature: MA Experiment 20000328 PARAMETER Experiment Name: At_42deg_Heat_Sub_P Parameter: Temperature (deg C) Value: 42 vs. 22
  misc_feature: MA Experiment 20000328 PARAMETER Experiment Name: At_42deg_Heat_Sub_P Parameter: Timepoint (hr) Value: 6
  misc_feature: MA Experiment 20000328 PARAMETER Experiment Name: At_42deg_Heat_Sub_P Parameter: Tissue Value: Aerial
atggcaggggcggcctcagcgctgtttctgctcgatatcaaaggtcgtgttctcgtgtggcgcgattaccgtggcgatgtcaccgctgctcaagctgagcgtttcttcaccaaactcatcgagacagagggtgattcacagtcaaatgatccggttgcttatgataatggcgtgacctacatgtttgtacagcatagtaacatttacctcatgatagcgtccagacagaactgtaatgctgccagtcttctcttcttcttgcatcgtgtagtcgatgtcttcaagcattacttcgaggagttagaggaagaatctttgagagataactttgtggtagtgtatgagttacttgacgagatgatggactttggttaccctcagtttactgaggcaagaatccttagtgaattcatcaagactgatgcatatagaatggaagttacacagagacctccaatggctgtcactaattctgtctcatggaggagtgaggggttaaagtttaagaaaaacgaagttttcttggatgtgatagagagtgtaaatatccttgtgaacagtaatgggcaaattgtcaggtctgatgtcgttggagctttgaagatgcgaacatacttgagtggaatgccagagtgtaagctaggcttgaatgacagaatattgttggaggcacagggacgagcaataaaaggaaaagccattgatttggaggacatcaaatttcatcagtgtgttcgattagcccgttttgagaacgacaggacaatatcattcataccacctgatggatcttttgatcttatgacgtatagactcagtactcaggtaaagcctcttatatgggtggaagcgcatatagagaggcattccagaagtcgtgttgagatgctagtaaaagctagaagccaattcaaggacagaagctatgcaacaagtgttgagattgagttacctgtaccaactgatgcgtataaccccgatgtaagaacatctctcgggtcggccgcatatgctcctgagaaagatgcactggtctggaagatacaatatttctatgggaacaaggagcatacattgaaagcagatttccatcttccaagtatagccgcagaggaagcaacgcctgagcgaaaagctccaatccgtgtcaaatttgagatcccaaaattcatagtttcaggaatacaggttcgatacctgaagatcattgagaagagtgggtaccaggcacatccatgggtgagatatataaccatggctggtgagtacgaactgagactcatgtaa

SEQ ID NO: 91326 - protein, 428 aa, Arabidopsis thaliana
  peptide (1)..(428): Ceres Seq. ID no. 12727275
  misc_feature (8)..(427): Pfam Name: Adaptor complexes medium subunit family Pfam Description: Adaptor complexes medium subunit family
  misc_feature (1)..(428): Homolog of NCBI NO: 15220202 NR Description: putative clathrin-coat assembly protein; protein At1g10730.1 [Arabidopsis thaliana] >gi|25320047|pir||G86240
  misc_feature (111)..(428): Homolog of NCBI NO: 6573741 NR Description: F20B24.16 [Arabidopsis thaliana]
  misc_feature (1)..(92): Homolog of NCBI NO: 6573741 NR Description: F20B24.16 [Arabidopsis thaliana]
  misc_feature (1)..(428): Homolog of NCBI NO: 15219810 NR Description: clathrin adaptor medium chain protein MU1B, protein id: At1g60780.1, supported by cDNA: gi_20466371 thaliana] >gi|25320049|pir||C96633 probable Serine/Threonine
  misc_feature (1)..(428): Homolog of NCBI NO: 34910334 NR Description: putative clathrin-associated protein [Oryza
  misc_feature (1)..(427): Homolog of NCBI NO: 21913172 NR Description: mu1 adaptin [Toxoplasma gondii]
  misc_feature (5)..(427): Homolog of NCBI NO: 28949965 NR Description: probable clathrin assembly protein AP47
  misc_feature (4)..(426): Homolog of NCBI NO: 14210504 NR Description: adaptor-related protein complex 1, mu 1 subunit; assembly protein complex 1, medium chain; clathrin coat assembly
  misc_feature (4)..(426): Homolog of NCBI NO: 6671557 NR Description: adaptor-related protein complex AP-1, mu subunit
  misc_feature (4)..(427): Homolog of NCBI NO: 17508211 NR Description: UNCoordinated locomotion UNC-101,
MAGAASALFLLDIKGRVLVWRDYRGDVTAAQAERFFTKLIETEGDSQSNDPVAYDNGVTYMFVQHSNIYLMIASRQNCNAASLLFFLHRVVDVFKHYFEELEEESLRDNFVVVYELLDEMMDFGYPQFTEARILSEFIKTDAYRMEVTQRPPMAVTNSVSWRSEGLKFKKNEVFLDVIESVNILVNSNGQIVRSDVVGALKMRTYLSGMPECKLGLNDRILLEAQGRAIKGKAIDLEDIKFHQCVRLARFENDRTISFIPPDGSFDLMTYRLSTQVKPLIWVEAHIERHSRSRVEMLVKARSQFKDRSYATSVEIELPVPTDAYNPDVRTSLGSAAYAPEKDALVWKIQYFYGNKEHTLKADFHLPSIAAEEATPERKAPIRVKFEIPKFIVSGIQVRYLKIIEKSGYQAHPWVRYITMAGEYELRLM

SEQ ID NO: 91327 - protein, 368 aa, Arabidopsis thaliana
  peptide (1)..(368): Ceres Seq. ID no. 12727276
  misc_feature (1)..(367): Pfam Name: Adaptor complexes medium subunit family Pfam Description: Adaptor complexes medium subunit family
  misc_feature (1)..(368): Homolog of NCBI NO: 15220202 NR Description: putative clathrin-coat assembly protein; protein At1g10730.1 [Arabidopsis thaliana] >gi|25320047|pir||G86240
  misc_feature (51)..(368): Homolog of NCBI NO: 6573741 NR Description: F20B24.16 [Arabidopsis thaliana]
  misc_feature (1)..(32): Homolog of NCBI NO: 6573741 NR Description: F20B24.16 [Arabidopsis thaliana]
  misc_feature (1)..(368): Homolog of NCBI NO: 15219810 NR Description: clathrin adaptor medium chain protein MU1B, protein id: At1g60780.1, supported by cDNA: gi_20466371 thaliana] >gi|25320049|pir||C96633 probable Serine/Threonine
  misc_feature (1)..(368): Homolog of NCBI NO: 34910334 NR Description: putative clathrin-associated protein [Oryza
  misc_feature (1)..(367): Homolog of NCBI NO: 21913172 NR Description: mu1 adaptin [Toxoplasma gondii]
  misc_feature (1)..(367): Homolog of NCBI NO: 28949965 NR Description: probable clathrin assembly protein AP47
  misc_feature (1)..(366): Homolog of NCBI NO: 14210504 NR Description: adaptor-related protein complex 1, mu 1 subunit; assembly protein complex 1, medium chain; clathrin coat assembly
  misc_feature (1)..(366): Homolog of NCBI NO: 6671557 NR Description: adaptor-related protein complex AP-1, mu subunit
  misc_feature (1)..(367): Homolog of NCBI NO: 17508211 NR Description: UNCoordinated locomotion UNC-101,
MFVQHSNIYLMIASRQNCNAASLLFFLHRVVDVFKHYFEELEEESLRDNFVVVYELLDEMMDFGYPQFTEARILSEFIKTDAYRMEVTQRPPMAVTNSVSWRSEGLKFKKNEVFLDVIESVNILVNSNGQIVRSDVVGALKMRTYLSGMPECKLGLNDRILLEAQGRAIKGKAIDLEDIKFHQCVRLARFENDRTISFIPPDGSFDLMTYRLSTQVKPLIWVEAHIERHSRSRVEMLVKARSQFKDRSYATSVEIELPVPTDAYNPDVRTSLGSAAYAPEKDALVWKIQYFYGNKEHTLKADFHLPSIAAEEATPERKAPIRVKFEIPKFIVSGIQVRYLKIIEKSGYQAHPWVRYITMAGEYELRLM

SEQ ID NO: 91328 - protein, 358 aa, Arabidopsis thaliana
  peptide (1)..(358): Ceres Seq. ID no. 12727277
  misc_feature (1)..(357): Pfam Name: Adaptor complexes medium subunit family Pfam Description: Adaptor complexes medium subunit family
  misc_feature (1)..(358): Homolog of NCBI NO: 15220202 NR Description: putative clathrin-coat assembly protein; protein At1g10730.1 [Arabidopsis thaliana] >gi|25320047|pir||G86240
  misc_feature (41)..(358): Homolog of NCBI NO: 6573741 NR Description: F20B24.16 [Arabidopsis thaliana]
  misc_feature (1)..(22): Homolog of NCBI NO: 6573741 NR Description: F20B24.16 [Arabidopsis thaliana]
  misc_feature (1)..(358): Homolog of NCBI NO: 15219810 NR Description: clathrin adaptor medium chain protein MU1B, protein id: At1g60780.1, supported by cDNA: gi_20466371 thaliana] >gi|25320049|pir||C96633 probable Serine/Threonine
  misc_feature (1)..(358): Homolog of NCBI NO: 34910334 NR Description: putative clathrin-associated protein [Oryza
  misc_feature (1)..(357): Homolog of NCBI NO: 21913172 NR Description: mu1 adaptin [Toxoplasma gondii]
  misc_feature (1)..(357): Homolog of NCBI NO: 28949965 NR Description: probable clathrin assembly protein AP47
  misc_feature (1)..(356): Homolog of NCBI NO: 14210504 NR Description: adaptor-related protein complex 1, mu 1 subunit; assembly protein complex 1, medium chain; clathrin coat assembly
  misc_feature (1)..(356): Homolog of NCBI NO: 6671557 NR Description: adaptor-related protein complex AP-1, mu subunit
  misc_feature (1)..(357): Homolog of NCBI NO: 17508211 NR Description: UNCoordinated locomotion UNC-101,
MIASRQNCNAASLLFFLHRVVDVFKHYFEELEEESLRDNFVVVYELLDEMMDFGYPQFTEARILSEFIKTDAYRMEVTQRPPMAVTNSVSWRSEGLKFKKNEVFLDVIESVNILVNSNGQIVRSDVVGALKMRTYLSGMPECKLGLNDRILLEAQGRAIKGKAIDLEDIKFHQCVRLARFENDRTISFIPPDGSFDLMTYRLSTQVKPLIWVEAHIERHSRSRVEMLVKARSQFKDRSYATSVEIELPVPTDAYNPDVRTSLGSAAYAPEKDALVWKIQYFYGNKEHTLKADFHLPSIAAEEATPERKAPIRVKFEIPKFIVSGIQVRYLKIIEKSGYQAHPWVRYITMAGEYELRLM

SEQ ID NO: 91329 - DNA, 1035 bp, Arabidopsis thaliana
  misc_feature (1)..(1035): Ceres Seq. ID no. 12727292
  misc_feature: MA Experiment ID: 20000227 Result: Up-regulated in Transcription
  misc_feature: MA Experiment 20000227 PARAMETER Experiment Name: At_Root-Tips-vs-Tops_P Parameter: Tissue Value: Root Tips vs. Root Tops
atggcagctgcaagtggagtgcgtaggatcaagctaggaagccaaggtcttgaagtgtcagcgcaaggtcttggttgtatgggactttccatcttcgatggaactaccaaggttgagacagatctcattgctctcattcaccatgccattaactccggcatcacactcctcgacacctccgacatttacggtcctgagaccaacgagttgctccttggtcaggctttgaaagatgggatgagggagaaggtggaattggcaaccaaatttgggcttctcttgaaagatcagaaattgggttacaggggagatccagcctatgtgagagctgcctgtgaagcaagcttaaggcgtttaggagttagctgcatagatctttattaccagcataggatcgataccactgtccccattgaagtcactattggagaactgaagaagctagttgaagagggtaagataaagtacattggtttgtctgaagcctgtgcctcgactataagaagagcccatgctgttcacccgctaaccgctgtgcagttggaatggtctttatggtcgagagacgttgaagaagacatcattcctacttgcagggagctcgggattggaattgtagcttacagtcctctgggactggggttctttgctgcaggaccaaaattcattgagagtatggacaatggtgactacagaaagggtttaccgagattccagcaagagaacttagaccacaacaagattctctatgagaaggtcaatgcaatggcagagaagaaaagctgtactcctgcacaattagctttggcatgggttcatcaccaaggaaatgatgtctgcccaatcccaggaacctctaagatcaaaaaccttaatcagaacataggagctttatctgtgaaactcagtatcgaagagatggccgagcttgacgccatgggacatcccgattctgtgaaaggggaaaggtcagccacctatatagttacttacaagaattctgaaactccaccactgtcttcttggacttcataa

SEQ ID NO: 91330 - protein, 344 aa, Arabidopsis thaliana
  peptide (1)..(344): Ceres Seq. ID no. 12727293
  misc_feature (1)..(344): Homolog of NCBI NO: 15220214 NR Description: putative auxin-induced protein; protein id:
  misc_feature (1)..(344): Homolog of NCBI NO: 25316213 NR Description: hypothetical protein [imported] - Arabidopsis
  misc_feature (1)..(342): Homolog of NCBI NO: 30696459 NR Description: aldo/keto reductase family [Arabidopsis thaliana] At1g60730/F8A5_24 [Arabidopsis thaliana]
  misc_feature (1)..(342): Homolog of NCBI NO: 25316216 NR Description: hypothetical protein F8A5.24 [imported] -
  misc_feature (1)..(344): Homolog of NCBI NO: 15219786 NR Description: auxin-induced protein, putative; protein id: [Arabidopsis thaliana] >gi|25316215|pir||C96632 hypothetical
  misc_feature (1)..(342): Homolog of NCBI NO: 18406861 NR Description: auxin-induced protein, putative; protein id: supported by cDNA: gi_15912324, supported by cDNA: gi_20466377, by cDNA: gi_6562979 [Arabidopsis thaliana]
  misc_feature (1)..(342): Homolog of NCBI NO: 6562980 NR Description: auxin-induced atb2 [Arabidopsis thaliana]
  misc_feature (1)..(342): Homolog of NCBI NO: 30102704 NR Description: At1g60680 [Arabidopsis thaliana]
  misc_feature (1)..(342): Homolog of NCBI NO: 30696451 NR Description: aldo/keto reductase family [Arabidopsis thaliana]
  misc_feature (4)..(228): Homolog of NCBI NO: 15219805 NR Description: auxin-induced protein, putative; protein id:
MAAASGVRRIKLGSQGLEVSAQGLGCMGLSIFDGTTKVETDLIALIHHAINSGITLLDTSDIYGPETNELLLGQALKDGMREKVELATKFGLLLKDQKLGYRGDPAYVRAACEASLRRLGVSCIDLYYQHRIDTTVPIEVTIGELKKLVEEGKIKYIGLSEACASTIRRAHAVHPLTAVQLEWSLWSRDVEEDIIPTCRELGIGIVAYSPLGLGFFAAGPKFIESMDNGDYRKGLPRFQQENLDHNKILYEKVNAMAEKKSCTPAQLALAWVHHQGNDVCPIPGTSKIKNLNQNIGALSVKLSIEEMAELDAMGHPDSVKGERSATYIVTYKNSETPPLSSWTS

SEQ ID NO: 91331 - protein, 318 aa, Arabidopsis thaliana
  peptide (1)..(318): Ceres Seq. ID no. 12727294
  misc_feature (1)..(318): Homolog of NCBI NO: 15220214 NR Description: putative auxin-induced protein; protein id:
  misc_feature (1)..(318): Homolog of NCBI NO: 25316213 NR Description: hypothetical protein [imported] - Arabidopsis
  misc_feature (1)..(316): Homolog of NCBI NO: 30696459 NR Description: aldo/keto reductase family [Arabidopsis thaliana] At1g60730/F8A5_24 [Arabidopsis thaliana]
  misc_feature (1)..(316): Homolog of NCBI NO: 25316216 NR Description: hypothetical protein F8A5.24 [imported] -
  misc_feature (1)..(318): Homolog of NCBI NO: 15219786 NR Description: auxin-induced protein, putative; protein id: [Arabidopsis thaliana] >gi|25316215|pir||C96632 hypothetical
  misc_feature (1)..(316): Homolog of NCBI NO: 18406861 NR Description: auxin-induced protein, putative; protein id: supported by cDNA: gi_15912324, supported by cDNA: gi_20466377, by cDNA: gi_6562979 [Arabidopsis thaliana]
  misc_feature (1)..(316): Homolog of NCBI NO: 6562980 NR Description: auxin-induced atb2 [Arabidopsis thaliana]
  misc_feature (1)..(316): Homolog of NCBI NO: 30102704 NR Description: At1g60680 [Arabidopsis thaliana]
  misc_feature (1)..(316): Homolog of NCBI NO: 30696451 NR Description: aldo/keto reductase family [Arabidopsis thaliana]
  misc_feature (1)..(202): Homolog of NCBI NO: 15219805 NR Description: auxin-induced protein, putative; protein id:
MGLSIFDGTTKVETDLIALIHHAINSGITLLDTSDIYGPETNELLLGQALKDGMREKVELATKFGLLLKDQKLGYRGDPAYVRAACEASLRRLGVSCIDLYYQHRIDTTVPIEVTIGELKKLVEEGKIKYIGLSEACASTIRRAHAVHPLTAVQLEWSLWSRDVEEDIIPTCRELGIGIVAYSPLGLGFFAAGPKFIESMDNGDYRKGLPRFQQENLDHNKILYEKVNAMAEKKSCTPAQLALAWVHHQGNDVCPIPGTSKIKNLNQNIGALSVKLSIEEMAELDAMGHPDSVKGERSATYIVTYKNSETPPLSSWTS

SEQ ID NO: 91332 - protein, 265 aa, Arabidopsis thaliana
  peptide (1)..(265): Ceres Seq. ID no. 12727295
  misc_feature (1)..(265): Homolog of NCBI NO: 15220214 NR Description: putative auxin-induced protein; protein id:
  misc_feature (1)..(265): Homolog of NCBI NO: 25316213 NR Description: hypothetical protein [imported] - Arabidopsis
  misc_feature (1)..(263): Homolog of NCBI NO: 30696459 NR Description: aldo/keto reductase family [Arabidopsis thaliana] At1g60730/F8A5_24 [Arabidopsis thaliana]
  misc_feature (1)..(263): Homolog of NCBI NO: 25316216 NR Description: hypothetical protein F8A5.24 [imported] -
  misc_feature (1)..(265): Homolog of NCBI NO: 15219786 NR Description: auxin-induced protein, putative; protein id: [Arabidopsis thaliana] >gi|25316215|pir||C96632 hypothetical
  misc_feature (1)..(263): Homolog of NCBI NO: 18406861 NR Description: auxin-induced protein, putative; protein id: supported by cDNA: gi_15912324, supported by cDNA: gi_20466377, by cDNA: gi_6562979 [Arabidopsis thaliana]
  misc_feature (1)..(263): Homolog of NCBI NO: 6562980 NR Description: auxin-induced atb2 [Arabidopsis thaliana]
  misc_feature (1)..(263): Homolog of NCBI NO: 30102704 NR Description: At1g60680 [Arabidopsis thaliana]
  misc_feature (1)..(263): Homolog of NCBI NO: 30696451 NR Description: aldo/keto reductase family [Arabidopsis thaliana]
  misc_feature (1)..(149): Homolog of NCBI NO: 15219805 NR Description: auxin-induced protein, putative; protein id:
MREKVELATKFGLLLKDQKLGYRGDPAYVRAACEASLRRLGVSCIDLYYQHRIDTTVPIEVTIGELKKLVEEGKIKYIGLSEACASTIRRAHAVHPLTAVQLEWSLWSRDVEEDIIPTCRELGIGIVAYSPLGLGFFAAGPKFIESMDNGDYRKGLPRFQQENLDHNKILYEKVNAMAEKKSCTPAQLALAWVHHQGNDVCPIPGTSKIKNLNQNIGALSVKLSIEEMAELDAMGHPDSVKGERSATYIVTYKNSETPPLSSWTS

SEQ ID NO: 91333 - DNA, 1398 bp, Arabidopsis thaliana
  misc_feature (1)..(1398): Ceres Seq. ID no. 12727332
  misc_feature: MA Experiment ID: 20000315 Result: Down-regulated in Transcription
  misc_feature: MA Experiment 20000315 PARAMETER Experiment Name: At_14day_Shoots-Roots_Sub_P Parameter: Age (day) Value: 14
  misc_feature: MA Experiment 20000315 PARAMETER Experiment Name: At_14day_Shoots-Roots_Sub_P Parameter: Organism Value: A. thaliana
  misc_feature: MA Experiment 20000315 PARAMETER Experiment Name: At_14day_Shoots-Roots_Sub_P Parameter: Plant Line Value: WS
  misc_feature: MA Experiment 20000315 PARAMETER Experiment Name: At_14day_Shoots-Roots_Sub_P Parameter: Tissue Value: Shoots vs. Whole Plant
atggataattatcagaccaagaatatatctaatctattaacttctttgtgttttaccactctcttaatattagctccggtggttatatgcactagacaacaccggttcgatagcccgaaaagaagcttgttggccaacgagcaagatttagtgacaggtttgcctggacagcctgatgtgagtttcagacattatgccggatatgtccctgtcgatgaatccaacggaagagctatgttttactggttctttgaggccatggatctcccgaaagagaaacctctagtcctctggcttaatggaggtccaggttgttcttctgtgggatatggggcaacacaagaaattggtccttttctcgtggacaccaacggaaacggacttaactttaatccatacgcatggaataaagaggccaacatgctgtttttagaatctcccgtcggtgttggcttttcgtattcaaacacaagtagcgattatcaaaaacttggagatgactttacagcaagagacgcatacacttttctttgcaactggttcgagaaattcccagagcacaaagaaaatacgttctatatcgcgggtgaaagttatgcaggaaaatacgtacctgagctagcagaggttgtatacgataacaataacaataacaagaagaatggttcatcgtttcacatcaatcttaagggtattttgttggggaatcctgagacatcagatgcagaagattggagaggttgggtggattatgcatggagccatgcagtaatatcagatgagactcataggatcataaccaggacgtgcaatttcagcagcgataatacttggagcaacgatgagtgcaatgaggccgtagcagaagttctcaagcagtatcacgagatagatatctatagcatctatacctcaatgccaccgaggctcatgggtggatatgatccatgcttagatgattacgcgagagtattttacaacagagcagatgttcagaagtctcttcatgcgagtgatggagttaatctcaagaactggagcatttgcaacatggagatctttaataattggactggttcaaacccgtcggttttgcctatttacgagaaactcatcgccggaggattaagaatatgggtttacagtggtgacacagacggaagagttccagtacttgcgactcgttatagcttaaacgcactcgaattacccatcaagacagcttggaggccatggtaccatgaaaaacaggtaagtgggtggcttcaagaatacgaaggtttaacgtttgctacgttcagaggagctggacatgcggtgccttgcttcaaaccaagcagctctctcgcctttttctcggcgtttctcagcggagttcctcctccgccatcgcggtag

SEQ ID NO: 91334 - protein, 465 aa, Arabidopsis thaliana
  peptide (1)..(465): Ceres Seq. ID no. 12727333
  misc_feature (55)..(458): Pfam Name: Serine carboxypeptidase Pfam Description: Serine carboxypeptidase
  misc_feature (1)..(465): Homolog of NCBI NO: 15220282 NR Description: Serine carboxypeptidase isolog; protein id: [Arabidopsis thaliana] >gi|25289784|pir||G86244 Serine
  misc_feature (48)..(304): Homolog of NCBI NO: 15219869 NR Description: hypothetical protein; protein id: At1g61130.1
  misc_feature (296)..(465): Homolog of NCBI NO: 15219869 NR Description: hypothetical protein; protein id: At1g61130.1
  misc_feature (48)..(304): Homolog of NCBI NO: 25289786 NR Description: hypothetical protein F11P17.14 [imported] - thaliana >gi|2443888|gb|AAB71481.1| similar to serine
  misc_feature (296)..(465): Homolog of NCBI NO: 25289786 NR Description: hypothetical protein F11P17.14 [imported] - thaliana >gi|2443888|gb|AAB71481.1| similar to serine
  misc_feature (104)..(305): Homolog of NCBI NO: 15233683 NR Description: hydroxynitrile lyase like protein; protein id: [Arabidopsis thaliana] >gi|7485011|pir||G71414
  misc_feature (306)..(465): Homolog of NCBI NO: 15233683 NR Description: hydroxynitrile lyase like protein; protein id: [Arabidopsis thaliana] >gi|7485011|pir||G71414
  misc_feature (11)..(304): Homolog of NCBI NO: 15241571 NR Description: serine-type carboxypeptidase II-like protein; id: At5g08260.1, supported by cDNA: gi_13877962, supported by gi_17065641 [Arabidopsis thaliana] >gi|11264740|pir||T50511
  misc_feature (313)..(465): Homolog of NCBI NO: 15241571 NR Description: serine-type carboxypeptidase II-like protein; id: At5g08260.1, supported by cDNA: gi_13877962, supported by gi_17065641 [Arabidopsis thaliana] >gi|11264740|pir||T50511
  misc_feature (47)..(357): Homolog of NCBI NO: 15224082 NR Description: putative serine carboxypeptidase II; protein id: [Arabidopsis thaliana] >gi|25289798|pir||D84631 probable serine
MDNYQTKNISNLLTSLCFTTLLILAPVVICTRQHRFDSPKRSLLANEQDLVTGLPGQPDVSFRHYAGYVPVDESNGRAMFYWFFEAMDLPKEKPLVLWLNGGPGCSSVGYGATQEIGPFLVDTNGNGLNFNPYAWNKEANMLFLESPVGVGFSYSNTSSDYQKLGDDFTARDAYTFLCNWFEKFPEHKENTFYIAGESYAGKYVPELAEVVYDNNNNNKKNGSSFHINLKGILLGNPETSDAEDWRGWVDYAWSHAVISDETHRIITRTCNFSSDNTWSNDECNEAVAEVLKQYHEIDIYSIYTSMPPRLMGGYDPCLDDYARVFYNRADVQKSLHASDGVNLKNWSICNMEIFNNWTGSNPSVLPIYEKLIAGGLRIWVYSGDTDGRVPVLATRYSLNALELPIKTAWRPWYHEKQVSGWLQEYEGLTFATFRGAGHAVPCFKPSSSLAFFSAFLSGVPPPPSR

SEQ ID NO: 91335 - protein, 387 aa, Arabidopsis thaliana
  peptide (1)..(387): Ceres Seq. ID no. 12727334
  misc_feature (1)..(380): Pfam Name: Serine carboxypeptidase Pfam Description: Serine carboxypeptidase
  misc_feature (1)..(387): Homolog of NCBI NO: 15220282 NR Description: Serine carboxypeptidase isolog; protein id: [Arabidopsis thaliana] >gi|25289784|pir||G86244 Serine
  misc_feature (1)..(226): Homolog of NCBI NO: 15219869 NR Description: hypothetical protein; protein id: At1g61130.1
  misc_feature (218)..(387): Homolog of NCBI NO: 15219869 NR Description: hypothetical protein; protein id: At1g61130.1
  misc_feature (1)..(226): Homolog of NCBI NO: 25289786 NR Description: hypothetical protein F11P17.14 [imported] - thaliana >gi|2443888|gb|AAB71481.1| similar to serine
  misc_feature (218)..(387): Homolog of NCBI NO: 25289786 NR Description: hypothetical protein F11P17.14 [imported] - thaliana >gi|2443888|gb|AAB71481.1| similar to serine
  misc_feature (26)..(227): Homolog of NCBI NO: 15233683 NR Description: hydroxynitrile lyase like protein; protein id: [Arabidopsis thaliana] >gi|7485011|pir||G71414
  misc_feature (228)..(387): Homolog of NCBI NO: 15233683 NR Description: hydroxynitrile lyase like protein; protein id: [Arabidopsis thaliana] >gi|7485011|pir||G71414
  misc_feature (1)..(226): Homolog of NCBI NO: 15241571 NR Description: serine-type carboxypeptidase II-like protein; id: At5g08260.1, supported by cDNA: gi_13877962, supported by gi_17065641 [Arabidopsis thaliana] >gi|11264740|pir||T50511
  misc_feature (235)..(387): Homolog of NCBI NO: 15241571 NR Description: serine-type carboxypeptidase II-like protein; id: At5g08260.1, supported by cDNA: gi_13877962, supported by gi_17065641 [Arabidopsis thaliana] >gi|11264740|pir||T50511
  misc_feature (1)..(279): Homolog of NCBI NO: 15224082 NR Description: putative serine carboxypeptidase II; protein id: [Arabidopsis thaliana] >gi|25289798|pir||D84631 probable serine
MFYWFFEAMDLPKEKPLVLWLNGGPGCSSVGYGATQEIGPFLVDTNGNGLNFNPYAWNKEANMLFLESPVGVGFSYSNTSSDYQKLGDDFTARDAYTFLCNWFEKFPEHKENTFYIAGESYAGKYVPELAEVVYDNNNNNKKNGSSFHINLKGILLGNPETSDAEDWRGWVDYAWSHAVISDETHRIITRTCNFSSDNTWSNDECNEAVAEVLKQYHEIDIYSIYTSMPPRLMGGYDPCLDDYARVFYNRADVQKSLHASDGVNLKNWSICNMEIFNNWTGSNPSVLPIYEKLIAGGLRIWVYSGDTDGRVPVLATRYSLNALELPIKTAWRPWYHEKQVSGWLQEYEGLTFATFRGAGHAVPCFKPSSSLAFFSAFLSGVPPPPSR

SEQ ID NO: 91336 - protein, 379 aa, Arabidopsis thaliana
  peptide (1)..(379): Ceres Seq. ID no. 12727335
  misc_feature (1)..(372): Pfam Name: Serine carboxypeptidase Pfam Description: Serine carboxypeptidase
  misc_feature (1)..(379): Homolog of NCBI NO: 15220282 NR Description: Serine carboxypeptidase isolog; protein id: [Arabidopsis thaliana] >gi|25289784|pir||G86244 Serine
  misc_feature (1)..(218): Homolog of NCBI NO: 15219869 NR Description: hypothetical protein; protein id: At1g61130.1
  misc_feature (210)..(379): Homolog of NCBI NO: 15219869 NR Description: hypothetical protein; protein id: At1g61130.1
  misc_feature (1)..(218): Homolog of NCBI NO: 25289786 NR Description: hypothetical protein F11P17.14 [imported] - thaliana >gi|2443888|gb|AAB71481.1| similar to serine
  misc_feature (210)..(379): Homolog of NCBI NO: 25289786 NR Description: hypothetical protein F11P17.14 [imported] - thaliana >gi|2443888|gb|AAB71481.1| similar to serine
  misc_feature (18)..(219): Homolog of NCBI NO: 15233683 NR Description: hydroxynitrile lyase like protein; protein id: [Arabidopsis thaliana] >gi|7485011|pir||G71414
  misc_feature (220)..(379): Homolog of NCBI NO: 15233683 NR Description: hydroxynitrile lyase like protein; protein id: [Arabidopsis thaliana] >gi|7485011|pir||G71414
  misc_feature (1)..(218): Homolog of NCBI NO: 15241571 NR Description: serine-type carboxypeptidase II-like protein; id: At5g08260.1, supported by cDNA: gi_13877962, supported by gi_17065641 [Arabidopsis thaliana] >gi|11264740|pir||T50511
  misc_feature (227)..(379): Homolog of NCBI NO: 15241571 NR Description: serine-type carboxypeptidase II-like protein; id: At5g08260.1, supported by cDNA: gi_13877962, supported by gi_17065641 [Arabidopsis thaliana] >gi|11264740|pir||T50511
  misc_feature (1)..(271): Homolog of NCBI NO: 15224082 NR Description: putative serine carboxypeptidase II; protein id: [Arabidopsis thaliana] >gi|25289798|pir||D84631 probable serine
MDLPKEKPLVLWLNGGPGCSSVGYGATQEIGPFLVDTNGNGLNFNPYAWNKEANMLFLESPVGVGFSYSNTSSDYQKLGDDFTARDAYTFLCNWFEKFPEHKENTFYIAGESYAGKYVPELAEVVYDNNNNNKKNGSSFHINLKGILLGNPETSDAEDWRGWVDYAWSHAVISDETHRIITRTCNFSSDNTWSNDECNEAVAEVLKQYHEIDIYSIYTSMPPRLMGGYDPCLDDYARVFYNRADVQKSLHASDGVNLKNWSICNMEIFNNWTGSNPSVLPIYEKLIAGGLRIWVYSGDTDGRVPVLATRYSLNALELPIKTAWRPWYHEKQVSGWLQEYEGLTFATFRGAGHAVPCFKPSSSLAFFSAFLSGVPPPPSR

SEQ ID NO: 91337 - DNA, 1707 bp, Arabidopsis thaliana
  misc_feature (1)..(1707): Ceres Seq. ID no. 12727348
  misc_feature: MA Experiment ID: 20000307 Result: Down-regulated in Transcription
  misc_feature: MA Experiment 20000307 PARAMETER Experiment Name: At_Germinating_Seeds_Sub_P Parameter: Age (hr) Value: 24 vs. 0
  misc_feature: MA Experiment 20000307 PARAMETER Experiment Name: At_Germinating_Seeds_Sub_P Parameter: Organism Value: A. thaliana
  misc_feature: MA Experiment 20000307 PARAMETER Experiment Name: At_Germinating_Seeds_Sub_P Parameter: Plant Line Value: WS
  misc_feature: MA Experiment 20000307 PARAMETER Experiment Name: At_Germinating_Seeds_Sub_P Parameter: Tissue Value: Germinating Seeds
  misc_feature: MA Experiment ID: 20000315 Result: Down-regulated in Transcription
  misc_feature: MA Experiment 20000315 PARAMETER Experiment Name: At_14day_Shoots-Roots_Sub_P Parameter: Age (day) Value: 14
  misc_feature: MA Experiment 20000315 PARAMETER Experiment Name: At_14day_Shoots-Roots_Sub_P Parameter: Organism Value: A. thaliana
  misc_feature: MA Experiment 20000315 PARAMETER Experiment Name: At_14day_Shoots-Roots_Sub_P Parameter: Plant Line Value: WS
  misc_feature: MA Experiment 20000315 PARAMETER Experiment Name: At_14day_Shoots-Roots_Sub_P Parameter: Tissue Value: Shoots vs. Whole Plant
  misc_feature: MA Experiment ID: 20000328 Result: Down-regulated in Transcription
  misc_feature: MA Experiment 20000328 PARAMETER Experiment Name: At_42deg_Heat_Sub_P Parameter: Age (day) Value: 14
  misc_feature: MA Experiment 20000328 PARAMETER Experiment Name: At_42deg_Heat_Sub_P Parameter: Organism Value: A. thaliana
  misc_feature: MA Experiment 20000328 PARAMETER Experiment Name: At_42deg_Heat_Sub_P Parameter: Plant Line Value: WS
  misc_feature: MA Experiment 20000328 PARAMETER Experiment Name: At_42deg_Heat_Sub_P Parameter: Temperature (deg C) Value: 42 vs. 22
  misc_feature: MA Experiment 20000328 PARAMETER Experiment Name: At_42deg_Heat_Sub_P Parameter: Timepoint (hr) Value: 6
  misc_feature: MA Experiment 20000328 PARAMETER Experiment Name: At_42deg_Heat_Sub_P Parameter: Tissue Value: Aerial
gagctggctcttgtcttgtctactttcattacagtgactctgcatgcttcagactgatttcagcaacatgcatgggcttaaaatcagcttctaagactgagatttagtgaccagtgtggtggtgtcttgttctctgttcttgggagaacacaaaggcagtgtggagtctggtaaaatatgatacatggtttgccatctatgaagtctatcaaatcattgaagtcacttgttaaaagaaaaaccaatgctcaagaagtgagtaaatccgggtggaaaatgaagccctttttggctctcatgtgtacagctcttttgatcttttggtataagaccacaaatattcagtttgaacaaacagagatagaagaaacagattatccttttgacatggctaaggaatctgaagcagttaacgataaattaaaaggcttgcctcgtggaatcatacagtctagatcagatcttgaattaaagcctctctggtctagaggtagtctgaggtcaaagggtgtggaaatgactaaccgtaacttgttggcaatacccgtaggacttaagcaaaagggtaacgtcgacgctcttgtaaagaagtttcttcccgcgaatttcacgattgttcttttccattatgatggaaatatggataaatggtgggatctggagtggagttcaaaatccatacatatagttgcacaaaaccagactaaatggtggtttgcaaaacgattcctccatccggatgttgtatccatttatgattatatttttctttgggacgaggatcttggagtagagaatttcaatccagagagatatttgaagatagttaaatcagtgggactggagatatctcaaccggctttggaccacaactcgactgaaatacaccataaaatcactctccgttctaaaacaaagaaatttcataggagagtttacatcaatagaggccataaaagatgttctaatactagctcagatcctccttgcaccggatttgttgaaggaatggctccggtgttttcgaaagctgcttggctttgcacttggaatcttatacagaatgatttggttcatggatggggaatggatatgaaacttgggtactgcgcacagggagaccgaacgaaaaacgtagggattgtggatagcgagtatatccttcatcaaggcattcaaactttaggtgaaagtgttcctgagaagaagaagacggctcgtgatgttgggaccaggagacaaggccatacaacttttgattcaagaaccgagataaggagacaatcgacatgggagcttcaaacttttaaagaacgatggagcaaagcggtagaagaagacattaagtggatcgatccatcgtcatcaagctcgatgacaaagaggaagagtaacggtaataacagaagattaaggcgtggtagtagtagtagtcaccgagtaaagcataagagaagtcaagagacatcaagaacaacaacaacacacaaatagcaagagaaggattattatacacatagatagtgtttttctttatctcattaaccaatttatatatgattatactacttatccttagttagtatatagctttcttggaattgatgaaaaagggttcatattaagatttgtaaaagctcatgtccattatgtactttcatcactataactactttaaaaatcaaataaagagacccactttcctaa

SEQ ID NO: 91338 - protein, 438 aa, Arabidopsis thaliana
  peptide (1)..(438): Ceres Seq. ID no. 12727349
  misc_feature (77)..(395): Pfam Name: Protein of unknown function (DUF707) Pfam Description: Protein of unknown function (DUF707)
  misc_feature (1)..(438): Homolog of NCBI NO: 22329488 NR Description: hypothetical protein; protein id: At1g11170.1, by cDNA: gi_18700104 [Arabidopsis thaliana] At1g11170/T28P6_16 [Arabidopsis thaliana]
  misc_feature (1)..(431): Homolog of NCBI NO: 15219892 NR Description: hypothetical protein; protein id: At1g61240.1 thaliana] >gi|26449863|dbj|BAC42054.1| unknown protein
  misc_feature (71)..(430): Homolog of NCBI NO: 24636978 NR Description: lysine ketoglutarate reductase trans-splicing
  misc_feature (179)..(438): Homolog of NCBI NO: 25402652 NR Description: hypothetical protein [imported] - Arabidopsis >gi|5734733|gb|AAD49998.1|AC007259_11 Hypothetical protein
  misc_feature (33)..(406): Homolog of NCBI NO: 33146749 NR Description: putative lysine ketoglutarate reductase
  misc_feature (96)..(253): Homolog of NCBI NO: 34899756 NR Description: OJ1773_H01.1 [Oryza sativa (japonica
  misc_feature (274)..(406): Homolog of NCBI NO: 34899756 NR Description: OJ1773_H01.1 [Oryza sativa (japonica
  misc_feature (85)..(394): Homolog of NCBI NO: 19386727 NR Description: P0678F11.16 [Oryza sativa (japonica
  misc_feature (111)..(394): Homolog of NCBI NO: 34903420 NR Description: hypothetical protein~similar to Oryza sativa
  misc_feature (85)..(363): Homolog of NCBI NO: 22329525 NR Description: unknown protein; protein id: At1g13000.1, by cDNA: gi_18175818, supported by cDNA: gi_20465546 [Arabidopsis >gi|18175819|gb|AAL59933.1| unknown protein [Arabidopsis
MIHGLPSMKSIKSLKSLVKRKTNAQEVSKSGWKMKPFLALMCTALLIFWYKTTNIQFEQTEIEETDYPFDMAKESEAVNDKLKGLPRGIIQSRSDLELKPLWSRGSLRSKGVEMTNRNLLAIPVGLKQKGNVDALVKKFLPANFTIVLFHYDGNMDKWWDLEWSSKSIHIVAQNQTKWWFAKRFLHPDVVSIYDYIFLWDEDLGVENFNPERYLKIVKSVGLEISQPALDHNSTEIHHKITLRSKTKKFHRRVYINRGHKRCSNTSSDPPCTGFVEGMAPVFSKAAWLCTWNLIQNDLVHGWGMDMKLGYCAQGDRTKNVGIVDSEYILHQGIQTLGESVPEKKKTARDVGTRRQGHTTFDSRTEIRRQSTWELQTFKERWSKAVEEDIKWIDPSSSSSMTKRKSNGNNRRLRRGSSSSHRVKHKRSQETSRTTTTHK

SEQ ID NO: 91339 - protein, 431 aa, Arabidopsis thaliana
  peptide (1)..(431): Ceres Seq. ID no. 12727350
  misc_feature (70)..(388): Pfam Name: Protein of unknown function (DUF707) Pfam Description: Protein of unknown function (DUF707)
  misc_feature (1)..(431): Homolog of NCBI NO: 22329488 NR Description: hypothetical protein; protein id: At1g11170.1, by cDNA: gi_18700104 [Arabidopsis thaliana] At1g11170/T28P6_16 [Arabidopsis thaliana]
  misc_feature (1)..(424): Homolog of NCBI NO: 15219892 NR Description: hypothetical protein; protein id: At1g61240.1 thaliana] >gi|26449863|dbj|BAC42054.1| unknown protein
  misc_feature (64)..(423): Homolog of NCBI NO: 24636978 NR Description: lysine ketoglutarate reductase trans-splicing
  misc_feature (172)..(431): Homolog of NCBI NO: 25402652 NR Description: hypothetical protein [imported] - Arabidopsis >gi|5734733|gb|AAD49998.1|AC007259_11 Hypothetical protein
  misc_feature (26)..(399): Homolog of NCBI NO: 33146749 NR Description: putative lysine ketoglutarate reductase
  misc_feature (89)..(246): Homolog of NCBI NO: 34899756 NR Description: OJ1773_H01.1 [Oryza sativa (japonica
  misc_feature (267)..(399): Homolog of NCBI NO: 34899756 NR Description: OJ1773_H01.1 [Oryza sativa (japonica
  misc_feature (78)..(387): Homolog of NCBI NO: 19386727 NR Description: P0678F11.16 [Oryza sativa (japonica
  misc_feature (104)..(387): Homolog of NCBI NO: 34903420 NR Description: hypothetical protein~similar to Oryza sativa
  misc_feature (78)..(356): Homolog of NCBI NO: 22329525 NR Description: unknown protein; protein id: At1g13000.1, by cDNA: gi_18175818, supported by cDNA: gi_20465546 [Arabidopsis >gi|18175819|gb|AAL59933.1| unknown protein [Arabidopsis
MKSIKSLKSLVKRKTNAQEVSKSGWKMKPFLALMCTALLIFWYKTTNIQFEQTEIEETDYPFDMAKESEAVNDKLKGLPRGIIQSRSDLELKPLWSRGSLRSKGVEMTNRNLLAIPVGLKQKGNVDALVKKFLPANFTIVLFHYDGNMDKWWDLEWSSKSIHIVAQNQTKWWFAKRFLHPDVVSIYDYIFLWDEDLGVENFNPERYLKIVKSVGLEISQPALDHNSTEIHHKITLRSKTKKFHRRVYINRGHKRCSNTSSDPPCTGFVEGMAPVFSKAAWLCTWNLIQNDLVHGWGMDMKLGYCAQGDRTKNVGIVDSEYILHQGIQTLGESVPEKKKTARDVGTRRQGHTTFDSRTEIRRQSTWELQTFKERWSKAVEEDIKWIDPSSSSSMTKRKSNGNNRRLRRGSSSSHRVKHKRSQETSRTTTTHK

SEQ ID NO: 91340 - protein, 405 aa, Arabidopsis thaliana
  peptide (1)..(405): Ceres Seq. ID no. 12727351
  misc_feature (44)..(362): Pfam Name: Protein of unknown function (DUF707) Pfam Description: Protein of unknown function (DUF707)
  misc_feature (1)..(405): Homolog of NCBI NO: 22329488 NR Description: hypothetical protein; protein id: At1g11170.1, by cDNA: gi_18700104 [Arabidopsis thaliana] At1g11170/T28P6_16 [Arabidopsis thaliana]
  misc_feature (1)..(398): Homolog of NCBI NO: 15219892 NR Description: hypothetical protein; protein id: At1g61240.1 thaliana] >gi|26449863|dbj|BAC42054.1| unknown protein
  misc_feature (38)..(397): Homolog of NCBI NO: 24636978 NR Description: lysine ketoglutarate reductase trans-splicing
  misc_feature (146)..(405): Homolog of NCBI NO: 25402652 NR Description: hypothetical protein [imported] - Arabidopsis >gi|5734733|gb|AAD49998.1|AC007259_11 Hypothetical protein
  misc_feature (1)..(373): Homolog of NCBI NO: 33146749 NR Description: putative lysine ketoglutarate reductase
  misc_feature (63)..(220): Homolog of NCBI NO: 34899756 NR Description: OJ1773_H01.1 [Oryza sativa (japonica
  misc_feature (241)..(373): Homolog of NCBI NO: 34899756 NR Description: OJ1773_H01.1 [Oryza sativa (japonica
  misc_feature (52)..(361): Homolog of NCBI NO: 19386727 NR Description: P0678F11.16 [Oryza sativa (japonica
  misc_feature (78)..(361): Homolog of NCBI NO: 34903420 NR Description: hypothetical protein~similar to Oryza sativa
  misc_feature (52)..(330): Homolog of NCBI NO: 22329525 NR Description: unknown protein; protein id: At1g13000.1, by cDNA: gi_18175818, supported by cDNA: gi_20465546 [Arabidopsis >gi|18175819|gb|AAL59933.1| unknown protein [Arabidopsis
MKPFLALMCTALLIFWYKTTNIQFEQTEIEETDYPFDMAKESEAVNDKLKGLPRGIIQSRSDLELKPLWSRGSLRSKGVEMTNRNLLAIPVGLKQKGNVDALVKKFLPANFTIVLFHYDGNMDKWWDLEWSSKSIHIVAQNQTKWWFAKRFLHPDVVSIYDYIFLWDEDLGVENFNPERYLKIVKSVGLEISQPALDHNSTEIHHKITLRSKTKKFHRRVYINRGHKRCSNTSSDPPCTGFVEGMAPVFSKAAWLCTWNLIQNDLVHGWGMDMKLGYCAQGDRTKNVGIVDSEYILHQGIQTLGESVPEKKKTARDVGTRRQGHTTFDSRTEIRRQSTWELQTFKERWSKAVEEDIKWIDPSSSSSMTKRKSNGNNRRLRRGSSSSHRVKHKRSQETSRTTTTHK

SEQ ID NO: 91341 - DNA, 876 bp, Arabidopsis thaliana
  misc_feature (1)..(876): Ceres Seq. ID no. 12727352
  misc_feature: MA Experiment ID: 20000306 Result: Up-regulated in Transcription
  misc_feature: MA Experiment 20000306 PARAMETER Experiment Name: At_Germinating_Seeds_Sub_P Parameter: Age (hr) Value: 6 vs. 0
  misc_feature: MA Experiment 20000306 PARAMETER Experiment Name: At_Germinating_Seeds_Sub_P Parameter: Organism Value: A. thaliana
  misc_feature: MA Experiment 20000306 PARAMETER Experiment Name: At_Germinating_Seeds_Sub_P Parameter: Plant Line Value: WS
  misc_feature: MA Experiment 20000306 PARAMETER Experiment Name: At_Germinating_Seeds_Sub_P Parameter: Tissue Value: Germinating Seeds
  misc_feature: MA Experiment ID: 20000307 Result: Up-regulated in Transcription
  misc_feature: MA Experiment 20000307 PARAMETER Experiment Name: At_Germinating_Seeds_Sub_P Parameter: Age (hr) Value: 24 vs. 0
  misc_feature: MA Experiment 20000307 PARAMETER Experiment Name: At_Germinating_Seeds_Sub_P Parameter: Organism Value: A. thaliana
  misc_feature: MA Experiment 20000307 PARAMETER Experiment Name: At_Germinating_Seeds_Sub_P Parameter: Plant Line Value: WS
  misc_feature: MA Experiment 20000307 PARAMETER Experiment Name: At_Germinating_Seeds_Sub_P Parameter: Tissue Value: Germinating Seeds
  misc_feature: MA Experiment ID: 20000329 Result: Down-regulated in Transcription
  misc_feature: MA Experiment 20000329 PARAMETER Experiment Name: At_4deg_Cold_Sub_P Parameter: Age (day) Value: 14
  misc_feature: MA Experiment 20000329 PARAMETER Experiment Name: At_4deg_Cold_Sub_P Parameter: Organism Value: A. thaliana
  misc_feature: MA Experiment 20000329 PARAMETER Experiment Name: At_4deg_Cold_Sub_P Parameter: Plant Line Value: WS
  misc_feature: MA Experiment 20000329 PARAMETER Experiment Name: At_4deg_Cold_Sub_P Parameter: Temperature (deg C) Value: 4 vs. 22
  misc_feature: MA Experiment 20000329 PARAMETER Experiment Name: At_4deg_Cold_Sub_P Parameter: Timepoint (hr) Value: 6
  misc_feature: MA Experiment 20000329 PARAMETER Experiment Name: At_4deg_Cold_Sub_P Parameter: Tissue Value: Aerial
  misc_feature: MA Experiment ID: 20000355 Result: Down-regulated in Transcription
  misc_feature: MA Experiment 20000355 PARAMETER Experiment Name: At_Siliques_Sub_P Parameter: Age (day) Value: 21
  misc_feature: MA Experiment 20000355 PARAMETER Experiment Name: At_Siliques_Sub_P Parameter: Organism Value: A. thaliana
  misc_feature: MA Experiment 20000355 PARAMETER Experiment Name: At_Siliques_Sub_P Parameter: Plant Line Value: WS
  misc_feature: MA Experiment 20000355 PARAMETER Experiment Name: At_Siliques_Sub_P Parameter: Tissue Value: Less Than 5mm Siliques vs. Whole Plant
atgggtggtcgttacgatcggaacacattcgacgaacaagacgaagtcaatccttttgctaatcctgggagtgttcctgctgcttcgaattccagactatcgcctttgcctcccgaacctgctggttttggttatggtcgtactgttgacattcctcttgacagaccagggtctggtgcacaggatttgaaaaagaaagagaaggagctccaagccaaagaagctgacctaagacgacgagagcaagatcttaaacgaaaacaggatgctgctgcccgagccggaattgttatcgaggcaaaaaactggcctaccttcttcccccttatccaccatgacattgcaaatgaaattctggttcgtctccaaaggctacagtatattgcatttgcaacatatttggggttggttctcgcacttttctggaatatcatcgccgttactaccgcttggatcaaaggagaaggagtaacaatttggcttctcgccgttatttacttcatatcgggtgttccaggaggctatgtgttatggtatcggcctctctaccgtgccttcagaagtgatagtgcattcaactttggatggtttttcttgttctacatgctccacatacttttctgcctctttgctgcagttgctcctcctattgtcttcaaaggaaaatcacttgcgggcatattacctgcaatagatgtgttgagcgctcaggcattggtcgggatcttctacttcattgggtttgggttattctgtcttgaatcagtggttagcatctgggttatacagcaagtatacatgtacttcagaggaagcggaaaagcggatgatatgagacgggatgctgcaagaggagccatgagagctgccatatga

SEQ ID NO: 91342 - protein, 291 aa, Arabidopsis thaliana
  peptide (1)..(291): Ceres Seq. ID no. 12727353
  misc_feature (99)..(273): Pfam Name: SCAMP family Pfam Description: SCAMP family
  misc_feature (1)..(291): Homolog of NCBI NO: 15220305 NR Description: secretory carrier membrane protein, putative;
  misc_feature (1)..(291): Homolog of NCBI NO: 15219893 NR Description: secretory carrier membrane protein; protein id: supported by cDNA: 27197., supported by cDNA: gi_15027862, by cDNA: gi_19310672, supported by cDNA: gi_7109227 [Arabidopsis
  misc_feature (1)..(291): Homolog of NCBI NO: 25402653 NR Description: hypothetical protein [imported] - Arabidopsis >gi|5734732|gb|AAD49997.1|AC007259_10 Hypothetical protein
  misc_feature (1)..(290): Homolog of NCBI NO: 7109232 NR Description: secretory carrier membrane protein [Oryza sativa]
  misc_feature (4)..(291): Homolog of NCBI NO: 15226410 NR Description: putative secretory carrier-associated membrane protein id: At2g20840.1 [Arabidopsis thaliana]
  misc_feature (1)..(290): Homolog of NCBI NO: 34899754 NR Description: putative secretory carrier membrane protein
  misc_feature (1)..(291): Homolog of NCBI NO: 3941289 NR Description: similarity to SCAMP37 [Pisum sativum]
  misc_feature (4)..(291): Homolog of NCBI NO: 18379111 NR Description: expressed protein; protein id: At1g03550.1, by cDNA: 30006. [Arabidopsis thaliana] F21B7.17 [Arabidopsis thaliana] >gi|21592580|gb|AAM64529.1|
  misc_feature (1)..(138): Homolog of NCBI NO: 25404319 NR Description: hypothetical protein F11P17.4 [imported] - thaliana >gi|2443878|gb|AAB71471.1| Unknown protein [Arabidopsis
  misc_feature (203)..(263): Homolog of NCBI NO: 25404319 NR Description: hypothetical protein F11P17.4 [imported] - thaliana >gi|2443878|gb|AAB71471.1| Unknown protein [Arabidopsis
MGGRYDRNTFDEQDEVNPFANPGSVPAASNSRLSPLPPEPAGFGYGRTVDIPLDRPGSGAQDLKKKEKELQAKEADLRRREQDLKRKQDAAARAGIVIEAKNWPTFFPLIHHDIANEILVRLQRLQYIAFATYLGLVLALFWNIIAVTTAWIKGEGVTIWLLAVIYFISGVPGGYVLWYRPLYRAFRSDSAFNFGWFFLFYMLHILFCLFAAVAPPIVFKGKSLAGILPAIDVLSAQALVGIFYFIGFGLFCLESVVSIWVIQQVYMYFRGSGKADDMRRDAARGAMRAAI

SEQ ID NO: 91343 - DNA, 897 bp, Arabidopsis thaliana
  misc_feature (1)..(897): Ceres Seq. ID no. 12727362
  misc_feature: MA Experiment ID: 20000794 Result: Up-regulated in Transcription
  misc_feature: MA Experiment 20000794 PARAMETER Experiment Name: At_Petals_P Parameter: Age (day) Value: 23-25 days
  misc_feature: MA Experiment 20000794 PARAMETER Experiment Name: At_Petals_P Parameter: Plant Line Value: WS
  misc_feature: MA Experiment 20000794 PARAMETER Experiment Name: At_Petals_P Parameter: Tissue Value: Petals vs. Whole plant
  misc_feature: MA Experiment ID: 20001910 Result: Up-regulated in Transcription
  misc_feature: MA Experiment 20001910 PARAMETER Experiment Name: At_Drought_Reproduction_P Parameter: Age (day) Value: 37
  misc_feature: MA Experiment 20001910 PARAMETER Experiment Name: At_Drought_Reproduction_P Parameter: Organism Value: A. thaliana
  misc_feature: MA Experiment 20001910 PARAMETER Experiment Name: At_Drought_Reproduction_P Parameter: Plant Line Value: WS
  misc_feature: MA Experiment 20001910 PARAMETER Experiment Name: At_Drought_Reproduction_P Parameter: Timepoint (day) Value: 7
  misc_feature: MA Experiment 20001910 PARAMETER Experiment Name: At_Drought_Reproduction_P Parameter: Tissue Value: Flowers
  misc_feature: MA Experiment 20001910 PARAMETER Experiment Name: At_Drought_Reproduction_P Parameter: Treatment Value: Drought vs. No Drought
atgaacgatttattctctaattcattcaagaagaaccaggctcaactgggggatgttgaggcaggtcaagaaacgatgaacctcgataaattcttcgaggatgtcgagaatgtgaaggacgacatgaaaggagtcgaggctctttataagaagcttcaagactcaaacgaggagtgcaagacggttcacaatgccaagaaggttaaagagctacgagctaagatggatggagacgtagcaatggtccttaagagggttaaaatcatcaagcagaagctcgaagccttagagaaagcgaatgctaatagccgtaatgtccctggttgtgggcctggttcgtctacggataggactcgatcttctgtggttagcggtctcgggaagaagctcaaagacttgatggatagttttcaaggtctacgtgctcgtatgaacaatgagtataaggaaaccgtagagcgcaggtatttcacaataacaggagaaaaagcagacgagcaaacaatcgataacttgatagcgagcggtgagagcgagaattttctccaaaaagcgattcaagagcaaggaagaggtcaaatcctagacacgatatctgagatccaggagagacatgatgcagtgaaggagatagagaagaatctactggagctgcaccaggttttcttggacatggcagctctagtagaagcgcaagggcaacaattaaacaacatagagagccatgtggcgaaagcgagctcgtttgtgagaagagggactgatcagctccaagatgcgagggaataccaaaagagctcgaggaaatggacttgttacgccatcatcctcttcatcgtcatctttatcctccttctcattccccttctacctcacataatgctcatgttgaagtga

SEQ ID NO: 91344 - protein, 298 aa, Arabidopsis thaliana
  peptide (1)..(298): Ceres Seq. ID no. 12727363
  misc_feature (203)..(265): Pfam Name: SNARE domain Pfam Description: SNARE domain
  misc_feature (1)..(298): Homolog of NCBI NO: 15220328 NR Description: syntaxin SYP125; protein id: At1g11250.1 thaliana] >gi|28380142|sp|Q9SXB0|S125_ARATH Putative syntaxin 125
  misc_feature (1)..(298): Homolog of NCBI NO: 15219900 NR Description: syntaxin SYP124; protein id: At1g61290.1 thaliana] >gi|28380117|sp|O64791|S124_ARATH Putative syntaxin 124
  misc_feature (1)..(295): Homolog of NCBI NO: 15236285 NR Description: syntaxin SYP123; protein id: At4g03330.1, by cDNA: 37727. [Arabidopsis thaliana]
  misc_feature (1)..(291): Homolog of NCBI NO: 4206787 NR Description: syntaxin-related protein Nt-syr1 [Nicotiana
  misc_feature (1)..(290): Homolog of NCBI NO: 15229865 NR Description: syntaxin SYP121; protein id: At3g11820.1, by cDNA: 38899., supported by cDNA: gi_20260503, supported by gi_4206788 [Arabidopsis thaliana]
  misc_feature (1)..(287): Homolog of NCBI NO: 11358871 NR Description: syntaxin synt4 [imported] - Arabidopsis thaliana
  misc_feature (1)..(287): Homolog of NCBI NO: 15231205 NR Description: syntaxin SYP122; protein id: At3g52400.1, by cDNA: 37248., supported by cDNA: gi_15292946, supported by gi_20259662 [Arabidopsis thaliana]
  misc_feature (1)..(289): Homolog of NCBI NO: 5912543 NR Description: Knolle [Capsicum annuum]
  misc_feature (1)..(289): Homolog of NCBI NO: 28974542 NR Description: knolle [Antirrhinum majus]
  misc_feature (1)..(290): Homolog of NCBI NO: 33146794 NR Description: putative syntaxin-related protein [Oryza sativa
MNDLFSNSFKKNQAQLGDVEAGQETMNLDKFFEDVENVKDDMKGVEALYKKLQDSNEECKTVHNAKKVKELRAKMDGDVAMVLKRVKIIKQKLEALEKANANSRNVPGCGPGSSTDRTRSSVVSGLGKKLKDLMDSFQGLRARMNNEYKETVERRYFTITGEKADEQTIDNLIASGESENFLQKAIQEQGRGQILDTISEIQERHDAVKEIEKNLLELHQVFLDMAALVEAQGQQLNNIESHVAKASSFVRRGTDQLQDAREYQKSSRKWTCYAIILFIVIFILLLIPLLPHIMLMLK

SEQ ID NO: 91345 - protein, 273 aa, Arabidopsis thaliana
  peptide (1)..(273): Ceres Seq. ID no. 12727364
  misc_feature (178)..(240): Pfam Name: SNARE domain Pfam Description: SNARE domain
  misc_feature (1)..(273): Homolog of NCBI NO: 15220328 NR Description: syntaxin SYP125; protein id: At1g11250.1 thaliana] >gi|28380142|sp|Q9SXB0|S125_ARATH Putative syntaxin 125
  misc_feature (1)..(273): Homolog of NCBI NO: 15219900 NR Description: syntaxin SYP124; protein id: At1g61290.1 thaliana] >gi|28380117|sp|O64791|S124_ARATH Putative syntaxin 124
  misc_feature (1)..(270): Homolog of NCBI NO: 15236285 NR Description: syntaxin SYP123; protein id: At4g03330.1, by cDNA: 37727. [Arabidopsis thaliana]
  misc_feature (1)..(266): Homolog of NCBI NO: 4206787 NR Description: syntaxin-related protein Nt-syr1 [Nicotiana
  misc_feature (1)..(265): Homolog of NCBI NO: 15229865 NR Description: syntaxin SYP121; protein id: At3g11820.1, by cDNA: 38899., supported by cDNA: gi_20260503, supported by gi_4206788 [Arabidopsis thaliana]
  misc_feature (1)..(262): Homolog of NCBI NO: 11358871 NR Description: syntaxin synt4 [imported] - Arabidopsis thaliana
  misc_feature (1)..(262): Homolog of NCBI NO: 15231205 NR Description: syntaxin SYP122; protein id: At3g52400.1, by cDNA: 37248., supported by cDNA: gi_15292946, supported by gi_20259662 [Arabidopsis thaliana]
  misc_feature (1)..(264): Homolog of NCBI NO: 5912543 NR Description: Knolle [Capsicum annuum]
  misc_feature (1)..(264): Homolog of NCBI NO: 28974542 NR Description: knolle [Antirrhinum majus]
  misc_feature (1)..(265): Homolog of NCBI NO: 33146794 NR Description: putative syntaxin-related protein [Oryza sativa
MNLDKFFEDVENVKDDMKGVEALYKKLQDSNEECKTVHNAKKVKELRAKMDGDVAMVLKRVKIIKQKLEALEKANANSRNVPGCGPGSSTDRTRSSVVSGLGKKLKDLMDSFQGLRARMNNEYKETVERRYFTITGEKADEQTIDNLIASGESENFLQKAIQEQGRGQILDTISEIQERHDAVKEIEKNLLELHQVFLDMAALVEAQGQQLNNIESHVAKASSFVRRGTDQLQDAREYQKSSRKWTCYAIILFIVIFILLLIPLLPHIMLMLK

SEQ ID NO: 91346 - protein, 257 aa, Arabidopsis thaliana
  peptide (1)..(257): Ceres Seq. ID no. 12727365
  misc_feature (162)..(224): Pfam Name: SNARE domain Pfam Description: SNARE domain
  misc_feature (1)..(257): Homolog of NCBI NO: 15220328 NR Description: syntaxin SYP125; protein id: At1g11250.1 thaliana] >gi|28380142|sp|Q9SXB0|S125_ARATH Putative syntaxin 125
  misc_feature (1)..(257): Homolog of NCBI NO: 15219900 NR Description: syntaxin SYP124; protein id: At1g61290.1 thaliana] >gi|28380117|sp|O64791|S124_ARATH Putative syntaxin 124
  misc_feature (1)..(254): Homolog of NCBI NO: 15236285 NR Description: syntaxin SYP123; protein id: At4g03330.1, by cDNA: 37727. [Arabidopsis thaliana]
  misc_feature (1)..(250): Homolog of NCBI NO: 4206787 NR Description: syntaxin-related protein Nt-syr1 [Nicotiana
  misc_feature (1)..(249): Homolog of NCBI NO: 15229865 NR Description: syntaxin SYP121; protein id: At3g11820.1, by cDNA: 38899., supported by cDNA: gi_20260503, supported by gi_4206788 [Arabidopsis thaliana]
  misc_feature (1)..(246): Homolog of NCBI NO: 11358871 NR Description: syntaxin synt4 [imported] - Arabidopsis thaliana
  misc_feature (1)..(246): Homolog of NCBI NO: 15231205 NR Description: syntaxin SYP122; protein id: At3g52400.1, by cDNA: 37248., supported by cDNA: gi_15292946, supported by gi_20259662 [Arabidopsis thaliana]
  misc_feature (1)..(248): Homolog of NCBI NO: 5912543 NR Description: Knolle [Capsicum annuum]
  misc_feature (1)..(248): Homolog of NCBI NO: 28974542 NR Description: knolle [Antirrhinum majus]
  misc_feature (1)..(249): Homolog of NCBI NO: 33146794 NR Description: putative syntaxin-related protein [Oryza sativa
MKGVEALYKKLQDSNEECKTVHNAKKVKELRAKMDGDVAMVLKRVKIIKQKLEALEKANANSRNVPGCGPGSSTDRTRSSVVSGLGKKLKDLMDSFQGLRARMNNEYKETVERRYFTITGEKADEQTIDNLIASGESENFLQKAIQEQGRGQILDTISEIQERHDAVKEIEKNLLELHQVFLDMAALVEAQGQQLNNIESHVAKASSFVRRGTDQLQDAREYQKSSRKWTCYAIILFIVIFILLLIPLLPHIMLMLK

SEQ ID NO: 91347 - DNA, 2493 bp, Arabidopsis thaliana
  misc_feature (1)..(2493): Ceres Seq. ID no. 12727378
  misc_feature: MA Experiment ID: 20000166 Result: Down-regulated in Transcription
  misc_feature: MA Experiment 20000166 PARAMETER Experiment Name: At_100uM_ABA_P Parameter: Age (day) Value: 14
  misc_feature: MA Experiment 20000166 PARAMETER Experiment Name: At_100uM_ABA_P Parameter: Organism Value: A. thaliana
  misc_feature: MA Experiment 20000166 PARAMETER Experiment Name: At_100uM_ABA_P Parameter: Plant Line Value: WS
  misc_feature: MA Experiment 20000166 PARAMETER Experiment Name: At_100uM_ABA_P Parameter: Timepoint (hr) Value: 1
  misc_feature: MA Experiment 20000166 PARAMETER Experiment Name: At_100uM_ABA_P Parameter: Tissue Value: Aerial
  misc_feature: MA Experiment 20000166 PARAMETER Experiment Name: At_100uM_ABA_P Parameter: Treatment Value: 100uM ABA vs. No Treatment
  misc_feature: MA Experiment ID: 20000173 Result: Down-regulated in Transcription
  misc_feature: MA Experiment 20000173 PARAMETER Experiment Name: At_42deg_Heat_P Parameter: Age (day) Value: 14
  misc_feature: MA Experiment 20000173 PARAMETER Experiment Name: At_42deg_Heat_P Parameter: Organism Value: A. thaliana
  misc_feature: MA Experiment 20000173 PARAMETER Experiment Name: At_42deg_Heat_P Parameter: Plant Line Value: WS
  misc_feature: MA Experiment 20000173 PARAMETER Experiment Name: At_42deg_Heat_P Parameter: Temperature (deg C) Value: 42 vs. 22
  misc_feature: MA Experiment 20000173 PARAMETER Experiment Name: At_42deg_Heat_P Parameter: Timepoint (hr) Value: 6
  misc_feature: MA Experiment 20000173 PARAMETER Experiment Name: At_42deg_Heat_P Parameter: Tissue Value: Aerial
  misc_feature: MA Experiment ID: 20000184 Result: Down-regulated in Transcription
  misc_feature: MA Experiment 20000184 PARAMETER Experiment Name: At_Shoots__P Parameter: Age (day) Value: 7
  misc_feature: MA Experiment 20000184 PARAMETER Experiment Name: At_Shoots__P Parameter: Tissue Value: Shoots vs. Whole Plant
  misc_feature: MA Experiment ID: 20000185 Result: Down-regulated in Transcription
  misc_feature: MA Experiment 20000185 PARAMETER Experiment Name: At_Roots__P Parameter: Age (day) Value: 7 vs. 21
  misc_feature: MA Experiment 20000185 PARAMETER Experiment Name: At_Roots__P Parameter: Organism Value: A. thaliana
  misc_feature: MA Experiment 20000185 PARAMETER Experiment Name: At_Roots__P Parameter: Tissue Value: Roots vs. Whole Plant
  misc_feature: MA Experiment ID: 20000234 Result: Down-regulated in Transcription
  misc_feature: MA Experiment 20000234 PARAMETER Experiment Name: At_Siliques_P Parameter: Age (day) Value: 21
  misc_feature: MA Experiment 20000234 PARAMETER Experiment Name: At_Siliques_P Parameter: Organism Value: A. thaliana
  misc_feature: MA Experiment 20000234 PARAMETER Experiment Name: At_Siliques_P Parameter: Plant Line Value: WS
  misc_feature: MA Experiment 20000234 PARAMETER Experiment Name: At_Siliques_P Parameter: Tissue Value: Less Than 5mm Siliques vs. Whole Plant
  misc_feature: MA Experiment ID: 20000264 Result: Down-regulated in Transcription
  misc_feature: MA Experiment 20000264 PARAMETER Experiment Name: At_Open_Flower_P Parameter: Age (day) Value: 21
  misc_feature: MA Experiment 20000264 PARAMETER Experiment Name: At_Open_Flower_P Parameter: Plant Line Value: WS
  misc_feature: MA Experiment 20000264 PARAMETER Experiment Name: At_Open_Flower_P Parameter: Tissue Value: Open Flower vs. Whole Plant
  misc_feature: MA Experiment ID: 20000265 Result: Down-regulated in Transcription
  misc_feature: MA Experiment 20000265 PARAMETER Experiment Name: At_Open_Flower_P Parameter: Age (day) Value: 21
  misc_feature: MA Experiment 20000265 PARAMETER Experiment Name: At_Open_Flower_P Parameter: Plant Line Value: WS
  misc_feature: MA Experiment 20000265 PARAMETER Experiment Name: At_Open_Flower_P Parameter: Tissue Value: Closed Flower vs. Whole Plant
  misc_feature: MA Experiment ID: 20000286 Result: Down-regulated in Transcription
  misc_feature: MA Experiment 20000286 PARAMETER Experiment Name: At_Open_Flower_P Parameter: Age (day) Value: 21
  misc_feature: MA Experiment 20000286 PARAMETER Experiment Name: At_Open_Flower_P Parameter: Plant Line Value: WS
  misc_feature: MA Experiment 20000286 PARAMETER Experiment Name: At_Open_Flower_P Parameter: Tissue Value: Half Open vs. Whole Plant
  misc_feature: MA Experiment ID: 20000439 Result: Down-regulated in Transcription
  misc_feature: MA Experiment 20000439 PARAMETER Experiment Name: At_Roots__P Parameter: Age (day) Value: 14 vs. 21
  misc_feature: MA Experiment 20000439 PARAMETER Experiment Name: At_Roots__P Parameter: Organism Value: A. thaliana
  misc_feature: MA Experiment 20000439 PARAMETER Experiment Name: At_Roots__P Parameter: Tissue Value: Roots vs. Whole Plant
  misc_feature: MA Experiment ID: 20000794 Result: Down-regulated in Transcription
  misc_feature: MA Experiment 20000794 PARAMETER Experiment Name: At_Petals_P Parameter: Age (day) Value: 23-25 days
  misc_feature: MA Experiment 20000794 PARAMETER Experiment Name: At_Petals_P Parameter: Plant Line Value: WS
  misc_feature: MA Experiment 20000794 PARAMETER Experiment Name: At_Petals_P Parameter: Tissue Value: Petals vs. Whole plant
  misc_feature: MA Experiment ID: 20001555 Result: Down-regulated in Transcription
  misc_feature: MA Experiment 20001555 PARAMETER Experiment Name: At_Drought_Soil_Dry_P Parameter: Age (day) Value: 24
  misc_feature: MA Experiment 20001555 PARAMETER Experiment Name: At_Drought_Soil_Dry_P Parameter: Organism Value: A. thaliana
  misc_feature: MA Experiment 20001555 PARAMETER Experiment Name: At_Drought_Soil_Dry_P Parameter: Plant Line Value: WS
  misc_feature: MA Experiment 20001555 PARAMETER Experiment Name: At_Drought_Soil_Dry_P Parameter: Post Timepoint (hr) Value: None
  misc_feature: MA Experiment 20001555 PARAMETER Experiment Name: At_Drought_Soil_Dry_P Parameter: Post-Treatment Value: None
  misc_feature: MA Experiment 20001555 PARAMETER Experiment Name: At_Drought_Soil_Dry_P Parameter: Timepoint (day) Value: 10
  misc_feature: MA Experiment 20001555 PARAMETER Experiment Name: At_Drought_Soil_Dry_P Parameter: Treatment Value: Drought vs. No Drought
  misc_feature: MA Experiment ID: 20001904 Result: Down-regulated in Transcription
  misc_feature: MA Experiment 20001904 PARAMETER Experiment Name: At_Drought_Reproduction_P Parameter: Age (day) Value: 37
  misc_feature: MA Experiment 20001904 PARAMETER Experiment Name: At_Drought_Reproduction_P Parameter: Organism Value: A. thaliana
  misc_feature: MA Experiment 20001904 PARAMETER Experiment Name: At_Drought_Reproduction_P Parameter: Plant Line Value: WS
  misc_feature: MA Experiment 20001904 PARAMETER Experiment Name: At_Drought_Reproduction_P Parameter: Timepoint (day) Value: 7
  misc_feature: MA Experiment 20001904 PARAMETER Experiment Name: At_Drought_Reproduction_P Parameter: Tissue Value: Rosettes
  misc_feature: MA Experiment 20001904 PARAMETER Experiment Name: At_Drought_Reproduction_P Parameter: Treatment Value: Drought vs. No Drought
atgggttgtttgctaattcttcttcttacattgatttgcttttccttgaggctttgtttggctactgatgtaatcacgttttctagcgagttcagggactctgagactgtcgtctccaaccacagcaccttcaggtttggtttcttcagcccggttaactccacaggacgttatgcagggatatggttcaataatattcctgttcaaaccgtggtttgggtagcaaacagtaacagcccgatcaatgactcttccggaatggtttccatatccaaggaagggaatcttgttgttatggatggtcgcggacaggttcactggtccaccaatgtcttggtgccggtggctgctaacaccttctatgcccggttgctgaatacagggaacctcgtgctgctaggaactactaatactggggatgagattctttgggagagctttgagcatcctcaaaacatatatttgccaacaatgagtcttgctactgacacgaaaacaggcaggagccttaagctaagatcttggaaaagcccgtttgatccatcgcctggacgatactctgcaggtttgattcctctgccatttccagaacttgttgtctggaaagatgatcttctgatgtggcgtagcggtccatggaatggtcaatacttcattgggttaccaaatatggattaccgtatcaatcttttcgagttaacccttagtagtgacaatcgaggatctgtctccatgtcctatgctggaaatactttgttgtatcattttctcttggactccgaaggaagcgtgtttcagagagattggaacgtggctatccaagaatggaagacctggttaaaggtcccatcgaccaagtgtgatacatacgccacatgtggccaattcgctagttgcagattcaatcccgggtcgactccgccttgcatgtgcattagagggtttaagccacagagttacgcggagtggaacaacggaaactggactcagggatgcgtaagaaaggcaccattgcagtgcgaaagtcgagacaacaacgatggaagtagaaaaagtgatggatttgtgagagtgcaaaagatgaaagtgccccacaatccacaacgatctggagccaatgaacaagactgtcctgagagctgtctgaagaactgttcttgtacggcttactcattcgacagagggattggttgtcttctttggagcggaaacttgatggatatgcaggagttttctggcactggcgtggttttttacattcgtcttgcagattcagagtttaaaaagcggaccaatcggtcaattgtgatcacagtaactttgctagtaggcgcttttttgtttgcagggactgttgtcttagcactgtggaagatcgctaagcatagagagaagaacagaaacacaaggctacttaatgagagaatggaagctttaagtagtaatgacgttggtgcaatccttgtgaatcaatacaagcttaaagagctaccactgttcgagttccaagtgttagcagtggcgaccaacaatttttctatcacaaacaagctcggacaaggaggatttggtgctgtttacaaggggaggttacaagaagggctcgatatcgctgtgaagaggctttcgcgaacatcgggacaaggagtcgaggagtttgtgaatgaagtggtcgtgatctcaaagctgcaacaccggaatctcgtgagattgcttggtttctgcattgaaggagaagagaggatgttggtctatgagttcatgccagagaattgtttagacgcatatctatttgacccggtgaagcaaagacttcttgactggaagacgcggtttaacataatcgatgggatttgcagaggtcttatgtaccttcacagagattcaaggctgaagatcatacacagagatctaaaagcaagcaatattttgttagatgagaatctaaacccgaagatatccgactttgggctggctaggattttccaggggaatgaggatgaagtaagcaccgtaagagtggttggaacatacggttatatggcacccgaatatgcaatgggagggttgttctcagagaaatctgacgttttcagcttaggagtcatactcttagagattgtgagtggaagaagaaactcaagcttttacaatgatgggcagaatccaaatctttcagcttatgcatggaaactctggaacaccggggaagatattgctcttgtggatccggtcatctttgaagagtgttttgaaaatgaaatacgcagatgtgtgcacgtaggactattgtgtgtacaagatcacgcaaatgataggccgagcgttgcaacggtgatttggatgctaagtagcgagaactcaaaccttccagagccaaagcaacctgcatttatacctagaaggggcacttcagaagttgaatcctcgggacaaagcgacccaagagcatcgatcaacaatgtgagcctcacaaaaataacaggacgttag

SEQ ID NO: 91348 - protein, 830 aa, Arabidopsis thaliana
  peptide (1)..(830): Ceres Seq. ID no. 12727379
  misc_feature (68)..(182): Pfam Name: D-mannose binding lectin Pfam Description: D-mannose binding lectin
  misc_feature (5)..(830): Homolog of NCBI NO: 15220348 NR Description: receptor-like protein kinase, putative; protein
  misc_feature (5)..(582): Homolog of NCBI NO: 25287698 NR Description: hypothetical protein [imported] - Arabidopsis
  misc_feature (628)..(830): Homolog of NCBI NO: 25287698 NR Description: hypothetical protein [imported] - Arabidopsis
  misc_feature (6)..(830): Homolog of NCBI NO: 25287696 NR Description: hypothetical protein [imported] - Arabidopsis
  misc_feature (6)..(487): Homolog of NCBI NO: 15220338 NR Description: serine/threonine kinase, putative; protein id:
  misc_feature (422)..(829): Homolog of NCBI NO: 15220338 NR Description: serine/threonine kinase, putative; protein id:
  misc_feature (5)..(830): Homolog of NCBI NO: 15220338 NR Description: serine/threonine kinase, putative; protein id:
  misc_feature (5)..(830): Homolog of NCBI NO: 25287697 NR Description: hypothetical protein [imported] - Arabidopsis
  misc_feature (9)..(830): Homolog of NCBI NO: 7434416 NR Description: serine/threonine kinase (EC 2.7.1.-) BRLK - wild >gi|2181190|emb|CAA73134.1| serine/threonine kinase [Brassica
  misc_feature (5)..(830): Homolog of NCBI NO: 15234429 NR Description: serine/threonine kinase - like protein; protein
MGCLLILLLTLICFSLRLCLATDVITFSSEFRDSETVVSNHSTFRFGFFSPVNSTGRYAGIWFNNIPVQTVVWVANSNSPINDSSGMVSISKEGNLVVMDGRGQVHWSTNVLVPVAANTFYARLLNTGNLVLLGTTNTGDEILWESFEHPQNIYLPTMSLATDTKTGRSLKLRSWKSPFDPSPGRYSAGLIPLPFPELVVWKDDLLMWRSGPWNGQYFIGLPNMDYRINLFELTLSSDNRGSVSMSYAGNTLLYHFLLDSEGSVFQRDWNVAIQEWKTWLKVPSTKCDTYATCGQFASCRFNPGSTPPCMCIRGFKPQSYAEWNNGNWTQGCVRKAPLQCESRDNNDGSRKSDGFVRVQKMKVPHNPQRSGANEQDCPESCLKNCSCTAYSFDRGIGCLLWSGNLMDMQEFSGTGVVFYIRLADSEFKKRTNRSIVITVTLLVGAFLFAGTVVLALWKIAKHREKNRNTRLLNERMEALSSNDVGAILVNQYKLKELPLFEFQVLAVATNNFSITNKLGQGGFGAVYKGRLQEGLDIAVKRLSRTSGQGVEEFVNEVVVISKLQHRNLVRLLGFCIEGEERMLVYEFMPENCLDAYLFDPVKQRLLDWKTRFNIIDGICRGLMYLHRDSRLKIIHRDLKASNILLDENLNPKISDFGLARIFQGNEDEVSTVRVVGTYGYMAPEYAMGGLFSEKSDVFSLGVILLEIVSGRRNSSFYNDGQNPNLSAYAWKLWNTGEDIALVDPVIFEECFENEIRRCVHVGLLCVQDHANDRPSVATVIWMLSSENSNLPEPKQPAFIPRRGTSEVESSGQSDPRASINNVSLTKITGR

SEQ ID NO: 91349 - protein, 744 aa, Arabidopsis thaliana
  peptide (1)..(744): Ceres Seq. ID no. 12727380
  misc_feature (1)..(96): Pfam Name: D-mannose binding lectin Pfam Description: D-mannose binding lectin
  misc_feature (1)..(744): Homolog of NCBI NO: 15220348 NR Description: receptor-like protein kinase, putative; protein
  misc_feature (1)..(496): Homolog of NCBI NO: 25287698 NR Description: hypothetical protein [imported] - Arabidopsis
  misc_feature (542)..(744): Homolog of NCBI NO: 25287698 NR Description: hypothetical protein [imported] - Arabidopsis
  misc_feature (1)..(744): Homolog of NCBI NO: 25287696 NR Description: hypothetical protein [imported] - Arabidopsis
  misc_feature (1)..(401): Homolog of NCBI NO: 15220338 NR Description: serine/threonine kinase, putative; protein id:
  misc_feature (336)..(743): Homolog of NCBI NO: 15220338 NR Description: serine/threonine kinase, putative; protein id:
  misc_feature (1)..(744): Homolog of NCBI NO: 15220338 NR Description: serine/threonine kinase, putative; protein id:
  misc_feature (1)..(744): Homolog of NCBI NO: 25287697 NR Description: hypothetical protein [imported] - Arabidopsis
  misc_feature (1)..(744): Homolog of NCBI NO: 7434416 NR Description: serine/threonine kinase (EC 2.7.1.-) BRLK - wild >gi|2181190|emb|CAA73134.1| serine/threonine kinase [Brassica
  misc_feature (1)..(744): Homolog of NCBI NO: 15234429 NR Description: serine/threonine kinase - like protein; protein
MVSISKEGNLVVMDGRGQVHWSTNVLVPVAANTFYARLLNTGNLVLLGTTNTGDEILWESFEHPQNIYLPTMSLATDTKTGRSLKLRSWKSPFDPSPGRYSAGLIPLPFPELVVWKDDLLMWRSGPWNGQYFIGLPNMDYRINLFELTLSSDNRGSVSMSYAGNTLLYHFLLDSEGSVFQRDWNVAIQEWKTWLKVPSTKCDTYATCGQFASCRFNPGSTPPCMCIRGFKPQSYAEWNNGNWTQGCVRKAPLQCESRDNNDGSRKSDGFVRVQKMKVPHNPQRSGANEQDCPESCLKNCSCTAYSFDRGIGCLLWSGNLMDMQEFSGTGVVFYIRLADSEFKKRTNRSIVITVTLLVGAFLFAGTVVLALWKIAKHREKNRNTRLLNERMEALSSNDVGAILVNQYKLKELPLFEFQVLAVATNNFSITNKLGQGGFGAVYKGRLQEGLDIAVKRLSRTSGQGVEEFVNEVVVISKLQHRNLVRLLGFCIEGEERMLVYEFMPENCLDAYLFDPVKQRLLDWKTRFNIIDGICRGLMYLHRDSRLKIIHRDLKASNILLDENLNPKISDFGLARIFQGNEDEVSTVRVVGTYGYMAPEYAMGGLFSEKSDVFSLGVILLEIVSGRRNSSFYNDGQNPNLSAYAWKLWNTGEDIALVDPVIFEECFENEIRRCVHVGLLCVQDHANDRPSVATVIWMLSSENSNLPEPKQPAFIPRRGTSEVESSGQSDPRASINNVSLTKITGR

SEQ ID NO: 91350 - protein, 732 aa, Arabidopsis thaliana
  peptide (1)..(732): Ceres Seq. ID no. 12727381
  misc_feature (1)..(84): Pfam Name: D-mannose binding lectin Pfam Description: D-mannose binding lectin
  misc_feature (1)..(732): Homolog of NCBI NO: 15220348 NR Description: receptor-like protein kinase, putative; protein
  misc_feature (1)..(484): Homolog of NCBI NO: 25287698 NR Description: hypothetical protein [imported] - Arabidopsis
  misc_feature (530)..(732): Homolog of NCBI NO: 25287698 NR Description: hypothetical protein [imported] - Arabidopsis
  misc_feature (1)..(732): Homolog of NCBI NO: 25287696 NR Description: hypothetical protein [imported] - Arabidopsis
  misc_feature (1)..(389): Homolog of NCBI NO: 15220338 NR Description: serine/threonine kinase, putative; protein id:
  misc_feature (324)..(731): Homolog of NCBI NO: 15220338 NR Description: serine/threonine kinase, putative; protein id:
  misc_feature (1)..(732): Homolog of NCBI NO: 15220338 NR Description: serine/threonine kinase, putative; protein id:
  misc_feature (1)..(732): Homolog of NCBI NO: 25287697 NR Description: hypothetical protein [imported] - Arabidopsis
  misc_feature (1)..(732): Homolog of NCBI NO: 7434416 NR Description: serine/threonine kinase (EC 2.7.1.-) BRLK - wild >gi|2181190|emb|CAA73134.1| serine/threonine kinase [Brassica
  misc_feature (1)..(732): Homolog of NCBI NO: 15234429 NR Description: serine/threonine kinase - like protein; protein
MDGRGQVHWSTNVLVPVAANTFYARLLNTGNLVLLGTTNTGDEILWESFEHPQNIYLPTMSLATDTKTGRSLKLRSWKSPFDPSPGRYSAGLIPLPFPELVVWKDDLLMWRSGPWNGQYFIGLPNMDYRINLFELTLSSDNRGSVSMSYAGNTLLYHFLLDSEGSVFQRDWNVAIQEWKTWLKVPSTKCDTYATCGQFASCRFNPGSTPPCMCIRGFKPQSYAEWNNGNWTQGCVRKAPLQCESRDNNDGSRKSDGFVRVQKMKVPHNPQRSGANEQDCPESCLKNCSCTAYSFDRGIGCLLWSGNLMDMQEFSGTGVVFYIRLADSEFKKRTNRSIVITVTLLVGAFLFAGTVVLALWKIAKHREKNRNTRLLNERMEALSSNDVGAILVNQYKLKELPLFEFQVLAVATNNFSITNKLGQGGFGAVYKGRLQEGLDIAVKRLSRTSGQGVEEFVNEVVVISKLQHRNLVRLLGFCIEGEERMLVYEFMPENCLDAYLFDPVKQRLLDWKTRFNIIDGICRGLMYLHRDSRLKIIHRDLKASNILLDENLNPKISDFGLARIFQGNEDEVSTVRVVGTYGYMAPEYAMGGLFSEKSDVFSLGVILLEIVSGRRNSSFYNDGQNPNLSAYAWKLWNTGEDIALVDPVIFEECFENEIRRCVHVGLLCVQDHANDRPSVATVIWMLSSENSNLPEPKQPAFIPRRGTSEVESSGQSDPRASINNVSLTKITGR

SEQ ID NO: 91351 - DNA, 1059 bp, Arabidopsis thaliana
  misc_feature (1)..(1059): Ceres Seq. ID no. 12727382
  misc_feature: MA Experiment ID: 20000173 Result: Down-regulated in Transcription
  misc_feature: MA Experiment 20000173 PARAMETER Experiment Name: At_42deg_Heat_P Parameter: Age (day) Value: 14
  misc_feature: MA Experiment 20000173 PARAMETER Experiment Name: At_42deg_Heat_P Parameter: Organism Value: A. thaliana
  misc_feature: MA Experiment 20000173 PARAMETER Experiment Name: At_42deg_Heat_P Parameter: Plant Line Value: WS
  misc_feature: MA Experiment 20000173 PARAMETER Experiment Name: At_42deg_Heat_P Parameter: Temperature (deg C) Value: 42 vs. 22
  misc_feature: MA Experiment 20000173 PARAMETER Experiment Name: At_42deg_Heat_P Parameter: Timepoint (hr) Value: 6
  misc_feature: MA Experiment 20000173 PARAMETER Experiment Name: At_42deg_Heat_P Parameter: Tissue Value: Aerial
  misc_feature: MA Experiment ID: 20000227 Result: Down-regulated in Transcription
  misc_feature: MA Experiment 20000227 PARAMETER Experiment Name: At_Root-Tips-vs-Tops_P Parameter: Tissue Value: Root Tips vs. Root Tops
  misc_feature: MA Experiment ID: 20000264 Result: Up-regulated in Transcription
  misc_feature: MA Experiment 20000264 PARAMETER Experiment Name: At_Open_Flower_P Parameter: Age (day) Value: 21
  misc_feature: MA Experiment 20000264 PARAMETER Experiment Name: At_Open_Flower_P Parameter: Plant Line Value: WS
  misc_feature: MA Experiment 20000264 PARAMETER Experiment Name: At_Open_Flower_P Parameter: Tissue Value: Open Flower vs. Whole Plant
  misc_feature: MA Experiment ID: 20000265 Result: Up-regulated in Transcription
  misc_feature: MA Experiment 20000265 PARAMETER Experiment Name: At_Open_Flower_P Parameter: Age (day) Value: 21
  misc_feature: MA Experiment 20000265 PARAMETER Experiment Name: At_Open_Flower_P Parameter: Plant Line Value: WS
  misc_feature: MA Experiment 20000265 PARAMETER Experiment Name: At_Open_Flower_P Parameter: Tissue Value: Closed Flower vs. Whole Plant
  misc_feature: MA Experiment ID: 20000269 Result: Down-regulated in Transcription
  misc_feature: MA Experiment 20000269 PARAMETER Experiment Name: At_1mM_KNO3_L-vs-H_Roots_P Parameter: Age (day) Value: 7,10,12
  misc_feature: MA Experiment 20000269 PARAMETER Experiment Name: At_1mM_KNO3_L-vs-H_Roots_P Parameter: Organism Value: A. thaliana
  misc_feature: MA Experiment 20000269 PARAMETER Experiment Name: At_1mM_KNO3_L-vs-H_Roots_P Parameter: Plant Line Value: WS
  misc_feature: MA Experiment 20000269 PARAMETER Experiment Name: At_1mM_KNO3_L-vs-H_Roots_P Parameter: Timepoint (day) Value: 7,10,12
  misc_feature: MA Experiment 20000269 PARAMETER Experiment Name: At_1mM_KNO3_L-vs-H_Roots_P Parameter: Tissue Value: Roots
  misc_feature: MA Experiment 20000269 PARAMETER Experiment Name: At_1mM_KNO3_L-vs-H_Roots_P Parameter: Treatment Value: 1mM KNO3 vs. 50mM KNO3
  misc_feature: MA Experiment ID: 20000439 Result: Up-regulated in Transcription
  misc_feature: MA Experiment 20000439 PARAMETER Experiment Name: At_Roots__P Parameter: Age (day) Value: 14 vs. 21
  misc_feature: MA Experiment 20000439 PARAMETER Experiment Name: At_Roots__P Parameter: Organism Value: A. thaliana
  misc_feature: MA Experiment 20000439 PARAMETER Experiment Name: At_Roots__P Parameter: Tissue Value: Roots vs. Whole Plant
  misc_feature: MA Experiment ID: 20000441 Result: Down-regulated in Transcription
  misc_feature: MA Experiment 20000441 PARAMETER Experiment Name: At_1uM_BR-BRZ__P Parameter: Tissue Value: Shoot Apices
  misc_feature: MA Experiment 20000441 PARAMETER Experiment Name: At_1uM_BR-BRZ__P Parameter: Treatment Value: 1uM BR vs. No Treatment
  misc_feature: MA Experiment ID: 20000574 Result: Down-regulated in Transcription
  misc_feature: MA Experiment 20000574 PARAMETER Experiment Name: At_100uM_ABA_Mutants__P Parameter: Organism Value: A. thaliana
  misc_feature: MA Experiment 20000574 PARAMETER Experiment Name: At_100uM_ABA_Mutants__P Parameter: Plant Line Value: CS23 vs. Ler wt
  misc_feature: MA Experiment 20000574 PARAMETER Experiment Name: At_100uM_ABA_Mutants__P Parameter: Timepoint (hr) Value: N/A
  misc_feature: MA Experiment 20000574 PARAMETER Experiment Name: At_100uM_ABA_Mutants__P Parameter: Tissue Value: Whole Plant
  misc_feature: MA Experiment 20000574 PARAMETER Experiment Name: At_100uM_ABA_Mutants__P Parameter: Treatment Value: None
atgggtgaggatatgcgaggagtgaaagtagtctcaaaatggccaccgatgatagttatggtgacatcacaagtagcgatgggttcggtgaatgcacttgtgaagaaagctcttgatgttggtgtgaaccatatgatcattggtgcttatcgaatggctatttcctctttcattctggttcctatcgcctattttttggaaaggaaaataataccgaaaataacgtttaggctaatggtcgatcatttcatcagtggtttgctcggggcgagtttgatgcaatttttctatttgcttggtctgtcctacacgtcagcaactgttgcgtgtgctttggtaagcttgatgcctgcaatcacctttgctttcgctcttattttgagaactgagaagataaaagatctaaagacccaagcaggaatgataaaagtgatgggaactctaatatgtataagtggagctttgttcttaacattttacaaaggccctcatatatcaaactctcactctcacctagaggctcttcctcacaacaacagcgatcacaacaccaagaattggcttcttggatgtctctacttagtcataggaatcgtgttgctatctctatggatattgtttcaagggactttaagcatcaagtatccttgcaaattctcaagcacttgtctcatgtcaattttcgcagcttttcaatgtgctctattgagtctttacaagagtagagaccttaaacattggatcatcgacgatggatttgtgattggtgtcataatatatgctggagtgataggacaagcaatgtcgactgtagcagcgacatggggaataaacagattaggagctgttttcgcatcagcaattatgccagtttctctcatatcggctactctattcgatttccttatcttacacactcctttatacctcggaagtgtgattggatcagtagggacaataataggtctctacgtgttcttgtggggtaagaacaaagaaacggaagcagacataactacattgtcttctcggatgaacaacgaagatcaacgagtctag

SEQ ID NO: 91352 - protein, 352 aa, Arabidopsis thaliana
  peptide (1)..(352): Ceres Seq. ID no. 12727383
  misc_feature (199)..(328): Pfam Name: Integral membrane protein DUF6 Pfam Description: Integral membrane protein DUF6
  misc_feature (1)..(336): Homolog of NCBI NO: 15220389 NR Description: hypothetical protein; protein id: At1g11460.1
  misc_feature (1)..(350): Homolog of NCBI NO: 18378792 NR Description: expressed protein; protein id: At1g01070.1,
  misc_feature (93)..(352): Homolog of NCBI NO: 30682241 NR Description: nodulin MtN21 family protein [Arabidopsis
  misc_feature (13)..(352): Homolog of NCBI NO: 15234179 NR Description: unknown protein; protein id: At4g01430.1, by cDNA: gi_20260641 [Arabidopsis thaliana]
  misc_feature (90)..(352): Homolog of NCBI NO: 7486354 NR Description: hypothetical protein F3D13.4 - Arabidopsis >gi|3193309|gb|AAC19292.1| F3D13.4 gene product [Arabidopsis
  misc_feature (13)..(78): Homolog of NCBI NO: 7486354 NR Description: hypothetical protein F3D13.4 - Arabidopsis >gi|3193309|gb|AAC19292.1| F3D13.4 gene product [Arabidopsis
  misc_feature (90)..(350): Homolog of NCBI NO: 25406714 NR Description: protein T25K16.7 [imported] - Arabidopsis >gi|6715646|gb|AAF26473.1|AC007323_14 T25K16.7 [Arabidopsis
  misc_feature (13)..(350): Homolog of NCBI NO: 15234185 NR Description: unknown protein; protein id: At4g01450.1
  misc_feature (13)..(350): Homolog of NCBI NO: 15234182 NR Description: hypothetical protein; protein id: At4g01440.1, by cDNA: 40560. [Arabidopsis thaliana] >gi|25407108|pir||G85018
  misc_feature (90)..(350): Homolog of NCBI NO: 7485384 NR Description: hypothetical protein F11O4.14 - Arabidopsis >gi|3695385|gb|AAC62788.1| similar to Medicago truncatula MtN21
MGEDMRGVKVVSKWPPMIVMVTSQVAMGSVNALVKKALDVGVNHMIIGAYRMAISSFILVPIAYFLERKIIPKITFRLMVDHFISGLLGASLMQFFYLLGLSYTSATVACALVSLMPAITFAFALILRTEKIKDLKTQAGMIKVMGTLICISGALFLTFYKGPHISNSHSHLEALPHNNSDHNTKNWLLGCLYLVIGIVLLSLWILFQGTLSIKYPCKFSSTCLMSIFAAFQCALLSLYKSRDLKHWIIDDGFVIGVIIYAGVIGQAMSTVAATWGINRLGAVFASAIMPVSLISATLFDFLILHTPLYLGSVIGSVGTIIGLYVFLWGKNKETEADITTLSSRMNNEDQRV

SEQ ID NO: 91353 - protein, 348 aa, Arabidopsis thaliana
  peptide (1)..(348): Ceres Seq. ID no. 12727384
  misc_feature (195)..(324): Pfam Name: Integral membrane protein DUF6 Pfam Description: Integral membrane protein DUF6
  misc_feature (1)..(332): Homolog of NCBI NO: 15220389 NR Description: hypothetical protein; protein id: At1g11460.1
  misc_feature (1)..(346): Homolog of NCBI NO: 18378792 NR Description: expressed protein; protein id: At1g01070.1,
  misc_feature (89)..(348): Homolog of NCBI NO: 30682241 NR Description: nodulin MtN21 family protein [Arabidopsis
  misc_feature (9)..(348): Homolog of NCBI NO: 15234179 NR Description: unknown protein; protein id: At4g01430.1, by cDNA: gi_20260641 [Arabidopsis thaliana]
  misc_feature (86)..(348): Homolog of NCBI NO: 7486354 NR Description: hypothetical protein F3D13.4 - Arabidopsis >gi|3193309|gb|AAC19292.1| F3D13.4 gene product [Arabidopsis
  misc_feature (9)..(74): Homolog of NCBI NO: 7486354 NR Description: hypothetical protein F3D13.4 - Arabidopsis >gi|3193309|gb|AAC19292.1| F3D13.4 gene product [Arabidopsis
  misc_feature (86)..(346): Homolog of NCBI NO: 25406714 NR Description: protein T25K16.7 [imported] - Arabidopsis >gi|6715646|gb|AAF26473.1|AC007323_14 T25K16.7 [Arabidopsis
  misc_feature (9)..(346): Homolog of NCBI NO: 15234185 NR Description: unknown protein; protein id: At4g01450.1
  misc_feature (9)..(346): Homolog of NCBI NO: 15234182 NR Description: hypothetical protein; protein id: At4g01440.1, by cDNA: 40560. [Arabidopsis thaliana] >gi|25407108|pir||G85018
  misc_feature (86)..(346): Homolog of NCBI NO: 7485384 NR Description: hypothetical protein F11O4.14 - Arabidopsis >gi|3695385|gb|AAC62788.1| similar to Medicago truncatula MtN21
MRGVKVVSKWPPMIVMVTSQVAMGSVNALVKKALDVGVNHMIIGAYRMAISSFILVPIAYFLERKIIPKITFRLMVDHFISGLLGASLMQFFYLLGLSYTSATVACALVSLMPAITFAFALILRTEKIKDLKTQAGMIKVMGTLICISGALFLTFYKGPHISNSHSHLEALPHNNSDHNTKNWLLGCLYLVIGIVLLSLWILFQGTLSIKYPCKFSSTCLMSIFAAFQCALLSLYKSRDLKHWIIDDGFVIGVIIYAGVIGQAMSTVAATWGINRLGAVFASAIMPVSLISATLFDFLILHTPLYLGSVIGSVGTIIGLYVFLWGKNKETEADITTLSSRMNNEDQRV

SEQ ID NO: 91354 - protein, 336 aa, Arabidopsis thaliana
  peptide (1)..(336): Ceres Seq. ID no. 12727385
  misc_feature (183)..(312): Pfam Name: Integral membrane protein DUF6 Pfam Description: Integral membrane protein DUF6
  misc_feature (1)..(320): Homolog of NCBI NO: 15220389 NR Description: hypothetical protein; protein id: At1g11460.1
  misc_feature (1)..(334): Homolog of NCBI NO: 18378792 NR Description: expressed protein; protein id: At1g01070.1,
  misc_feature (77)..(336): Homolog of NCBI NO: 30682241 NR Description: nodulin MtN21 family protein [Arabidopsis
  misc_feature (1)..(336): Homolog of NCBI NO: 15234179 NR Description: unknown protein; protein id: At4g01430.1, by cDNA: gi_20260641 [Arabidopsis thaliana]
  misc_feature (74)..(336): Homolog of NCBI NO: 7486354 NR Description: hypothetical protein F3D13.4 - Arabidopsis >gi|3193309|gb|AAC19292.1| F3D13.4 gene product [Arabidopsis
  misc_feature (1)..(62): Homolog of NCBI NO: 7486354 NR Description: hypothetical protein F3D13.4 - Arabidopsis >gi|3193309|gb|AAC19292.1| F3D13.4 gene product [Arabidopsis
  misc_feature (74)..(334): Homolog of NCBI NO: 25406714 NR Description: protein T25K16.7 [imported] - Arabidopsis >gi|6715646|gb|AAF26473.1|AC007323_14 T25K16.7 [Arabidopsis
  misc_feature (1)..(334): Homolog of NCBI NO: 15234185 NR Description: unknown protein; protein id: At4g01450.1
  misc_feature (1)..(334): Homolog of NCBI NO: 15234182 NR Description: hypothetical protein; protein id: At4g01440.1, by cDNA: 40560. [Arabidopsis thaliana] >gi|25407108|pir||G85018
  misc_feature (74)..(334): Homolog of NCBI NO: 7485384 NR Description: hypothetical protein F11O4.14 - Arabidopsis >gi|3695385|gb|AAC62788.1| similar to Medicago truncatula MtN21
MIVMVTSQVAMGSVNALVKKALDVGVNHMIIGAYRMAISSFILVPIAYFLERKIIPKITFRLMVDHFISGLLGASLMQFFYLLGLSYTSATVACALVSLMPAITFAFALILRTEKIKDLKTQAGMIKVMGTLICISGALFLTFYKGPHISNSHSHLEALPHNNSDHNTKNWLLGCLYLVIGIVLLSLWILFQGTLSIKYPCKFSSTCLMSIFAAFQCALLSLYKSRDLKHWIIDDGFVIGVIIYAGVIGQAMSTVAATWGINRLGAVFASAIMPVSLISATLFDFLILHTPLYLGSVIGSVGTIIGLYVFLWGKNKETEADITTLSSRMNNEDQRV

SEQ ID NO: 91355 - DNA, 1014 bp, Arabidopsis thaliana
  misc_feature (1)..(1014): Ceres Seq. ID no. 12727386
  misc_feature: MA Experiment ID: 20000355 Result: Down-regulated in Transcription
  misc_feature: MA Experiment 20000355 PARAMETER Experiment Name: At_Siliques_Sub_P Parameter: Age (day) Value: 21
  misc_feature: MA Experiment 20000355 PARAMETER Experiment Name: At_Siliques_Sub_P Parameter: Organism Value: A. thaliana
  misc_feature: MA Experiment 20000355 PARAMETER Experiment Name: At_Siliques_Sub_P Parameter: Plant Line Value: WS
  misc_feature: MA Experiment 20000355 PARAMETER Experiment Name: At_Siliques_Sub_P Parameter: Tissue Value: Less Than 5mm Siliques vs. Whole Plant
  misc_feature: MA Experiment ID: 20000440 Result: Down-regulated in Transcription
  misc_feature: MA Experiment 20000440 PARAMETER Experiment Name: At_Closed-Flower__Sub_P Parameter: Tissue Value: Closed Flower vs. Whole Plant
atgggtgaggatatgcgagtagtgaaagtagaatcaaaatggccaccgataatagtaatggtaatatcacaagtagcaatgggttcggtgaatgcacttgtgaagaaagctcttgatgttggtgtgaaccatatgatcattggtgcttatcgaattgctatttcctctttcattctggctcctatcgcctatattttggaaagggaaataataccggaaataacgtttaggctaatggtcgatcatttcatcagtggattgctcggggcgagtttgatgcaatttttctatttgcttggtctgtcttacacgtcagcaactgttgcgtgtgctttggtaagcttgatgcctgcaatcacctttgctttcgctcttattttgaggactgaaaagataaaaagtctaagaacccaagcaggaatgataaaagtgatgggaactattatatgtataagtggagctttgttcttaacattttacaaaggccctcatatatcaaactctcactctcaccaagaggctcttcctcacaacaacaacagcgatcacaacacaaagaattggcttcttggatgtctctacttaaccataggaaccgtgttgatatctctatggattttgtttcaagggactttaagcatcaagtacccttgcaaattctcaagcacttgtctcatgtcaattttcgcagcttttcaatgtgctctattgagtctttacaagagtagagatgttaaagattggatcatcgatgatagatttgtgatcggtgtcatcgtatatgctggagtgataggacaagcaatgtcgacggtatcagtgacatggggggtgaagaaattaggagctgttttcgtatcagcaattatgccaatagctctcatttcggctagtctattcgatttcataatcttacacactcctttatacctcggaagtctgattggatcagtagggacaataacaggtctctacgtgttcttgtggggtaagaacaaagatatggaagcataa

SEQ ID NO: 91356 - protein, 337 aa, Arabidopsis thaliana
  peptide (1)..(337): Ceres Seq. ID no. 12727387
  misc_feature (200)..(329): Pfam Name: Integral membrane protein DUF6 Pfam Description: Integral membrane protein DUF6
  misc_feature (1)..(337): Homolog of NCBI NO: 15220389 NR Description: hypothetical protein; protein id: At1g11460.1
  misc_feature (1)..(337): Homolog of NCBI NO: 18378792 NR Description: expressed protein; protein id: At1g01070.1,
  misc_feature (11)..(336): Homolog of NCBI NO: 15234179 NR Description: unknown protein; protein id: At4g01430.1, by cDNA: gi_20260641 [Arabidopsis thaliana]
  misc_feature (93)..(337): Homolog of NCBI NO: 30682241 NR Description: nodulin MtN21 family protein [Arabidopsis
  misc_feature (90)..(336): Homolog of NCBI NO: 7486354 NR Description: hypothetical protein F3D13.4 - Arabidopsis >gi|3193309|gb|AAC19292.1| F3D13.4 gene product [Arabidopsis
  misc_feature (11)..(78): Homolog of NCBI NO: 7486354 NR Description: hypothetical protein F3D13.4 - Arabidopsis >gi|3193309|gb|AAC19292.1| F3D13.4 gene product [Arabidopsis
  misc_feature (90)..(337): Homolog of NCBI NO: 25406714 NR Description: protein T25K16.7 [imported] - Arabidopsis >gi|6715646|gb|AAF26473.1|AC007323_14 T25K16.7 [Arabidopsis
  misc_feature (11)..(336): Homolog of NCBI NO: 15234182 NR Description: hypothetical protein; protein id: At4g01440.1, by cDNA: 40560. [Arabidopsis thaliana] >gi|25407108|pir||G85018
  misc_feature (10)..(335): Homolog of NCBI NO: 15234185 NR Description: unknown protein; protein id: At4g01450.1
  misc_feature (76)..(262): Homolog of NCBI NO: 25402664 NR Description: protein T23J18.13 [imported] - Arabidopsis >gi|6554185|gb|AAF16631.1|AC011661_9 T23J18.13 [Arabidopsis
MGEDMRVVKVESKWPPIIVMVISQVAMGSVNALVKKALDVGVNHMIIGAYRIAISSFILAPIAYILEREIIPEITFRLMVDHFISGLLGASLMQFFYLLGLSYTSATVACALVSLMPAITFAFALILRTEKIKSLRTQAGMIKVMGTIICISGALFLTFYKGPHISNSHSHQEALPHNNNSDHNTKNWLLGCLYLTIGTVLISLWILFQGTLSIKYPCKFSSTCLMSIFAAFQCALLSLYKSRDVKDWIIDDRFVIGVIVYAGVIGQAMSTVSVTWGVKKLGAVFVSAIMPIALISASLFDFIILHTPLYLGSLIGSVGTITGLYVFLWGKNKDMEA

SEQ ID NO: 91357 - protein, 333 aa, Arabidopsis thaliana
  peptide (1)..(333): Ceres Seq. ID no. 12727388
  misc_feature (196)..(325): Pfam Name: Integral membrane protein DUF6 Pfam Description: Integral membrane protein DUF6
  misc_feature (1)..(333): Homolog of NCBI NO: 15220389 NR Description: hypothetical protein; protein id: At1g11460.1
  misc_feature (1)..(333): Homolog of NCBI NO: 18378792 NR Description: expressed protein; protein id: At1g01070.1,
  misc_feature (7)..(332): Homolog of NCBI NO: 15234179 NR Description: unknown protein; protein id: At4g01430.1, by cDNA: gi_20260641 [Arabidopsis thaliana]
  misc_feature (89)..(333): Homolog of NCBI NO: 30682241 NR Description: nodulin MtN21 family protein [Arabidopsis
  misc_feature (86)..(332): Homolog of NCBI NO: 7486354 NR Description: hypothetical protein F3D13.4 - Arabidopsis >gi|3193309|gb|AAC19292.1| F3D13.4 gene product [Arabidopsis
  misc_feature (7)..(74): Homolog of NCBI NO: 7486354 NR Description: hypothetical protein F3D13.4 - Arabidopsis >gi|3193309|gb|AAC19292.1| F3D13.4 gene product [Arabidopsis
  misc_feature (86)..(333): Homolog of NCBI NO: 25406714 NR Description: protein T25K16.7 [imported] - Arabidopsis >gi|6715646|gb|AAF26473.1|AC007323_14 T25K16.7 [Arabidopsis
  misc_feature (7)..(332): Homolog of NCBI NO: 15234182 NR Description: hypothetical protein; protein id: At4g01440.1, by cDNA: 40560. [Arabidopsis thaliana] >gi|25407108|pir||G85018
  misc_feature (6)..(331): Homolog of NCBI NO: 15234185 NR Description: unknown protein; protein id: At4g01450.1
  misc_feature (72)..(258): Homolog of NCBI NO: 25402664 NR Description: protein T23J18.13 [imported] - Arabidopsis >gi|6554185|gb|AAF16631.1|AC011661_9 T23J18.13 [Arabidopsis
MRVVKVESKWPPIIVMVISQVAMGSVNALVKKALDVGVNHMIIGAYRIAISSFILAPIAYILEREIIPEITFRLMVDHFISGLLGASLMQFFYLLGLSYTSATVACALVSLMPAITFAFALILRTEKIKSLRTQAGMIKVMGTIICISGALFLTFYKGPHISNSHSHQEALPHNNNSDHNTKNWLLGCLYLTIGTVLISLWILFQGTLSIKYPCKFSSTCLMSIFAAFQCALLSLYKSRDVKDWIIDDRFVIGVIVYAGVIGQAMSTVSVTWGVKKLGAVFVSAIMPIALISASLFDFIILHTPLYLGSLIGSVGTITGLYVFLWGKNKDMEA

SEQ ID NO: 91358 - protein, 318 aa, Arabidopsis thaliana
  peptide (1)..(318): Ceres Seq. ID no. 12727389
  misc_feature (181)..(310): Pfam Name: Integral membrane protein DUF6 Pfam Description: Integral membrane protein DUF6
  misc_feature (1)..(318): Homolog of NCBI NO: 15220389 NR Description: hypothetical protein; protein id: At1g11460.1
  misc_feature (1)..(318): Homolog of NCBI NO: 18378792 NR Description: expressed protein; protein id: At1g01070.1,
  misc_feature (1)..(317): Homolog of NCBI NO: 15234179 NR Description: unknown protein; protein id: At4g01430.1, by cDNA: gi_20260641 [Arabidopsis thaliana]
  misc_feature (74)..(318): Homolog of NCBI NO: 30682241 NR Description: nodulin MtN21 family protein [Arabidopsis
  misc_feature (71)..(317): Homolog of NCBI NO: 7486354 NR Description: hypothetical protein F3D13.4 - Arabidopsis >gi|3193309|gb|AAC19292.1| F3D13.4 gene product [Arabidopsis
  misc_feature (1)..(59): Homolog of NCBI NO: 7486354 NR Description: hypothetical protein F3D13.4 - Arabidopsis >gi|3193309|gb|AAC19292.1| F3D13.4 gene product [Arabidopsis
  misc_feature (71)..(318): Homolog of NCBI NO: 25406714 NR Description: protein T25K16.7 [imported] - Arabidopsis >gi|6715646|gb|AAF26473.1|AC007323_14 T25K16.7 [Arabidopsis
  misc_feature (1)..(317): Homolog of NCBI NO: 15234182 NR Description: hypothetical protein; protein id: At4g01440.1, by cDNA: 40560. [Arabidopsis thaliana] >gi|25407108|pir||G85018
  misc_feature (1)..(316): Homolog of NCBI NO: 15234185 NR Description: unknown protein; protein id: At4g01450.1
  misc_feature (57)..(243): Homolog of NCBI NO: 25402664 NR Description: protein T23J18.13 [imported] - Arabidopsis >gi|6554185|gb|AAF16631.1|AC011661_9 T23J18.13 [Arabidopsis
MVISQVAMGSVNALVKKALDVGVNHMIIGAYRIAISSFILAPIAYILEREIIPEITFRLMVDHFISGLLGASLMQFFYLLGLSYTSATVACALVSLMPAITFAFALILRTEKIKSLRTQAGMIKVMGTIICISGALFLTFYKGPHISNSHSHQEALPHNNNSDHNTKNWLLGCLYLTIGTVLISLWILFQGTLSIKYPCKFSSTCLMSIFAAFQCALLSLYKSRDVKDWIIDDRFVIGVIVYAGVIGQAMSTVSVTWGVKKLGAVFVSAIMPIALISASLFDFIILHTPLYLGSLIGSVGTITGLYVFLWGKNKDMEA

SEQ ID NO: 91359 - DNA, 1521 bp, Arabidopsis thaliana
  misc_feature (1)..(1521): Ceres Seq. ID no. 12727390
  misc_feature: MA Experiment ID: 20000235 Result: Up-regulated in Transcription
  misc_feature: MA Experiment 20000235 PARAMETER Experiment Name: At_Siliques_P Parameter: Age (day) Value: 21
  misc_feature: MA Experiment 20000235 PARAMETER Experiment Name: At_Siliques_P Parameter: Organism Value: A. thaliana
  misc_feature: MA Experiment 20000235 PARAMETER Experiment Name: At_Siliques_P Parameter: Plant Line Value: WS
  misc_feature: MA Experiment 20000235 PARAMETER Experiment Name: At_Siliques_P Parameter: Tissue Value: 5-10mm Siliques vs. Whole Plant
atggtggttattggtgttagcaaagaatattgtgatgacaaacagtcatgtcaaaactttttgttggagcttaaggcgggttcatcgtcactctcggagattagacgtcgtgacttattgatcatcgttttgaagaattccgtacggaggatcgacatggttatgattggtgtgatggatgatacaaaacaacatgaggagatggagaatgatttgcttggtgtgaaggaggacacaaaactatttgaggagatgatggagtcgacaaaagataggatgatccgttcggtggaggaactcttaggaggagaatttcctaatcgtggatcttacgagaacgtccacacttggctcagtagcgttcttactagttacatcacatgtatcgacgaaattggtgaaggtgcctataaacgccgtgtcgagccaaagcttgaagacctcatttctagggcaagaatagctttggctctctttatctccatttcaccgagagacaacaccgaacttatctcggtgattcccaatagcccttcttggttattccatgttgacaagaaagatctatatctcaatgctgagattgctgatgttgtggtcgcgaaggatgggaccggaaagtacagcacagtgaatgcggccattgcagcggcacctcaacacagccaaaagagattcgtcatctatataaagacaggcatttatgatgaaatcgtcgtcattgagaatacgaaacccaatttaactcttataggtgatggtcaagatttaaccatcatcacgagcaatttaagtgctagcaatgttagaagaacgttcaacaccgcaactgttgcttctaatggtaatggattcatcggagtagacatgtgcttccgaaacacggccgggccggcaaaaggaccagctgttgccctccgtgtgagtggtgatatgtccgtcatttatagatgccgtgtcgagggatatcaggatgccttgtatcctcacagtgaccgccagttttatagagagtgctttattaccggcactgtagatttcatttgtgggaacgcggtggcggtctttcaattctgccagattgtagcaagacaacctaagatggggcagagcaatgtcataaccgctcagtcacgcgcatttaaggacatttactcgggcttcacgattcaaaaatgcaacattactgcaagctcggatctagacacgacaaccgttaaaacgtatcttggaagaccttggaggatattttcaacagtcgcagttatgcagtctttcatcggtgatttagttgatcccgctggctggactccttgggaaggagaaactggtttgtcaactctccactaccgcgaatatcaaaacaggggtccaggagctgtgactagcagaagggtgaagtggtcaggctttaaagttatgaaagatcctaaacaggctacagaattcactgtagccaagctcttagatggagaaacttggttgaaagaaactcgaatcccatatgaaagtggattgtaa

SEQ ID NO: 91360 - protein, 506 aa, Arabidopsis thaliana
  peptide (1)..(506): Ceres Seq. ID no. 12727391
  misc_feature (197)..(281): Pfam Name: Pectinesterase Pfam Description: Pectinesterase
  misc_feature (1)..(506): Homolog of NCBI NO: 30682309 NR Description: pectin methylesterase, putative [Arabidopsis
  misc_feature (1)..(506): Homolog of NCBI NO: 28393148 NR Description: putative pectin methylesterase [Arabidopsis >gi|28827352|gb|AAO50520.1| putative pectin methylesterase
  misc_feature (1)..(281): Homolog of NCBI NO: 6554192 NR Description: T23J18.25 [Arabidopsis thaliana]
  misc_feature (279)..(506): Homolog of NCBI NO: 6554192 NR Description: T23J18.25 [Arabidopsis thaliana]
  misc_feature (1)..(506): Homolog of NCBI NO: 22328305 NR Description: pectin methylesterase, putative; protein id:
  misc_feature (1)..(506): Homolog of NCBI NO: 7447391 NR Description: probable pectinesterase (EC 3.1.1.11) - thaliana >gi|3319371|gb|AAC28220.1| Similar to pectinesterase; [Arabidopsis thaliana] >gi|7267148|emb|CAB80816.1| putative
  misc_feature (46)..(506): Homolog of NCBI NO: 15232875 NR Description: pectinesterase family; protein id: At3g27980.1
  misc_feature (13)..(506): Homolog of NCBI NO: 14334992 NR Description: At1g11580/T23J18_33 [Arabidopsis thaliana]
  misc_feature (13)..(506): Homolog of NCBI NO: 15220424 NR Description: pectin methylesterase, putative; protein id:
  misc_feature (13)..(506): Homolog of NCBI NO: 6174913 NR Description: Pectinesterase 1 precursor (Pectin methylesterase
MVVIGVSKEYCDDKQSCQNFLLELKAGSSSLSEIRRRDLLIIVLKNSVRRIDMVMIGVMDDTKQHEEMENDLLGVKEDTKLFEEMMESTKDRMIRSVEELLGGEFPNRGSYENVHTWLSSVLTSYITCIDEIGEGAYKRRVEPKLEDLISRARIALALFISISPRDNTELISVIPNSPSWLFHVDKKDLYLNAEIADVVVAKDGTGKYSTVNAAIAAAPQHSQKRFVIYIKTGIYDEIVVIENTKPNLTLIGDGQDLTIITSNLSASNVRRTFNTATVASNGNGFIGVDMCFRNTAGPAKGPAVALRVSGDMSVIYRCRVEGYQDALYPHSDRQFYRECFITGTVDFICGNAVAVFQFCQIVARQPKMGQSNVITAQSRAFKDIYSGFTIQKCNITASSDLDTTTVKTYLGRPWRIFSTVAVMQSFIGDLVDPAGWTPWEGETGLSTLHYREYQNRGPGAVTSRRVKWSGFKVMKDPKQATEFTVAKLLDGETWLKETRIPYESGL

SEQ ID NO: 91361 - protein, 454 aa, Arabidopsis thaliana
  peptide (1)..(454): Ceres Seq. ID no. 12727392
  misc_feature (145)..(229): Pfam Name: Pectinesterase Pfam Description: Pectinesterase
  misc_feature (1)..(454): Homolog of NCBI NO: 30682309 NR Description: pectin methylesterase, putative [Arabidopsis
  misc_feature (1)..(454): Homolog of NCBI NO: 28393148 NR Description: putative pectin methylesterase [Arabidopsis >gi|28827352|gb|AAO50520.1| putative pectin methylesterase
  misc_feature (1)..(229): Homolog of NCBI NO: 6554192 NR Description: T23J18.25 [Arabidopsis thaliana]
  misc_feature (227)..(454): Homolog of NCBI NO: 6554192 NR Description: T23J18.25 [Arabidopsis thaliana]
  misc_feature (1)..(454): Homolog of NCBI NO: 22328305 NR Description: pectin methylesterase, putative; protein id:
  misc_feature (1)..(454): Homolog of NCBI NO: 7447391 NR Description: probable pectinesterase (EC 3.1.1.11) - thaliana >gi|3319371|gb|AAC28220.1| Similar to pectinesterase; [Arabidopsis thaliana] >gi|7267148|emb|CAB80816.1| putative
  misc_feature (1)..(454): Homolog of NCBI NO: 15232875 NR Description: pectinesterase family; protein id: At3g27980.1
  misc_feature (1)..(454): Homolog of NCBI NO: 14334992 NR Description: At1g11580/T23J18_33 [Arabidopsis thaliana]
  misc_feature (1)..(454): Homolog of NCBI NO: 15220424 NR Description: pectin methylesterase, putative; protein id:
  misc_feature (1)..(454): Homolog of NCBI NO: 6174913 NR Description: Pectinesterase 1 precursor (Pectin methylesterase
MVMIGVMDDTKQHEEMENDLLGVKEDTKLFEEMMESTKDRMIRSVEELLGGEFPNRGSYENVHTWLSSVLTSYITCIDEIGEGAYKRRVEPKLEDLISRARIALALFISISPRDNTELISVIPNSPSWLFHVDKKDLYLNAEIADVVVAKDGTGKYSTVNAAIAAAPQHSQKRFVIYIKTGIYDEIVVIENTKPNLTLIGDGQDLTIITSNLSASNVRRTFNTATVASNGNGFIGVDMCFRNTAGPAKGPAVALRVSGDMSVIYRCRVEGYQDALYPHSDRQFYRECFITGTVDFICGNAVAVFQFCQIVARQPKMGQSNVITAQSRAFKDIYSGFTIQKCNITASSDLDTTTVKTYLGRPWRIFSTVAVMQSFIGDLVDPAGWTPWEGETGLSTLHYREYQNRGPGAVTSRRVKWSGFKVMKDPKQATEFTVAKLLDGETWLKETRIPYESGL

SEQ ID NO: 91362 - protein, 452 aa, Arabidopsis thaliana
  peptide (1)..(452): Ceres Seq. ID no. 12727393
  misc_feature (143)..(227): Pfam Name: Pectinesterase Pfam Description: Pectinesterase
  misc_feature (1)..(452): Homolog of NCBI NO: 30682309 NR Description: pectin methylesterase, putative [Arabidopsis
  misc_feature (1)..(452): Homolog of NCBI NO: 28393148 NR Description: putative pectin methylesterase [Arabidopsis >gi|28827352|gb|AAO50520.1| putative pectin methylesterase
  misc_feature (1)..(227): Homolog of NCBI NO: 6554192 NR Description: T23J18.25 [Arabidopsis thaliana]
  misc_feature (225)..(452): Homolog of NCBI NO: 6554192 NR Description: T23J18.25 [Arabidopsis thaliana]
  misc_feature (1)..(452): Homolog of NCBI NO: 22328305 NR Description: pectin methylesterase, putative; protein id:
  misc_feature (1)..(452): Homolog of NCBI NO: 7447391 NR Description: probable pectinesterase (EC 3.1.1.11) - thaliana >gi|3319371|gb|AAC28220.1| Similar to pectinesterase; [Arabidopsis thaliana] >gi|7267148|emb|CAB80816.1| putative
  misc_feature (1)..(452): Homolog of NCBI NO: 15232875 NR Description: pectinesterase family; protein id: At3g27980.1
  misc_feature (1)..(452): Homolog of NCBI NO: 14334992 NR Description: At1g11580/T23J18_33 [Arabidopsis thaliana]
  misc_feature (1)..(452): Homolog of NCBI NO: 15220424 NR Description: pectin methylesterase, putative; protein id:
  misc_feature (1)..(452): Homolog of NCBI NO: 6174913 NR Description: Pectinesterase 1 precursor (Pectin methylesterase
MIGVMDDTKQHEEMENDLLGVKEDTKLFEEMMESTKDRMIRSVEELLGGEFPNRGSYENVHTWLSSVLTSYITCIDEIGEGAYKRRVEPKLEDLISRARIALALFISISPRDNTELISVIPNSPSWLFHVDKKDLYLNAEIADVVVAKDGTGKYSTVNAAIAAAPQHSQKRFVIYIKTGIYDEIVVIENTKPNLTLIGDGQDLTIITSNLSASNVRRTFNTATVASNGNGFIGVDMCFRNTAGPAKGPAVALRVSGDMSVIYRCRVEGYQDALYPHSDRQFYRECFITGTVDFICGNAVAVFQFCQIVARQPKMGQSNVITAQSRAFKDIYSGFTIQKCNITASSDLDTTTVKTYLGRPWRIFSTVAVMQSFIGDLVDPAGWTPWEGETGLSTLHYREYQNRGPGAVTSRRVKWSGFKVMKDPKQATEFTVAKLLDGETWLKETRIPYESGL

SEQ ID NO: 91363 - DNA, 1494 bp, Arabidopsis thaliana
  misc_feature (1)..(1494): Ceres Seq. ID no. 12727394
  misc_feature: MA Experiment ID: 20000173 Result: Down-regulated in Transcription
  misc_feature: MA Experiment 20000173 PARAMETER Experiment Name: At_42deg_Heat_P Parameter: Age (day) Value: 14
  misc_feature: MA Experiment 20000173 PARAMETER Experiment Name: At_42deg_Heat_P Parameter: Organism Value: A. thaliana
  misc_feature: MA Experiment 20000173 PARAMETER Experiment Name: At_42deg_Heat_P Parameter: Plant Line Value: WS
  misc_feature: MA Experiment 20000173 PARAMETER Experiment Name: At_42deg_Heat_P Parameter: Temperature (deg C) Value: 42 vs. 22
  misc_feature: MA Experiment 20000173 PARAMETER Experiment Name: At_42deg_Heat_P Parameter: Timepoint (hr) Value: 6
  misc_feature: MA Experiment 20000173 PARAMETER Experiment Name: At_42deg_Heat_P Parameter: Tissue Value: Aerial
  misc_feature: MA Experiment ID: 20000182 Result: Up-regulated in Transcription
  misc_feature: MA Experiment 20000182 PARAMETER Experiment Name: At_2mM_SA_P Parameter: Age (day) Value: 14
  misc_feature: MA Experiment 20000182 PARAMETER Experiment Name: At_2mM_SA_P Parameter: Organism Value: A. thaliana
  misc_feature: MA Experiment 20000182 PARAMETER Experiment Name: At_2mM_SA_P Parameter: Plant Line Value: WS
  misc_feature: MA Experiment 20000182 PARAMETER Experiment Name: At_2mM_SA_P Parameter: Timepoint (hr) Value: 6
  misc_feature: MA Experiment 20000182 PARAMETER Experiment Name: At_2mM_SA_P Parameter: Tissue Value: Aerial
  misc_feature: MA Experiment 20000182 PARAMETER Experiment Name: At_2mM_SA_P Parameter: Treatment Value: 2mM SA vs. No Treatment
  misc_feature: MA Experiment ID: 20000445 Result: Up-regulated in Transcription
  misc_feature: MA Experiment 20000445 PARAMETER Experiment Name: At_100uM_NAA__P Parameter: Age (day) Value: 14
  misc_feature: MA Experiment 20000445 PARAMETER Experiment Name: At_100uM_NAA__P Parameter: Organism Value: A. thaliana
  misc_feature: MA Experiment 20000445 PARAMETER Experiment Name: At_100uM_NAA__P Parameter: Plant Line Value: WS
  misc_feature: MA Experiment 20000445 PARAMETER Experiment Name: At_100uM_NAA__P Parameter: Timepoint (hr) Value: 6
  misc_feature: MA Experiment 20000445 PARAMETER Experiment Name: At_100uM_NAA__P Parameter: Tissue Value: Aerial
  misc_feature: MA Experiment 20000445 PARAMETER Experiment Name: At_100uM_NAA__P Parameter: Treatment Value: 100uM NAA vs. No Treatment
  misc_feature: MA Experiment ID: 20000527 Result: Down-regulated in Transcription
  misc_feature: MA Experiment 20000527 PARAMETER Experiment Name: At_10percent_PEG_P Parameter: Age (day) Value: 20
  misc_feature: MA Experiment 20000527 PARAMETER Experiment Name: At_10percent_PEG_P Parameter: Organism Value: A. thaliana
  misc_feature: MA Experiment 20000527 PARAMETER Experiment Name: At_10percent_PEG_P Parameter: Plant Line Value: WS
  misc_feature: MA Experiment 20000527 PARAMETER Experiment Name: At_10percent_PEG_P Parameter: Timepoint (day) Value: 20
  misc_feature: MA Experiment 20000527 PARAMETER Experiment Name: At_10percent_PEG_P Parameter: Tissue Value: Whole Plant
  misc_feature: MA Experiment 20000527 PARAMETER Experiment Name: At_10percent_PEG_P Parameter: Treatment Value: 10percent PEG vs. No Treatment
  misc_feature: MA Experiment ID: 20000573 Result: Up-regulated in Transcription
  misc_feature: MA Experiment 20000573 PARAMETER Experiment Name: At_100uM_ABA_Mutants__P Parameter: Organism Value: A. thaliana
  misc_feature: MA Experiment 20000573 PARAMETER Experiment Name: At_100uM_ABA_Mutants__P Parameter: Plant Line Value: CS22 vs. Ler wt
  misc_feature: MA Experiment 20000573 PARAMETER Experiment Name: At_100uM_ABA_Mutants__P Parameter: Timepoint (hr) Value: N/A
  misc_feature: MA Experiment 20000573 PARAMETER Experiment Name: At_100uM_ABA_Mutants__P Parameter: Tissue Value: Whole Plant
  misc_feature: MA Experiment 20000573 PARAMETER Experiment Name: At_100uM_ABA_Mutants__P Parameter: Treatment Value: None
  misc_feature: MA Experiment ID: 20000574 Result: Up-regulated in Transcription
  misc_feature: MA Experiment 20000574 PARAMETER Experiment Name: At_100uM_ABA_Mutants__P Parameter: Organism Value: A. thaliana
  misc_feature: MA Experiment 20000574 PARAMETER Experiment Name: At_100uM_ABA_Mutants__P Parameter: Plant Line Value: CS23 vs. Ler wt
  misc_feature: MA Experiment 20000574 PARAMETER Experiment Name: At_100uM_ABA_Mutants__P Parameter: Timepoint (hr) Value: N/A
  misc_feature: MA Experiment 20000574 PARAMETER Experiment Name: At_100uM_ABA_Mutants__P Parameter: Tissue Value: Whole Plant
  misc_feature: MA Experiment 20000574 PARAMETER Experiment Name: At_100uM_ABA_Mutants__P Parameter: Treatment Value: None
  misc_feature: MA Experiment ID: 20001554 Result: Down-regulated in Transcription
  misc_feature: MA Experiment 20001554 PARAMETER Experiment Name: At_Drought_Soil_Dry_P Parameter: Age (day) Value: 21
  misc_feature: MA Experiment 20001554 PARAMETER Experiment Name: At_Drought_Soil_Dry_P Parameter: Organism Value: A. thaliana
  misc_feature: MA Experiment 20001554 PARAMETER Experiment Name: At_Drought_Soil_Dry_P Parameter: Plant Line Value: WS
  misc_feature: MA Experiment 20001554 PARAMETER Experiment Name: At_Drought_Soil_Dry_P Parameter: Post Timepoint (hr) Value: None
  misc_feature: MA Experiment 20001554 PARAMETER Experiment Name: At_Drought_Soil_Dry_P Parameter: Post-Treatment Value: None
  misc_feature: MA Experiment 20001554 PARAMETER Experiment Name: At_Drought_Soil_Dry_P Parameter: Timepoint (day) Value: 7
  misc_feature: MA Experiment 20001554 PARAMETER Experiment Name: At_Drought_Soil_Dry_P Parameter: Treatment Value: Drought vs. No Drought
  misc_feature: MA Experiment ID: 20001556 Result: Down-regulated in Transcription
  misc_feature: MA Experiment 20001556 PARAMETER Experiment Name: At_Drought_Soil_Dry_P Parameter: Age (day) Value: 26
  misc_feature: MA Experiment 20001556 PARAMETER Experiment Name: At_Drought_Soil_Dry_P Parameter: Organism Value: A. thaliana
  misc_feature: MA Experiment 20001556 PARAMETER Experiment Name: At_Drought_Soil_Dry_P Parameter: Plant Line Value: WS
  misc_feature: MA Experiment 20001556 PARAMETER Experiment Name: At_Drought_Soil_Dry_P Parameter: Post Timepoint (hr) Value: None
  misc_feature: MA Experiment 20001556 PARAMETER Experiment Name: At_Drought_Soil_Dry_P Parameter: Post-Treatment Value: None
  misc_feature: MA Experiment 20001556 PARAMETER Experiment Name: At_Drought_Soil_Dry_P Parameter: Timepoint (day) Value: 12
  misc_feature: MA Experiment 20001556 PARAMETER Experiment Name: At_Drought_Soil_Dry_P Parameter: Treatment Value: Drought vs. No Drought
  misc_feature: MA Experiment ID: 20001558 Result: Down-regulated in Transcription
  misc_feature: MA Experiment 20001558 PARAMETER Experiment Name: At_Drought_Soil_Dry_P Parameter: Age (day) Value: 27
  misc_feature: MA Experiment 20001558 PARAMETER Experiment Name: At_Drought_Soil_Dry_P Parameter: Organism Value: A. thaliana
  misc_feature: MA Experiment 20001558 PARAMETER Experiment Name: At_Drought_Soil_Dry_P Parameter: Plant Line Value: WS
  misc_feature: MA Experiment 20001558 PARAMETER Experiment Name: At_Drought_Soil_Dry_P Parameter: Post Timepoint (hr) Value: 6
  misc_feature: MA Experiment 20001558 PARAMETER Experiment Name: At_Drought_Soil_Dry_P Parameter: Post-Treatment Value: Re-Water vs. No Drought
  misc_feature: MA Experiment 20001558 PARAMETER Experiment Name: At_Drought_Soil_Dry_P Parameter: Timepoint (day) Value: 13
  misc_feature: MA Experiment 20001558 PARAMETER Experiment Name: At_Drought_Soil_Dry_P Parameter: Treatment Value: Drought vs. No Drought
  misc_feature: MA Experiment ID: 20001560 Result: Down-regulated in Transcription
  misc_feature: MA Experiment 20001560 PARAMETER Experiment Name: At_Drought_Soil_Dry_P Parameter: Age (day) Value: 28
  misc_feature: MA Experiment 20001560 PARAMETER Experiment Name: At_Drought_Soil_Dry_P Parameter: Organism Value: A. thaliana
  misc_feature: MA Experiment 20001560 PARAMETER Experiment Name: At_Drought_Soil_Dry_P Parameter: Plant Line Value: WS
  misc_feature: MA Experiment 20001560 PARAMETER Experiment Name: At_Drought_Soil_Dry_P Parameter: Post Timepoint (hr) Value: None
  misc_feature: MA Experiment 20001560 PARAMETER Experiment Name: At_Drought_Soil_Dry_P Parameter: Post-Treatment Value: None
  misc_feature: MA Experiment 20001560 PARAMETER Experiment Name: At_Drought_Soil_Dry_P Parameter: Timepoint (day) Value: 14
  misc_feature: MA Experiment 20001560 PARAMETER Experiment Name: At_Drought_Soil_Dry_P Parameter: Treatment Value: Drought vs. No Drought
  misc_feature: MA Experiment ID: 20001904 Result: Down-regulated in Transcription
  misc_feature: MA Experiment 20001904 PARAMETER Experiment Name: At_Drought_Reproduction_P Parameter: Age (day) Value: 37
  misc_feature: MA Experiment 20001904 PARAMETER Experiment Name: At_Drought_Reproduction_P Parameter: Organism Value: A. thaliana
  misc_feature: MA Experiment 20001904 PARAMETER Experiment Name: At_Drought_Reproduction_P Parameter: Plant Line Value: WS
  misc_feature: MA Experiment 20001904 PARAMETER Experiment Name: At_Drought_Reproduction_P Parameter: Timepoint (day) Value: 7
  misc_feature: MA Experiment 20001904 PARAMETER Experiment Name: At_Drought_Reproduction_P Parameter: Tissue Value: Rosettes
  misc_feature: MA Experiment 20001904 PARAMETER Experiment Name: At_Drought_Reproduction_P Parameter: Treatment Value: Drought vs. No Drought
atggaaatgacattgatggtttctctgtgcttaacgaccctcttaacccttctcttacttaaaaaattcctcaaacgaaccgccaaaaaagtgaacttaccaccatctccatggcgaattccagtgattggaaacctccaccagctcagcctccaccctcaccgctccctccactccctcagcctcaggtatggcccactgatgctgcttcattttggccgtgtccccatactcgtagtctcctccagcgaagcagctcatgagatattgaaaacacacgatcttaagtttgccaaccgcccgaaatcaaaagccgttcatggacttatgaatggtgggcgtgatgtggtttttggtccctatggagaatattggagacagatgaagagtgtctgcattctcaatctactcaccaacaaaatggttgcatcctttgagaaggtaagagaggaagaggtaaatgcaatgatggagaagctagagaaagcaagttgttcttcttcagcagaaaatctgagtgaactctttgttactctaacaagtgatgtcacgagtagagtttccttggggaaaaaatattgggaggacgaaaccgcagggggtctcaagaagcgagtgaggcagatcatggagcttttacgcgagttcccaatcggggactatgtcccggctttggcatggatagacaggatcaacggtttcaattctaagattgtggaagtgagtcgagcgtatagtgatcttatggaaaaagtggtgcaagaacatttagaggcgggcgaacataaagcggatttcgtcaatatactgttatcaatcgaaaaagaaaagaataatggattcaaagttcaaagaaacgacataaaatttatgatcttggatatgtttataggaggtatttcaacaagttcaactctactagaatggataatgacggagctgatcagaaatccagagtgtatgaagaaactccaaaacgagattcggtcaaccattaggccacatggttcatacataaaagaaaaagaagttgaaaatatgagatacttgaaagcagtgattaaagaggtgtttcgggtgcatcctcctcttccactaatacttcccagactattaactgaagatgttaaagtaaagggatatgacatagccgcagggaccgaggtgttaatcaatgcttggtcaatccatagagaccccgcgatatggggaccggatgcagaagaattcaaaccagagagacacttagattcaactttggattatcatggacaagatttgaaatacatcccattcggatcaggtagaagaatttgtcccgggataaatcttgctatgggtttggtagaggttacattggccaaccttgtaggccgatttgactggagtgtcgatcctggaccaaatggggatcaacctgatctagctgaagattttggtctcgatgtttgtcgcaagaaccctctcattgcatttccatcttccgttgcatga

SEQ ID NO: 91364 - protein, 497 aa, Arabidopsis thaliana
  peptide (1)..(497): Ceres Seq. ID no. 12727395
  misc_feature (1)..(497): Homolog of NCBI NO: 22329490 NR Description: cytochrome P450, putative; protein id: [Arabidopsis thaliana] >gi|13878394|sp|Q9SAB6|C71I_ARATH
  misc_feature (56)..(497): Homolog of NCBI NO: 25282567 NR Description: hypothetical protein [imported] - Arabidopsis >gi|4835796|gb|AAD30262.1|AC007296_23 Strong similarity to T11J7.14 putative cytochrome P450 from Arabidopsis thaliana and
  misc_feature (1)..(90): Homolog of NCBI NO: 25282567 NR Description: hypothetical protein [imported] - Arabidopsis >gi|4835796|gb|AAD30262.1|AC007296_23 Strong similarity to T11J7.14 putative cytochrome P450 from Arabidopsis thaliana and
  misc_feature (1)..(496): Homolog of NCBI NO: 13878362 NR Description: Cytochrome P450 71A12 >gi|25282591|pir||C84712
  misc_feature (1)..(496): Homolog of NCBI NO: 30684709 NR Description: cytochrome p450 71A12 [Arabidopsis thaliana] At2g30750/T11J7.14 [Arabidopsis thaliana]
  misc_feature (1)..(496): Homolog of NCBI NO: 15224570 NR Description: cytochrome p450 family; protein id: At2g30770.1
  misc_feature (1)..(413): Homolog of NCBI NO: 26452759 NR Description: putative cytochrome P450 [Arabidopsis thaliana]
  misc_feature (1)..(494): Homolog of NCBI NO: 15238664 NR Description: cytochrome P450-like protein; protein id: [Arabidopsis thaliana] >gi|13878366|sp|P58045|C71E_ARATH
  misc_feature (1)..(495): Homolog of NCBI NO: 15238652 NR Description: cytochrome p450 family; protein id: At5g24950.1
  misc_feature (1)..(495): Homolog of NCBI NO: 15239008 NR Description: cytochrome p450, putative; protein id: [Arabidopsis thaliana] >gi|13878374|sp|Q9FH66|C71G_ARATH P450 71A16 >gi|9759017|dbj|BAB09330.1| cytochrome P450
MEMTLMVSLCLTTLLTLLLLKKFLKRTAKKVNLPPSPWRIPVIGNLHQLSLHPHRSLHSLSLRYGPLMLLHFGRVPILVVSSSEAAHEILKTHDLKFANRPKSKAVHGLMNGGRDVVFGPYGEYWRQMKSVCILNLLTNKMVASFEKVREEEVNAMMEKLEKASCSSSAENLSELFVTLTSDVTSRVSLGKKYWEDETAGGLKKRVRQIMELLREFPIGDYVPALAWIDRINGFNSKIVEVSRAYSDLMEKVVQEHLEAGEHKADFVNILLSIEKEKNNGFKVQRNDIKFMILDMFIGGISTSSTLLEWIMTELIRNPECMKKLQNEIRSTIRPHGSYIKEKEVENMRYLKAVIKEVFRVHPPLPLILPRLLTEDVKVKGYDIAAGTEVLINAWSIHRDPAIWGPDAEEFKPERHLDSTLDYHGQDLKYIPFGSGRRICPGINLAMGLVEVTLANLVGRFDWSVDPGPNGDQPDLAEDFGLDVCRKNPLIAFPSSVA

SEQ ID NO: 91365 - protein, 495 aa, Arabidopsis thaliana
  peptide (1)..(495): Ceres Seq. ID no. 12727396
  misc_feature (1)..(495): Homolog of NCBI NO: 22329490 NR Description: cytochrome P450, putative; protein id: [Arabidopsis thaliana] >gi|13878394|sp|Q9SAB6|C71I_ARATH
  misc_feature (54)..(495): Homolog of NCBI NO: 25282567 NR Description: hypothetical protein [imported] - Arabidopsis >gi|4835796|gb|AAD30262.1|AC007296_23 Strong similarity to T11J7.14 putative cytochrome P450 from Arabidopsis thaliana and
  misc_feature (1)..(88): Homolog of NCBI NO: 25282567 NR Description: hypothetical protein [imported] - Arabidopsis >gi|4835796|gb|AAD30262.1|AC007296_23 Strong similarity to T11J7.14 putative cytochrome P450 from Arabidopsis thaliana and
  misc_feature (1)..(494): Homolog of NCBI NO: 13878362 NR Description: Cytochrome P450 71A12 >gi|25282591|pir||C84712
  misc_feature (1)..(494): Homolog of NCBI NO: 30684709 NR Description: cytochrome p450 71A12 [Arabidopsis thaliana] At2g30750/T11J7.14 [Arabidopsis thaliana]
  misc_feature (1)..(494): Homolog of NCBI NO: 15224570 NR Description: cytochrome p450 family; protein id: At2g30770.1
  misc_feature (1)..(411): Homolog of NCBI NO: 26452759 NR Description: putative cytochrome P450 [Arabidopsis thaliana]
  misc_feature (1)..(492): Homolog of NCBI NO: 15238664 NR Description: cytochrome P450-like protein; protein id: [Arabidopsis thaliana] >gi|13878366|sp|P58045|C71E_ARATH
  misc_feature (1)..(493): Homolog of NCBI NO: 15238652 NR Description: cytochrome p450 family; protein id: At5g24950.1
  misc_feature (1)..(493): Homolog of NCBI NO: 15239008 NR Description: cytochrome p450, putative; protein id: [Arabidopsis thaliana] >gi|13878374|sp|Q9FH66|C71G_ARATH P450 71A16 >gi|9759017|dbj|BAB09330.1| cytochrome P450
MTLMVSLCLTTLLTLLLLKKFLKRTAKKVNLPPSPWRIPVIGNLHQLSLHPHRSLHSLSLRYGPLMLLHFGRVPILVVSSSEAAHEILKTHDLKFANRPKSKAVHGLMNGGRDVVFGPYGEYWRQMKSVCILNLLTNKMVASFEKVREEEVNAMMEKLEKASCSSSAENLSELFVTLTSDVTSRVSLGKKYWEDETAGGLKKRVRQIMELLREFPIGDYVPALAWIDRINGFNSKIVEVSRAYSDLMEKVVQEHLEAGEHKADFVNILLSIEKEKNNGFKVQRNDIKFMILDMFIGGISTSSTLLEWIMTELIRNPECMKKLQNEIRSTIRPHGSYIKEKEVENMRYLKAVIKEVFRVHPPLPLILPRLLTEDVKVKGYDIAAGTEVLINAWSIHRDPAIWGPDAEEFKPERHLDSTLDYHGQDLKYIPFGSGRRICPGINLAMGLVEVTLANLVGRFDWSVDPGPNGDQPDLAEDFGLDVCRKNPLIAFPSSVA

SEQ ID NO: 91366 - protein, 492 aa, Arabidopsis thaliana
  peptide (1)..(492): Ceres Seq. ID no. 12727397
  misc_feature (1)..(492): Homolog of NCBI NO: 22329490 NR Description: cytochrome P450, putative; protein id: [Arabidopsis thaliana] >gi|13878394|sp|Q9SAB6|C71I_ARATH
  misc_feature (51)..(492): Homolog of NCBI NO: 25282567 NR Description: hypothetical protein [imported] - Arabidopsis >gi|4835796|gb|AAD30262.1|AC007296_23 Strong similarity to T11J7.14 putative cytochrome P450 from Arabidopsis thaliana and
  misc_feature (1)..(85): Homolog of NCBI NO: 25282567 NR Description: hypothetical protein [imported] - Arabidopsis >gi|4835796|gb|AAD30262.1|AC007296_23 Strong similarity to T11J7.14 putative cytochrome P450 from Arabidopsis thaliana and
  misc_feature (1)..(491): Homolog of NCBI NO: 13878362 NR Description: Cytochrome P450 71A12 >gi|25282591|pir||C84712
  misc_feature (1)..(491): Homolog of NCBI NO: 30684709 NR Description: cytochrome p450 71A12 [Arabidopsis thaliana] At2g30750/T11J7.14 [Arabidopsis thaliana]
  misc_feature (1)..(491): Homolog of NCBI NO: 15224570 NR Description: cytochrome p450 family; protein id: At2g30770.1
  misc_feature (1)..(408): Homolog of NCBI NO: 26452759 NR Description: putative cytochrome P450 [Arabidopsis thaliana]
  misc_feature (1)..(489): Homolog of NCBI NO: 15238664 NR Description: cytochrome P450-like protein; protein id: [Arabidopsis thaliana] >gi|13878366|sp|P58045|C71E_ARATH
  misc_feature (1)..(490): Homolog of NCBI NO: 15238652 NR Description: cytochrome p450 family; protein id: At5g24950.1
  misc_feature (1)..(490): Homolog of NCBI NO: 15239008 NR Description: cytochrome p450, putative; protein id: [Arabidopsis thaliana] >gi|13878374|sp|Q9FH66|C71G_ARATH P450 71A16 >gi|9759017|dbj|BAB09330.1| cytochrome P450
MVSLCLTTLLTLLLLKKFLKRTAKKVNLPPSPWRIPVIGNLHQLSLHPHRSLHSLSLRYGPLMLLHFGRVPILVVSSSEAAHEILKTHDLKFANRPKSKAVHGLMNGGRDVVFGPYGEYWRQMKSVCILNLLTNKMVASFEKVREEEVNAMMEKLEKASCSSSAENLSELFVTLTSDVTSRVSLGKKYWEDETAGGLKKRVRQIMELLREFPIGDYVPALAWIDRINGFNSKIVEVSRAYSDLMEKVVQEHLEAGEHKADFVNILLSIEKEKNNGFKVQRNDIKFMILDMFIGGISTSSTLLEWIMTELIRNPECMKKLQNEIRSTIRPHGSYIKEKEVENMRYLKAVIKEVFRVHPPLPLILPRLLTEDVKVKGYDIAAGTEVLINAWSIHRDPAIWGPDAEEFKPERHLDSTLDYHGQDLKYIPFGSGRRICPGINLAMGLVEVTLANLVGRFDWSVDPGPNGDQPDLAEDFGLDVCRKNPLIAFPSSVA

SEQ ID NO: 91367 - DNA, 1324 bp, Arabidopsis thaliana
  misc_feature (1)..(1324): Ceres Seq. ID no. 12727409
  misc_feature: MA Experiment ID: 20000180 Result: Up-regulated in Transcription
  misc_feature: MA Experiment 20000180 PARAMETER Experiment Name: At_Germinating_Seeds_P Parameter: Age (hr) Value: 24 vs. 0
  misc_feature: MA Experiment 20000180 PARAMETER Experiment Name: At_Germinating_Seeds_P Parameter: Tissue Value: Germinating Seeds
  misc_feature: MA Experiment ID: 20000184 Result: Up-regulated in Transcription
  misc_feature: MA Experiment 20000184 PARAMETER Experiment Name: At_Shoots__P Parameter: Age (day) Value: 7
  misc_feature: MA Experiment 20000184 PARAMETER Experiment Name: At_Shoots__P Parameter: Tissue Value: Shoots vs. Whole Plant
  misc_feature: MA Experiment ID: 20000185 Result: Up-regulated in Transcription
  misc_feature: MA Experiment 20000185 PARAMETER Experiment Name: At_Roots__P Parameter: Age (day) Value: 7 vs. 21
  misc_feature: MA Experiment 20000185 PARAMETER Experiment Name: At_Roots__P Parameter: Organism Value: A. thaliana
  misc_feature: MA Experiment 20000185 PARAMETER Experiment Name: At_Roots__P Parameter: Tissue Value: Roots vs. Whole Plant
  misc_feature: MA Experiment ID: 20000227 Result: Up-regulated in Transcription
  misc_feature: MA Experiment 20000227 PARAMETER Experiment Name: At_Root-Tips-vs-Tops_P Parameter: Tissue Value: Root Tips vs. Root Tops
  misc_feature: MA Experiment ID: 20000439 Result: Up-regulated in Transcription
  misc_feature: MA Experiment 20000439 PARAMETER Experiment Name: At_Roots__P Parameter: Age (day) Value: 14 vs. 21
  misc_feature: MA Experiment 20000439 PARAMETER Experiment Name: At_Roots__P Parameter: Organism Value: A. thaliana
  misc_feature: MA Experiment 20000439 PARAMETER Experiment Name: At_Roots__P Parameter: Tissue Value: Roots vs. Whole Plant
  misc_feature: MA Experiment ID: 20000527 Result: Down-regulated in Transcription
  misc_feature: MA Experiment 20000527 PARAMETER Experiment Name: At_10percent_PEG_P Parameter: Age (day) Value: 20
  misc_feature: MA Experiment 20000527 PARAMETER Experiment Name: At_10percent_PEG_P Parameter: Organism Value: A. thaliana
  misc_feature: MA Experiment 20000527 PARAMETER Experiment Name: At_10percent_PEG_P Parameter: Plant Line Value: WS
  misc_feature: MA Experiment 20000527 PARAMETER Experiment Name: At_10percent_PEG_P Parameter: Timepoint (day) Value: 20
  misc_feature: MA Experiment 20000527 PARAMETER Experiment Name: At_10percent_PEG_P Parameter: Tissue Value: Whole Plant
  misc_feature: MA Experiment 20000527 PARAMETER Experiment Name: At_10percent_PEG_P Parameter: Treatment Value: 10percent PEG vs. No Treatment
gcgcgacgtgcccaatcatttcttctgatccgatctgactctgcacccacccatcaatggcctccagatctctcaatggcgattccgacattgtgaagccgaggaagattgcactggtcaccggaatcactggccaagatggatcttacctgaccgagttcctgctcgagaaaggctacgaagttcacggcctcatccgacgatcctccaattttaacactcagcgactcaaccatatctacgttgatccccacaacgtcaacaaagctctcatgaagctccactacggtgatctctctgatgcctcctccctccgccgttggctcgacgtcatcaagcctgacgaggtctacaaccttgctgctcagtcccacgttgccgtctccttcgagatccctgattacactgctgacgttgtcgctactggagctcttcgtctcctggaggctgtcagatctcacaacattgacaatggccgcgccatcaagtactaccaggctggctcttcggagatgttcgggtcaactcctcctccgcagtcagagaccacgcccttccatccgagatctccctacgctgcgtccaaatgcgctgctcattggtacacagtcaattaccgagaggcctacggtctgtacgcctgcaacggaatcctcttcaaccacgagtcacctcgcagaggcgagaacttcgtgactcggaaaatcactcgggccttgggaaggatcaaggtcggattgcagaccaagctcttcctgggaaatatacaggcttcaagagactggggtttcgcaggagactacgtggaagcaatgtggctgatgctgcagcaggagaaaccagatgactatgtggttgcaactgaggaatcacacaccgtcaaggagtttctggacgtgtctttcgggtacgtggggctcaactggaaagaccatgtcgagatcgacaaaaggtacttccggcccacggaggtcgacaatctgaaaggagacgcaagcaaggcaaaggaaatgttggggtggaagccaaaagtagggttcgagaagctggtgaagatgatggtggacgaagaccttgagctggccaagagggagaaagtgctcgccgacgctggttacatggacgctcagcagcaaccttgatatggggaggtggcaaagaagagtaatcattatctgctttttcattgaaatgtaattttgtttcatttgttgttgttctctttcgttgtttcaagttgttcaactccatacactgccaatcgtccattgtggattttgtatcaaaaggcaaacaaagcatatttattacatatgaattttcc

SEQ ID NO: 91368 - protein, 361 aa, Arabidopsis thaliana
  peptide (1)..(361): Ceres Seq. ID no. 12727410
  misc_feature (19)..(343): Pfam Name: NAD dependent epimerase/dehydratase family Pfam Description: NAD dependent epimerase/dehydratase family
  misc_feature (1)..(361): Homolog of NCBI NO: 15239334 NR Description: GDP-D-mannose 4,6-dehydratase; GMD1 protein id: At5g66280.1, supported by cDNA: gi_6319185
  misc_feature (9)..(361): Homolog of NCBI NO: 1764100 NR Description: GDP-D-mannose-4,6-dehydratase [Arabidopsis
  misc_feature (9)..(361): Homolog of NCBI NO: 28373938 NR Description: Chain A, Crystal Structure Of The Gdp-Mannose 4,6-
  misc_feature (9)..(361): Homolog of NCBI NO: 21536808 NR Description: GDP-D-mannose-4,6-dehydratase MUR1 [Arabidopsis
  misc_feature (9)..(361): Homolog of NCBI NO: 15230418 NR Description: GDP-D-mannose-4,6-dehydratase (MUR1); protein id:
  misc_feature (16)..(361): Homolog of NCBI NO: 7939611 NR Description: root cap-specific protein [Zea mays]
  misc_feature (16)..(340): Homolog of NCBI NO: 22298176 NR Description: GDP-mannose 4,6-dehydratase [Thermosynechococcus
  misc_feature (17)..(340): Homolog of NCBI NO: 16329177 NR Description: GDP-D-mannose dehydratase [Synechocystis sp. PCC
  misc_feature (16)..(341): Homolog of NCBI NO: 23128163 NR Description: hypothetical protein [Nostoc punctiforme]
  misc_feature (17)..(341): Homolog of NCBI NO: 4097914 NR Description: putative GDP-D-mannose dehydratase [Anabaena sp.
MASRSLNGDSDIVKPRKIALVTGITGQDGSYLTEFLLEKGYEVHGLIRRSSNFNTQRLNHIYVDPHNVNKALMKLHYGDLSDASSLRRWLDVIKPDEVYNLAAQSHVAVSFEIPDYTADVVATGALRLLEAVRSHNIDNGRAIKYYQAGSSEMFGSTPPPQSETTPFHPRSPYAASKCAAHWYTVNYREAYGLYACNGILFNHESPRRGENFVTRKITRALGRIKVGLQTKLFLGNIQASRDWGFAGDYVEAMWLMLQQEKPDDYVVATEESHTVKEFLDVSFGYVGLNWKDHVEIDKRYFRPTEVDNLKGDASKAKEMLGWKPKVGFEKLVKMMVDEDLELAKREKVLADAGYMDAQQQP

SEQ ID NO: 91369 - protein, 289 aa, Arabidopsis thaliana
  peptide (1)..(289): Ceres Seq. ID no. 12727411
  misc_feature (1)..(271): Pfam Name: NAD dependent epimerase/dehydratase family Pfam Description: NAD dependent epimerase/dehydratase family
  misc_feature (1)..(289): Homolog of NCBI NO: 15239334 NR Description: GDP-D-mannose 4,6-dehydratase; GMD1 protein id: At5g66280.1, supported by cDNA: gi_6319185
  misc_feature (1)..(289): Homolog of NCBI NO: 1764100 NR Description: GDP-D-mannose-4,6-dehydratase [Arabidopsis
  misc_feature (1)..(289): Homolog of NCBI NO: 28373938 NR Description: Chain A, Crystal Structure Of The Gdp-Mannose 4,6-
  misc_feature (1)..(289): Homolog of NCBI NO: 21536808 NR Description: GDP-D-mannose-4,6-dehydratase MUR1 [Arabidopsis
  misc_feature (1)..(289): Homolog of NCBI NO: 15230418 NR Description: GDP-D-mannose-4,6-dehydratase (MUR1); protein id:
  misc_feature (1)..(289): Homolog of NCBI NO: 7939611 NR Description: root cap-specific protein [Zea mays]
  misc_feature (1)..(268): Homolog of NCBI NO: 22298176 NR Description: GDP-mannose 4,6-dehydratase [Thermosynechococcus
  misc_feature (1)..(268): Homolog of NCBI NO: 16329177 NR Description: GDP-D-mannose dehydratase [Synechocystis sp. PCC
  misc_feature (1)..(269): Homolog of NCBI NO: 23128163 NR Description: hypothetical protein [Nostoc punctiforme]
  misc_feature (1)..(269): Homolog of NCBI NO: 4097914 NR Description: putative GDP-D-mannose dehydratase [Anabaena sp.
MKLHYGDLSDASSLRRWLDVIKPDEVYNLAAQSHVAVSFEIPDYTADVVATGALRLLEAVRSHNIDNGRAIKYYQAGSSEMFGSTPPPQSETTPFHPRSPYAASKCAAHWYTVNYREAYGLYACNGILFNHESPRRGENFVTRKITRALGRIKVGLQTKLFLGNIQASRDWGFAGDYVEAMWLMLQQEKPDDYVVATEESHTVKEFLDVSFGYVGLNWKDHVEIDKRYFRPTEVDNLKGDASKAKEMLGWKPKVGFEKLVKMMVDEDLELAKREKVLADAGYMDAQQQP

SEQ ID NO: 91370 - protein, 209 aa, Arabidopsis thaliana
  peptide (1)..(209): Ceres Seq. ID no. 12727412
  misc_feature (1)..(191): Pfam Name: NAD dependent epimerase/dehydratase family Pfam Description: NAD dependent epimerase/dehydratase family
  misc_feature (1)..(209): Homolog of NCBI NO: 15239334 NR Description: GDP-D-mannose 4,6-dehydratase; GMD1 protein id: At5g66280.1, supported by cDNA: gi_6319185
  misc_feature (1)..(209): Homolog of NCBI NO: 1764100 NR Description: GDP-D-mannose-4,6-dehydratase [Arabidopsis
  misc_feature (1)..(209): Homolog of NCBI NO: 28373938 NR Description: Chain A, Crystal Structure Of The Gdp-Mannose 4,6-
  misc_feature (1)..(209): Homolog of NCBI NO: 21536808 NR Description: GDP-D-mannose-4,6-dehydratase MUR1 [Arabidopsis
  misc_feature (1)..(209): Homolog of NCBI NO: 15230418 NR Description: GDP-D-mannose-4,6-dehydratase (MUR1); protein id:
  misc_feature (1)..(209): Homolog of NCBI NO: 7939611 NR Description: root cap-specific protein [Zea mays]
  misc_feature (1)..(188): Homolog of NCBI NO: 22298176 NR Description: GDP-mannose 4,6-dehydratase [Thermosynechococcus
  misc_feature (1)..(188): Homolog of NCBI NO: 16329177 NR Description: GDP-D-mannose dehydratase [Synechocystis sp. PCC
  misc_feature (1)..(189): Homolog of NCBI NO: 23128163 NR Description: hypothetical protein [Nostoc punctiforme]
  misc_feature (1)..(189): Homolog of NCBI NO: 4097914 NR Description: putative GDP-D-mannose dehydratase [Anabaena sp.
MFGSTPPPQSETTPFHPRSPYAASKCAAHWYTVNYREAYGLYACNGILFNHESPRRGENFVTRKITRALGRIKVGLQTKLFLGNIQASRDWGFAGDYVEAMWLMLQQEKPDDYVVATEESHTVKEFLDVSFGYVGLNWKDHVEIDKRYFRPTEVDNLKGDASKAKEMLGWKPKVGFEKLVKMMVDEDLELAKREKVLADAGYMDAQQQP

SEQ ID NO: 91371 - DNA, 1669 bp, Arabidopsis thaliana
  misc_feature (1)..(1669): Ceres Seq. ID no. 12727415
  misc_feature: MA Experiment ID: 20000264 Result: Up-regulated in Transcription
  misc_feature: MA Experiment 20000264 PARAMETER Experiment Name: At_Open_Flower_P Parameter: Age (day) Value: 21
  misc_feature: MA Experiment 20000264 PARAMETER Experiment Name: At_Open_Flower_P Parameter: Plant Line Value: WS
  misc_feature: MA Experiment 20000264 PARAMETER Experiment Name: At_Open_Flower_P Parameter: Tissue Value: Open Flower vs. Whole Plant
  misc_feature: MA Experiment ID: 20000265 Result: Up-regulated in Transcription
  misc_feature: MA Experiment 20000265 PARAMETER Experiment Name: At_Open_Flower_P Parameter: Age (day) Value: 21
  misc_feature: MA Experiment 20000265 PARAMETER Experiment Name: At_Open_Flower_P Parameter: Plant Line Value: WS
  misc_feature: MA Experiment 20000265 PARAMETER Experiment Name: At_Open_Flower_P Parameter: Tissue Value: Closed Flower vs. Whole Plant
  misc_feature: MA Experiment ID: 20000286 Result: Up-regulated in Transcription
  misc_feature: MA Experiment 20000286 PARAMETER Experiment Name: At_Open_Flower_P Parameter: Age (day) Value: 21
  misc_feature: MA Experiment 20000286 PARAMETER Experiment Name: At_Open_Flower_P Parameter: Plant Line Value: WS
  misc_feature: MA Experiment 20000286 PARAMETER Experiment Name: At_Open_Flower_P Parameter: Tissue Value: Half Open vs. Whole Plant
  misc_feature: MA Experiment ID: 20000451 Result: Up-regulated in Transcription
  misc_feature: MA Experiment 20000451 PARAMETER Experiment Name: At_CS6879_Shoots-Roots_P Parameter: Age (day) Value: 14
  misc_feature: MA Experiment 20000451 PARAMETER Experiment Name: At_CS6879_Shoots-Roots_P Parameter: Organism Value: A. thaliana
  misc_feature: MA Experiment 20000451 PARAMETER Experiment Name: At_CS6879_Shoots-Roots_P Parameter: Plant Line Value: CS6879 vs. WS
  misc_feature: MA Experiment 20000451 PARAMETER Experiment Name: At_CS6879_Shoots-Roots_P Parameter: Tissue Value: Roots
  misc_feature: MA Experiment ID: 20000573 Result: Up-regulated in Transcription
  misc_feature: MA Experiment 20000573 PARAMETER Experiment Name: At_100uM_ABA_Mutants__P Parameter: Organism Value: A. thaliana
  misc_feature: MA Experiment 20000573 PARAMETER Experiment Name: At_100uM_ABA_Mutants__P Parameter: Plant Line Value: CS22 vs. Ler wt
  misc_feature: MA Experiment 20000573 PARAMETER Experiment Name: At_100uM_ABA_Mutants__P Parameter: Timepoint (hr) Value: N/A
  misc_feature: MA Experiment 20000573 PARAMETER Experiment Name: At_100uM_ABA_Mutants__P Parameter: Tissue Value: Whole Plant
  misc_feature: MA Experiment 20000573 PARAMETER Experiment Name: At_100uM_ABA_Mutants__P Parameter: Treatment Value: None
agagaatttaataagagaggaagagtattaaggtgatggcggcgttgcagagcgcgagacagagaaagaaacctctctgagatacatctctctctctctctctatcccctcttaaatacactccataccgacaaaccaacttttttctcagtactaaaagaaacctctattcgatttctaaacaaaccctagatatagactactctacattcttccattaagttaatctctttcgtcttcttcttcttcatcctctcataattaaagatctctatcaagagagagatcttttattgtcttcttctgttaaaatcttttgatagatcttcactctctgaaagtcaagatcttagtctaggcaagtaaatatgtggtaaagcaaagcccttcttgaaattggtcatatatggctggtggtatcggaaaatggcaggatttttctcgttaggacacggcggaggaggaaacactccagacaaccacagaacaaacactaataatccttcttcatcgggaacagaatcttggctttggtgcagaaaccctaactctaacgctgacggtggagaagctggtccttcttacaaaggaacccttgagctatggcaacacccaaacaatcaagaaatcattttccagcagcagcagcaacagcaacaaaggctggatctttacacttccgctgcgggtttaggtgttggaccgagcaaccggagcttaattgaaacttccggcggtgcgttgatgatgatgagaagcggtagcggtagcggcggaccaagctgccaggattgtgggaatcaatctaagaaagactgctctcacatgagatgtaggacttgctgcaagagccgtggccttgactgtcccactcacgtgaagagcacgtgggttcctgccgctaaacgccgagaacgccagcagcagctttctaccggtcagcaaccgcagcaactgggagggagcgtccctaaacgacagagagagcgtatcccggcgagatcgacttccatggcctacactcgtataccttctaacaacacttcagggttggaggttgggaattttccgccggaagttagctcgtcggcagtttttcggtgcgtgcgtgtgagttccgtagatgatgaagaagaagagtatgcatataaaacagctgtgagtataggcggtcacgtcttcaaaggtgttctctacgatcaaggcccggccgagagaagctcctcgggcggtggatctcagccgttgaatctcataaccgcaggcccatcggcctcatcatcaagcccaaacgtgagctgcaacaatggagtcgttggctccacttcagatcattatatcgatcctgcctcacttaattatcctactcccattaacactttcatgactggtacgcacttcttctccaactcaagatcttgaattccacacagagagagtacaacaaatcataacttttttttagattcttacggtagaattagggttttaaaacatcttcggaggtgaagattataacgtactaatcttggttttcaaaagtaattaactaagggagataatgttctattaaaacaattgttacctgatcttttattattaagttcaaattttgtaggtataatgttaatgtaatagtatactccaattttcaactgttacaaaagtc

SEQ ID NO: 91372 - protein, 331 aa, Arabidopsis thaliana
  peptide (1)..(331): Ceres Seq. ID no. 12727416
  misc_feature (111)..(264): Pfam Name: Domain of unknown function (DUF702) Pfam Description: Domain of unknown function (DUF702)
  misc_feature (1)..(331): Homolog of NCBI NO: 15239350 NR Description: zinc finger protein SHI-like; protein id: supported by cDNA: gi_4929802 [Arabidopsis thaliana] putative zinc finger protein SHI [Arabidopsis thaliana]
  misc_feature (39)..(227): Homolog of NCBI NO: 15230389 NR Description: putative protein; protein id: At3g51060.1
  misc_feature (1)..(330): Homolog of NCBI NO: 15223669 NR Description: hypothetical protein; protein id: At1g19790.1
  misc_feature (58)..(328): Homolog of NCBI NO: 15234365 NR Description: putative protein; protein id: At4g36260.1
  misc_feature (1)..(331): Homolog of NCBI NO: 15222285 NR Description: unknown protein; protein id: At1g75520.1
  misc_feature (82)..(260): Homolog of NCBI NO: 34906658 NR Description: putative LRP(lateral root primordia) 1 [Oryza
  misc_feature (109)..(265): Homolog of NCBI NO: 15224110 NR Description: unknown protein; protein id: At2g18120.1
  misc_feature (90)..(202): Homolog of NCBI NO: 15242760 NR Description: putative protein; protein id: At5g33210.1
  misc_feature (107)..(291): Homolog of NCBI NO: 33945875 NR Description: hypothetical protein [Lotus corniculatus var.
  misc_feature (1)..(231): Homolog of NCBI NO: 15230389 NR Description: putative protein; protein id: At3g51060.1
MAGFFSLGHGGGGNTPDNHRTNTNNPSSSGTESWLWCRNPNSNADGGEAGPSYKGTLELWQHPNNQEIIFQQQQQQQQRLDLYTSAAGLGVGPSNRSLIETSGGALMMMRSGSGSGGPSCQDCGNQSKKDCSHMRCRTCCKSRGLDCPTHVKSTWVPAAKRRERQQQLSTGQQPQQLGGSVPKRQRERIPARSTSMAYTRIPSNNTSGLEVGNFPPEVSSSAVFRCVRVSSVDDEEEEYAYKTAVSIGGHVFKGVLYDQGPAERSSSGGGSQPLNLITAGPSASSSSPNVSCNNGVVGSTSDHYIDPASLNYPTPINTFMTGTHFFSNSRS

SEQ ID NO: 91373 - protein, 225 aa, Arabidopsis thaliana
  peptide (1)..(225): Ceres Seq. ID no. 12727417
  misc_feature (5)..(158): Pfam Name: Domain of unknown function (DUF702) Pfam Description: Domain of unknown function (DUF702)
  misc_feature (1)..(225): Homolog of NCBI NO: 15239350 NR Description: zinc finger protein SHI-like; protein id: supported by cDNA: gi_4929802 [Arabidopsis thaliana] putative zinc finger protein SHI [Arabidopsis thaliana]
  misc_feature (1)..(121): Homolog of NCBI NO: 15230389 NR Description: putative protein; protein id: At3g51060.1
  misc_feature (1)..(224): Homolog of NCBI NO: 15223669 NR Description: hypothetical protein; protein id: At1g19790.1
  misc_feature (1)..(222): Homolog of NCBI NO: 15234365 NR Description: putative protein; protein id: At4g36260.1
  misc_feature (1)..(225): Homolog of NCBI NO: 15222285 NR Description: unknown protein; protein id: At1g75520.1
  misc_feature (1)..(154): Homolog of NCBI NO: 34906658 NR Description: putative LRP(lateral root primordia) 1 [Oryza
  misc_feature (3)..(159): Homolog of NCBI NO: 15224110 NR Description: unknown protein; protein id: At2g18120.1
  misc_feature (1)..(96): Homolog of NCBI NO: 15242760 NR Description: putative protein; protein id: At5g33210.1
  misc_feature (1)..(185): Homolog of NCBI NO: 33945875 NR Description: hypothetical protein [Lotus corniculatus var.
  misc_feature (1)..(125): Homolog of NCBI NO: 15230389 NR Description: putative protein; protein id: At3g51060.1
MMMRSGSGSGGPSCQDCGNQSKKDCSHMRCRTCCKSRGLDCPTHVKSTWVPAAKRRERQQQLSTGQQPQQLGGSVPKRQRERIPARSTSMAYTRIPSNNTSGLEVGNFPPEVSSSAVFRCVRVSSVDDEEEEYAYKTAVSIGGHVFKGVLYDQGPAERSSSGGGSQPLNLITAGPSASSSSPNVSCNNGVVGSTSDHYIDPASLNYPTPINTFMTGTHFFSNSRS

SEQ ID NO: 91374 - protein, 224 aa, Arabidopsis thaliana
  peptide (1)..(224): Ceres Seq. ID no. 12727418
  misc_feature (4)..(157): Pfam Name: Domain of unknown function (DUF702) Pfam Description: Domain of unknown function (DUF702)
  misc_feature (1)..(224): Homolog of NCBI NO: 15239350 NR Description: zinc finger protein SHI-like; protein id: supported by cDNA: gi_4929802 [Arabidopsis thaliana] putative zinc finger protein SHI [Arabidopsis thaliana]
  misc_feature (1)..(120): Homolog of NCBI NO: 15230389 NR Description: putative protein; protein id: At3g51060.1
  misc_feature (1)..(223): Homolog of NCBI NO: 15223669 NR Description: hypothetical protein; protein id: At1g19790.1
  misc_feature (1)..(221): Homolog of NCBI NO: 15234365 NR Description: putative protein; protein id: At4g36260.1
  misc_feature (1)..(224): Homolog of NCBI NO: 15222285 NR Description: unknown protein; protein id: At1g75520.1
  misc_feature (1)..(153): Homolog of NCBI NO: 34906658 NR Description: putative LRP(lateral root primordia) 1 [Oryza
  misc_feature (2)..(158): Homolog of NCBI NO: 15224110 NR Description: unknown protein; protein id: At2g18120.1
  misc_feature (1)..(95): Homolog of NCBI NO: 15242760 NR Description: putative protein; protein id: At5g33210.1
  misc_feature (1)..(184): Homolog of NCBI NO: 33945875 NR Description: hypothetical protein [Lotus corniculatus var.
  misc_feature (1)..(124): Homolog of NCBI NO: 15230389 NR Description: putative protein; protein id: At3g51060.1
MMRSGSGSGGPSCQDCGNQSKKDCSHMRCRTCCKSRGLDCPTHVKSTWVPAAKRRERQQQLSTGQQPQQLGGSVPKRQRERIPARSTSMAYTRIPSNNTSGLEVGNFPPEVSSSAVFRCVRVSSVDDEEEEYAYKTAVSIGGHVFKGVLYDQGPAERSSSGGGSQPLNLITAGPSASSSSPNVSCNNGVVGSTSDHYIDPASLNYPTPINTFMTGTHFFSNSRS

SEQ ID NO: 91375 - DNA, 1599 bp, Arabidopsis thaliana
  misc_feature (1)..(1599): Ceres Seq. ID no. 12727429
  misc_feature: MA Experiment ID: 20000307 Result: Down-regulated in Transcription
  misc_feature: MA Experiment 20000307 PARAMETER Experiment Name: At_Germinating_Seeds_Sub_P Parameter: Age (hr) Value: 24 vs. 0
  misc_feature: MA Experiment 20000307 PARAMETER Experiment Name: At_Germinating_Seeds_Sub_P Parameter: Organism Value: A. thaliana
  misc_feature: MA Experiment 20000307 PARAMETER Experiment Name: At_Germinating_Seeds_Sub_P Parameter: Plant Line Value: WS
  misc_feature: MA Experiment 20000307 PARAMETER Experiment Name: At_Germinating_Seeds_Sub_P Parameter: Tissue Value: Germinating Seeds
  misc_feature: MA Experiment ID: 20000328 Result: Down-regulated in Transcription
  misc_feature: MA Experiment 20000328 PARAMETER Experiment Name: At_42deg_Heat_Sub_P Parameter: Age (day) Value: 14
  misc_feature: MA Experiment 20000328 PARAMETER Experiment Name: At_42deg_Heat_Sub_P Parameter: Organism Value: A. thaliana
  misc_feature: MA Experiment 20000328 PARAMETER Experiment Name: At_42deg_Heat_Sub_P Parameter: Plant Line Value: WS
  misc_feature: MA Experiment 20000328 PARAMETER Experiment Name: At_42deg_Heat_Sub_P Parameter: Temperature (deg C) Value: 42 vs. 22
  misc_feature: MA Experiment 20000328 PARAMETER Experiment Name: At_42deg_Heat_Sub_P Parameter: Timepoint (hr) Value: 6
  misc_feature: MA Experiment 20000328 PARAMETER Experiment Name: At_42deg_Heat_Sub_P Parameter: Tissue Value: Aerial
atgttcgcatgtttgcgtattggacgctttattcgtctgggtaacgttaccgttaaatccactaatttggtactgaggtgtgtctttatccgaaattttgccacccatgccgaccacctgttcgacgaattgccgcaacgagacctctcctcacttaactctcaactctcgtctcacctccgcagtggaaacccaaatgacaccttggctctctttcttcagattcatagggctagccctgatctcagctcgcacactttcactccggttctcggggcctgttccctcttgtcgtacccagaaacaggacgccaagttcacgccttgatgatcaaacaaggcgctgaaacaggaaccatatccaaaactgcgcttattgacatgtactccaagtacggacacttggttgattccgttagggtattcgaaagcgttgaggaaaaagatctcgtctcatggaatgctctgctttcgggtttccttagaaacggtaaaggcaaagaagctcttggcgttttcgcagctatgtatagagaaagagtagaaatcagtgagttcactttgtcttctgttgttaaaacttgtgcctctctcaagattttgcagcaagggaagcaagttcatgccatggtggtggtcaccggacgcgatctcgtggttttaggaactgcaatgattagtttttactcgagtgtaggtttgatcaatgaagccatgaaggtttataacagtttgaatgttcatacggacgaggtgatgttgaattctttgatatcaggttgcattcgaaaccgaaattacaaggaagcgtttctgcttatgagtaggcagagacccaatgtgagagtgctcagtagctctcttgctggctgctctgataactctgatctgtggattggtaaacagatacactgtgtcgctttacgtaatggtttcgtttcagattctaagctatgcaatggcttaatggatatgtatggaaaatgcggtcagattgtgcaagcgcgtactattttcagagctattccatctaaaagtgtggtttcttggacgagtatgatagatgcgtatgcggttaatggggatggggttaaagctcttgaaatcttcagggaaatgtgtgaagaaggaagcggagttttaccgaattcagtgacatttcttgttgttatatcggcttgtgcacacgcaggactagttaaagaaggtaaggaatgttttggtatgatgaaggagaagtatcggttggttcctggaacagagcattacgtatgcttcatcgatatcttaagcaaggctggtgagacagaagagatatggagattagtcgagagaatgatggagaacgataatcaaagcattccttgtgctatatgggtagcggtactcagtgcttgtagtcttaatatggatcttacgcgaggcgaatatgtagcaaggaggcttatggaagagacgggtccagagaacgcgagcatttatgtgttggtttcgaatttctatgcagcgatggggaagtgggatgtcgttgaagaattgagaggaaaactgaagaataaaggtttggttaaaacagcaggacacagcttattcatatga

SEQ ID NO: 91376 - protein, 532 aa, Arabidopsis thaliana
  peptide (1)..(532): Ceres Seq. ID no. 12727430
  misc_feature (421)..(455): Pfam Name: PPR repeat Pfam Description: PPR repeat
  misc_feature (1)..(532): Homolog of NCBI NO: 15239977 NR Description: putative protein; protein id: At5g66500.1
  misc_feature (96)..(529): Homolog of NCBI NO: 40737026 NR Description: putative pentatricopeptide repeat protein [Oryza
  misc_feature (13)..(529): Homolog of NCBI NO: 15228590 NR Description: hypothetical protein; protein id: At3g03580.1 thaliana] >gi|6091764|gb|AAF03474.1|AC009327_13 hypothetical [Arabidopsis thaliana] >gi|28393735|gb|AAO42278.1| unknown
  misc_feature (37)..(529): Homolog of NCBI NO: 34906110 NR Description: P0020E09.15 [Oryza sativa (japonica
  misc_feature (37)..(529): Homolog of NCBI NO: 15241714 NR Description: putative protein; protein id: At5g39350.1
  misc_feature (15)..(529): Homolog of NCBI NO: 15240444 NR Description: putative protein; protein id: At5g27110.1
  misc_feature (40)..(529): Homolog of NCBI NO: 18418348 NR Description: putative protein; protein id: At4g33990.1
  misc_feature (37)..(530): Homolog of NCBI NO: 34897884 NR Description: Similar to Arabidopsis thaliana DNA chromosome 4,
  misc_feature (16)..(529): Homolog of NCBI NO: 18483237 NR Description: putative vegetative storage protein [Sorghum
  misc_feature (40)..(529): Homolog of NCBI NO: 15226150 NR Description: hypothetical protein; protein id: At2g33680.1
MFACLRIGRFIRLGNVTVKSTNLVLRCVFIRNFATHADHLFDELPQRDLSSLNSQLSSHLRSGNPNDTLALFLQIHRASPDLSSHTFTPVLGACSLLSYPETGRQVHALMIKQGAETGTISKTALIDMYSKYGHLVDSVRVFESVEEKDLVSWNALLSGFLRNGKGKEALGVFAAMYRERVEISEFTLSSVVKTCASLKILQQGKQVHAMVVVTGRDLVVLGTAMISFYSSVGLINEAMKVYNSLNVHTDEVMLNSLISGCIRNRNYKEAFLLMSRQRPNVRVLSSSLAGCSDNSDLWIGKQIHCVALRNGFVSDSKLCNGLMDMYGKCGQIVQARTIFRAIPSKSVVSWTSMIDAYAVNGDGVKALEIFREMCEEGSGVLPNSVTFLVVISACAHAGLVKEGKECFGMMKEKYRLVPGTEHYVCFIDILSKAGETEEIWRLVERMMENDNQSIPCAIWVAVLSACSLNMDLTRGEYVARRLMEETGPENASIYVLVSNFYAAMGKWDVVEELRGKLKNKGLVKTAGHSLFI

SEQ ID NO: 91377 - protein, 423 aa, Arabidopsis thaliana
  peptide (1)..(423): Ceres Seq. ID no. 12727431
  misc_feature (312)..(346): Pfam Name: PPR repeat Pfam Description: PPR repeat
  misc_feature (1)..(423): Homolog of NCBI NO: 15239977 NR Description: putative protein; protein id: At5g66500.1
  misc_feature (1)..(420): Homolog of NCBI NO: 40737026 NR Description: putative pentatricopeptide repeat protein [Oryza
  misc_feature (1)..(420): Homolog of NCBI NO: 15228590 NR Description: hypothetical protein; protein id: At3g03580.1 thaliana] >gi|6091764|gb|AAF03474.1|AC009327_13 hypothetical [Arabidopsis thaliana] >gi|28393735|gb|AAO42278.1| unknown
  misc_feature (1)..(420): Homolog of NCBI NO: 34906110 NR Description: P0020E09.15 [Oryza sativa (japonica
  misc_feature (1)..(420): Homolog of NCBI NO: 15241714 NR Description: putative protein; protein id: At5g39350.1
  misc_feature (1)..(420): Homolog of NCBI NO: 15240444 NR Description: putative protein; protein id: At5g27110.1
  misc_feature (1)..(420): Homolog of NCBI NO: 18418348 NR Description: putative protein; protein id: At4g33990.1
  misc_feature (1)..(421): Homolog of NCBI NO: 34897884 NR Description: Similar to Arabidopsis thaliana DNA chromosome 4,
  misc_feature (1)..(420): Homolog of NCBI NO: 18483237 NR Description: putative vegetative storage protein [Sorghum
  misc_feature (1)..(420): Homolog of NCBI NO: 15226150 NR Description: hypothetical protein; protein id: At2g33680.1
MIKQGAETGTISKTALIDMYSKYGHLVDSVRVFESVEEKDLVSWNALLSGFLRNGKGKEALGVFAAMYRERVEISEFTLSSVVKTCASLKILQQGKQVHAMVVVTGRDLVVLGTAMISFYSSVGLINEAMKVYNSLNVHTDEVMLNSLISGCIRNRNYKEAFLLMSRQRPNVRVLSSSLAGCSDNSDLWIGKQIHCVALRNGFVSDSKLCNGLMDMYGKCGQIVQARTIFRAIPSKSVVSWTSMIDAYAVNGDGVKALEIFREMCEEGSGVLPNSVTFLVVISACAHAGLVKEGKECFGMMKEKYRLVPGTEHYVCFIDILSKAGETEEIWRLVERMMENDNQSIPCAIWVAVLSACSLNMDLTRGEYVARRLMEETGPENASIYVLVSNFYAAMGKWDVVEELRGKLKNKGLVKTAGHSLFI

SEQ ID NO: 91378 - protein, 405 aa, Arabidopsis thaliana
  peptide (1)..(405): Ceres Seq. ID no. 12727432
  misc_feature (294)..(328): Pfam Name: PPR repeat Pfam Description: PPR repeat
  misc_feature (1)..(405): Homolog of NCBI NO: 15239977 NR Description: putative protein; protein id: At5g66500.1
  misc_feature (1)..(402): Homolog of NCBI NO: 40737026 NR Description: putative pentatricopeptide repeat protein [Oryza
  misc_feature (1)..(402): Homolog of NCBI NO: 15228590 NR Description: hypothetical protein; protein id: At3g03580.1 thaliana] >gi|6091764|gb|AAF03474.1|AC009327_13 hypothetical [Arabidopsis thaliana] >gi|28393735|gb|AAO42278.1| unknown
  misc_feature (1)..(402): Homolog of NCBI NO: 34906110 NR Description: P0020E09.15 [Oryza sativa (japonica
  misc_feature (1)..(402): Homolog of NCBI NO: 15241714 NR Description: putative protein; protein id: At5g39350.1
  misc_feature (1)..(402): Homolog of NCBI NO: 15240444 NR Description: putative protein; protein id: At5g27110.1
  misc_feature (1)..(402): Homolog of NCBI NO: 18418348 NR Description: putative protein; protein id: At4g33990.1
  misc_feature (1)..(403): Homolog of NCBI NO: 34897884 NR Description: Similar to Arabidopsis thaliana DNA chromosome 4,
  misc_feature (1)..(402): Homolog of NCBI NO: 18483237 NR Description: putative vegetative storage protein [Sorghum
  misc_feature (1)..(402): Homolog of NCBI NO: 15226150 NR Description: hypothetical protein; protein id: At2g33680.1
MYSKYGHLVDSVRVFESVEEKDLVSWNALLSGFLRNGKGKEALGVFAAMYRERVEISEFTLSSVVKTCASLKILQQGKQVHAMVVVTGRDLVVLGTAMISFYSSVGLINEAMKVYNSLNVHTDEVMLNSLISGCIRNRNYKEAFLLMSRQRPNVRVLSSSLAGCSDNSDLWIGKQIHCVALRNGFVSDSKLCNGLMDMYGKCGQIVQARTIFRAIPSKSVVSWTSMIDAYAVNGDGVKALEIFREMCEEGSGVLPNSVTFLVVISACAHAGLVKEGKECFGMMKEKYRLVPGTEHYVCFIDILSKAGETEEIWRLVERMMENDNQSIPCAIWVAVLSACSLNMDLTRGEYVARRLMEETGPENASIYVLVSNFYAAMGKWDVVEELRGKLKNKGLVKTAGHSLFI

SEQ ID NO: 91379 - DNA, 1863 bp, Arabidopsis thaliana
  misc_feature (1)..(1863): Ceres Seq. ID no. 12727433
  misc_feature: MA Experiment ID: 20000307 Result: Up-regulated in Transcription
  misc_feature: MA Experiment 20000307 PARAMETER Experiment Name: At_Germinating_Seeds_Sub_P Parameter: Age (hr) Value: 24 vs. 0
  misc_feature: MA Experiment 20000307 PARAMETER Experiment Name: At_Germinating_Seeds_Sub_P Parameter: Organism Value: A. thaliana
  misc_feature: MA Experiment 20000307 PARAMETER Experiment Name: At_Germinating_Seeds_Sub_P Parameter: Plant Line Value: WS
  misc_feature: MA Experiment 20000307 PARAMETER Experiment Name: At_Germinating_Seeds_Sub_P Parameter: Tissue Value: Germinating Seeds
  misc_feature: MA Experiment ID: 20000314 Result: Down-regulated in Transcription
  misc_feature: MA Experiment 20000314 PARAMETER Experiment Name: At_14day_Shoots-Roots_Sub_P Parameter: Age (day) Value: 14
  misc_feature: MA Experiment 20000314 PARAMETER Experiment Name: At_14day_Shoots-Roots_Sub_P Parameter: Organism Value: A. thaliana
  misc_feature: MA Experiment 20000314 PARAMETER Experiment Name: At_14day_Shoots-Roots_Sub_P Parameter: Plant Line Value: WS
  misc_feature: MA Experiment 20000314 PARAMETER Experiment Name: At_14day_Shoots-Roots_Sub_P Parameter: Tissue Value: Roots vs. Whole Plant
  misc_feature: MA Experiment ID: 20000347 Result: Down-regulated in Transcription
  misc_feature: MA Experiment 20000347 PARAMETER Experiment Name: At_2mM_SA_Sub_P Parameter: Age (day) Value: 14
  misc_feature: MA Experiment 20000347 PARAMETER Experiment Name: At_2mM_SA_Sub_P Parameter: Organism Value: A. thaliana
  misc_feature: MA Experiment 20000347 PARAMETER Experiment Name: At_2mM_SA_Sub_P Parameter: Plant Line Value: WS
  misc_feature: MA Experiment 20000347 PARAMETER Experiment Name: At_2mM_SA_Sub_P Parameter: Timepoint (hr) Value: 6
  misc_feature: MA Experiment 20000347 PARAMETER Experiment Name: At_2mM_SA_Sub_P Parameter: Tissue Value: Aerial
  misc_feature: MA Experiment 20000347 PARAMETER Experiment Name: At_2mM_SA_Sub_P Parameter: Treatment Value: 2mM SA vs. No Treatment
atgaatgtgatctcatgctccttctcattggaacataatctctacgagacaatgtcttgtctccagagatgctcaaagcaagaagaactgaagcaaatccacgctcgcatgctgaaaactggcttgatgcaggattcttatgcaatcacaaagtttctttctttctgcatttcttcaacgtcttccgactttttgccttatgcccagattgtgtttgacgggtttgatcgaccagatactttcttgtggaacctaatgatcagagggttctcgtgctcagacgaacccgagaggtctcttctcctgtatcaacgtatgctctgttcttcagctcctcataacgcgtatacttttccgtctcttctcaaagcttgttcgaacctatctgcatttgaagaaacaacgcaaattcacgcacagatcacgaaacttggatatgaaaatgatgtctatgcagtgaattctctgattaattcatatgctgtgaccgggaatttcaagctagctcaccttctctttgacagaatccccgaacctgatgatgtctcgtggaactctgtgatcaaaggttatgtaaaagctggaaaaatggatattgcattaacgttattcaggaaaatggcagaaaagaatgctatatcatggactacgatgatctctgggtatgttcaagcagacatgaacaaggaagctctgcaattgtttcatgaaatgcagaattcagatgttgagcctgataatgtttccctagctaatgctctctcagcttgtgctcagctcggagcactcgagcaagggaaatggatccattcctatcttaataagacaagaatcagaatggactctgttttgggttgtgttcttatagatatgtatgcaaagtgcggtgaaatggaagaagctttggaagttttcaagaatattaagaaaaaatcagtgcaagcatggacagctttgatttcaggatatgcataccatggccatggaagagaagctattagcaaattcatggagatgcaaaagatgggaattaagccaaatgtgatcactttcactgcggttctcacggcttgcagctacacaggactagttgaagaaggaaagttgatattctacagcatggagagagattacaacctgaaaccgaccatcgagcattatggctgtattgttgatttactcggtcgagctggattgcttgatgaagcaaaacgtttcattcaggagatgccattgaagccaaatgctgtgatatggggtgcgttgctcaaagcctgtcgaattcacaaaaacatcgaattgggagaggaaattggagaaatcttaattgcaatagatccatatcatggcggaagatatgttcataaggcaaatattcatgctatggataaaaagtgggacaaagcagctgaaacaagaagattgatgaaagaacaaggagtagcaaaagttccaggatgtagtacaattagcttggaagggaccacacacgagtttttagcgggagaccgatcacacccagagatagagaaaattcaatctaaatggagaatcatgagaaggaaacttgaggaaaacgggtacgtaccagagttagaagagatgctgcttgatctagttgatgatgatgaaagagaggctattgtgcatcagcatagcgagaaattggctattacatacgggttaatcaagactaaaccaggaaccattattcgtataatgaagaatctccgagtatgcaaagattgtcacaaagtaacgaagctcatctctaagatatacaagagggatattgtaatgagagataggacaaggttccatcatttcagagatgggaaatgcagttgtggggactactggtaa

SEQ ID NO: 91380 - protein, 620 aa, Arabidopsis thaliana
  peptide (1)..(620): Ceres Seq. ID no. 12727434
  misc_feature (81)..(115): Pfam Name: PPR repeat Pfam Description: PPR repeat
  misc_feature (2)..(620): Homolog of NCBI NO: 15240085 NR Description: selenium-binding protein-like; protein id:
  misc_feature (28)..(620): Homolog of NCBI NO: 10178152 NR Description: selenium-binding protein-like [Arabidopsis
  misc_feature (21)..(620): Homolog of NCBI NO: 15235537 NR Description: putative protein; protein id: At4g37380.1
  misc_feature (31)..(620): Homolog of NCBI NO: 15227619 NR Description: hypothetical protein; protein id: At2g29760.1
  misc_feature (28)..(611): Homolog of NCBI NO: 15242684 NR Description: putative protein; protein id: At5g40410.1
  misc_feature (33)..(620): Homolog of NCBI NO: 34910298 NR Description: P0013F10.8 [Oryza sativa (japonica
  misc_feature (101)..(620): Homolog of NCBI NO: 15239745 NR Description: selenium-binding protein-like; protein id:
  misc_feature (3)..(620): Homolog of NCBI NO: 15223099 NR Description: unknown protein; protein id: At1g08070.1 thaliana] >gi|8778839|gb|AAF79838.1|AC026875_18 T6D22.15
  misc_feature (25)..(620): Homolog of NCBI NO: 34910594 NR Description: putative selenium-binding protein [Oryza sativa
  misc_feature (185)..(620): Homolog of NCBI NO: 11281371 NR Description: hypothetical protein T8H10.30 - Arabidopsis >gi|6706414|emb|CAB66100.1| putative protein [Arabidopsis
MNVISCSFSLEHNLYETMSCLQRCSKQEELKQIHARMLKTGLMQDSYAITKFLSFCISSTSSDFLPYAQIVFDGFDRPDTFLWNLMIRGFSCSDEPERSLLLYQRMLCSSAPHNAYTFPSLLKACSNLSAFEETTQIHAQITKLGYENDVYAVNSLINSYAVTGNFKLAHLLFDRIPEPDDVSWNSVIKGYVKAGKMDIALTLFRKMAEKNAISWTTMISGYVQADMNKEALQLFHEMQNSDVEPDNVSLANALSACAQLGALEQGKWIHSYLNKTRIRMDSVLGCVLIDMYAKCGEMEEALEVFKNIKKKSVQAWTALISGYAYHGHGREAISKFMEMQKMGIKPNVITFTAVLTACSYTGLVEEGKLIFYSMERDYNLKPTIEHYGCIVDLLGRAGLLDEAKRFIQEMPLKPNAVIWGALLKACRIHKNIELGEEIGEILIAIDPYHGGRYVHKANIHAMDKKWDKAAETRRLMKEQGVAKVPGCSTISLEGTTHEFLAGDRSHPEIEKIQSKWRIMRRKLEENGYVPELEEMLLDLVDDDEREAIVHQHSEKLAITYGLIKTKPGTIIRIMKNLRVCKDCHKVTKLISKIYKRDIVMRDRTRFHHFRDGKCSCGDYW

SEQ ID NO: 91381 - protein, 603 aa, Arabidopsis thaliana
  peptide (1)..(603): Ceres Seq. ID no. 12727435
  misc_feature (64)..(98): Pfam Name: PPR repeat Pfam Description: PPR repeat
  misc_feature (1)..(603): Homolog of NCBI NO: 15240085 NR Description: selenium-binding protein-like; protein id:
  misc_feature (11)..(603): Homolog of NCBI NO: 10178152 NR Description: selenium-binding protein-like [Arabidopsis
  misc_feature (4)..(603): Homolog of NCBI NO: 15235537 NR Description: putative protein; protein id: At4g37380.1
  misc_feature (14)..(603): Homolog of NCBI NO: 15227619 NR Description: hypothetical protein; protein id: At2g29760.1
  misc_feature (11)..(594): Homolog of NCBI NO: 15242684 NR Description: putative protein; protein id: At5g40410.1
  misc_feature (16)..(603): Homolog of NCBI NO: 34910298 NR Description: P0013F10.8 [Oryza sativa (japonica
  misc_feature (84)..(603): Homolog of NCBI NO: 15239745 NR Description: selenium-binding protein-like; protein id:
  misc_feature (1)..(603): Homolog of NCBI NO: 15223099 NR Description: unknown protein; protein id: At1g08070.1 thaliana] >gi|8778839|gb|AAF79838.1|AC026875_18 T6D22.15
  misc_feature (8)..(603): Homolog of NCBI NO: 34910594 NR Description: putative selenium-binding protein [Oryza sativa
  misc_feature (168)..(603): Homolog of NCBI NO: 11281371 NR Description: hypothetical protein T8H10.30 - Arabidopsis >gi|6706414|emb|CAB66100.1| putative protein [Arabidopsis
MSCLQRCSKQEELKQIHARMLKTGLMQDSYAITKFLSFCISSTSSDFLPYAQIVFDGFDRPDTFLWNLMIRGFSCSDEPERSLLLYQRMLCSSAPHNAYTFPSLLKACSNLSAFEETTQIHAQITKLGYENDVYAVNSLINSYAVTGNFKLAHLLFDRIPEPDDVSWNSVIKGYVKAGKMDIALTLFRKMAEKNAISWTTMISGYVQADMNKEALQLFHEMQNSDVEPDNVSLANALSACAQLGALEQGKWIHSYLNKTRIRMDSVLGCVLIDMYAKCGEMEEALEVFKNIKKKSVQAWTALISGYAYHGHGREAISKFMEMQKMGIKPNVITFTAVLTACSYTGLVEEGKLIFYSMERDYNLKPTIEHYGCIVDLLGRAGLLDEAKRFIQEMPLKPNAVIWGALLKACRIHKNIELGEEIGEILIAIDPYHGGRYVHKANIHAMDKKWDKAAETRRLMKEQGVAKVPGCSTISLEGTTHEFLAGDRSHPEIEKIQSKWRIMRRKLEENGYVPELEEMLLDLVDDDEREAIVHQHSEKLAITYGLIKTKPGTIIRIMKNLRVCKDCHKVTKLISKIYKRDIVMRDRTRFHHFRDGKCSCGDYW

SEQ ID NO: 91382 - protein, 584 aa, Arabidopsis thaliana
  peptide (1)..(584): Ceres Seq. ID no. 12727436
  misc_feature (45)..(79): Pfam Name: PPR repeat Pfam Description: PPR repeat
  misc_feature (1)..(584): Homolog of NCBI NO: 15240085 NR Description: selenium-binding protein-like; protein id:
  misc_feature (1)..(584): Homolog of NCBI NO: 10178152 NR Description: selenium-binding protein-like [Arabidopsis
  misc_feature (1)..(584): Homolog of NCBI NO: 15235537 NR Description: putative protein; protein id: At4g37380.1
  misc_feature (1)..(584): Homolog of NCBI NO: 15227619 NR Description: hypothetical protein; protein id: At2g29760.1
  misc_feature (1)..(575): Homolog of NCBI NO: 15242684 NR Description: putative protein; protein id: At5g40410.1
  misc_feature (1)..(584): Homolog of NCBI NO: 34910298 NR Description: P0013F10.8 [Oryza sativa (japonica
  misc_feature (65)..(584): Homolog of NCBI NO: 15239745 NR Description: selenium-binding protein-like; protein id:
  misc_feature (1)..(584): Homolog of NCBI NO: 15223099 NR Description: unknown protein; protein id: At1g08070.1 thaliana] >gi|8778839|gb|AAF79838.1|AC026875_18 T6D22.15
  misc_feature (1)..(584): Homolog of NCBI NO: 34910594 NR Description: putative selenium-binding protein [Oryza sativa
  misc_feature (149)..(584): Homolog of NCBI NO: 11281371 NR Description: hypothetical protein T8H10.30 - Arabidopsis >gi|6706414|emb|CAB66100.1| putative protein [Arabidopsis
MLKTGLMQDSYAITKFLSFCISSTSSDFLPYAQIVFDGFDRPDTFLWNLMIRGFSCSDEPERSLLLYQRMLCSSAPHNAYTFPSLLKACSNLSAFEETTQIHAQITKLGYENDVYAVNSLINSYAVTGNFKLAHLLFDRIPEPDDVSWNSVIKGYVKAGKMDIALTLFRKMAEKNAISWTTMISGYVQADMNKEALQLFHEMQNSDVEPDNVSLANALSACAQLGALEQGKWIHSYLNKTRIRMDSVLGCVLIDMYAKCGEMEEALEVFKNIKKKSVQAWTALISGYAYHGHGREAISKFMEMQKMGIKPNVITFTAVLTACSYTGLVEEGKLIFYSMERDYNLKPTIEHYGCIVDLLGRAGLLDEAKRFIQEMPLKPNAVIWGALLKACRIHKNIELGEEIGEILIAIDPYHGGRYVHKANIHAMDKKWDKAAETRRLMKEQGVAKVPGCSTISLEGTTHEFLAGDRSHPEIEKIQSKWRIMRRKLEENGYVPELEEMLLDLVDDDEREAIVHQHSEKLAITYGLIKTKPGTIIRIMKNLRVCKDCHKVTKLISKIYKRDIVMRDRTRFHHFRDGKCSCGDYW

SEQ ID NO: 91383 - DNA, 967 bp, Arabidopsis thaliana
  misc_feature (1)..(967): Ceres Seq. ID no. 12727437
  misc_feature: MA Experiment ID: 108434 Result: Up-regulated in Transcription
  misc_feature: MA Experiment 108434 PARAMETER Experiment Name: At_Root_Tips_cDNA_P Parameter: Tissue Value: Root Tips
  misc_feature: MA Experiment ID: 108461 Result: Up-regulated in Transcription
  misc_feature: MA Experiment 108461 PARAMETER Experiment Name: At_Germinating_Seeds_cDNA_P Parameter: Age (day) Value: 1 vs. 0
  misc_feature: MA Experiment 108461 PARAMETER Experiment Name: At_Germinating_Seeds_cDNA_P Parameter: Tissue Value: Germinating Seeds
  misc_feature: MA Experiment ID: 108501 Result: Down-regulated in Transcription
  misc_feature: MA Experiment 108501 PARAMETER Experiment Name: At_ap2_floral_buds_cDNA_P Parameter: Plant Line Value: ap2 (Ler.)
  misc_feature: MA Experiment 108501 PARAMETER Experiment Name: At_ap2_floral_buds_cDNA_P Parameter: Tissue Value: Closed Flower
  misc_feature: MA Experiment ID: 108561 Result: Down-regulated in Transcription
  misc_feature: MA Experiment 108561 PARAMETER Experiment Name: At_100uM_ABA_cDNA_P Parameter: Timepoint (hr) Value: 6
  misc_feature: MA Experiment 108561 PARAMETER Experiment Name: At_100uM_ABA_cDNA_P Parameter: Tissue Value: Aerial
  misc_feature: MA Experiment 108561 PARAMETER Experiment Name: At_100uM_ABA_cDNA_P Parameter: Treatment Value: 100uM ABA vs. No Treatment
  misc_feature: MA Experiment ID: 108577 Result: Down-regulated in Transcription
  misc_feature: MA Experiment 108577 PARAMETER Experiment Name: At_42deg_Heat_cDNA_P Parameter: Temperature (deg C) Value: 42 vs. 22
  misc_feature: MA Experiment 108577 PARAMETER Experiment Name: At_42deg_Heat_cDNA_P Parameter: Timepoint (hr) Value: 6
  misc_feature: MA Experiment 108577 PARAMETER Experiment Name: At_42deg_Heat_cDNA_P Parameter: Tissue Value: Aerial
  misc_feature: MA Experiment ID: 108585 Result: Down-regulated in Transcription
  misc_feature: MA Experiment 108585 PARAMETER Experiment Name: At_5mM_NaNP_cDNA_P Parameter: Timepoint (hr) Value: 6
  misc_feature: MA Experiment 108585 PARAMETER Experiment Name: At_5mM_NaNP_cDNA_P Parameter: Tissue Value: Aerial
  misc_feature: MA Experiment 108585 PARAMETER Experiment Name: At_5mM_NaNP_cDNA_P Parameter: Treatment Value: null
  misc_feature: MA Experiment ID: 108595 Result: Down-regulated in Transcription
  misc_feature: MA Experiment 108595 PARAMETER Experiment Name: At_Ler-pi_Ovule_cDNA_P Parameter: Plant Line Value: null
  misc_feature: MA Experiment ID: 108609 Result: Down-regulated in Transcription
  misc_feature: MA Experiment 108609 PARAMETER Experiment Name: At_100uM_ABA_cDNA_P Parameter: Timepoint (hr) Value: 24
  misc_feature: MA Experiment 108609 PARAMETER Experiment Name: At_100uM_ABA_cDNA_P Parameter: Tissue Value: Aerial
  misc_feature: MA Experiment 108609 PARAMETER Experiment Name: At_100uM_ABA_cDNA_P Parameter: Treatment Value: 100uM ABA vs. No Treatment
  misc_feature: MA Experiment ID: 20000111 Result: Down-regulated in Transcription
  misc_feature: MA Experiment 20000111 PARAMETER Experiment Name: At_42deg_Heat_cDNA_P Parameter: Temperature (deg C) Value: 42 vs. 22
  misc_feature: MA Experiment 20000111 PARAMETER Experiment Name: At_42deg_Heat_cDNA_P Parameter: Timepoint (hr) Value: 6
  misc_feature: MA Experiment 20000111 PARAMETER Experiment Name: At_42deg_Heat_cDNA_P Parameter: Tissue Value: Aerial
  misc_feature: MA Experiment ID: 20000113 Result: Down-regulated in Transcription
  misc_feature: MA Experiment 20000113 PARAMETER Experiment Name: At_42deg_Heat_cDNA_P Parameter: Temperature (deg C) Value: 42 vs. 22
  misc_feature: MA Experiment 20000113 PARAMETER Experiment Name: At_42deg_Heat_cDNA_P Parameter: Timepoint (hr) Value: 8
  misc_feature: MA Experiment 20000113 PARAMETER Experiment Name: At_42deg_Heat_cDNA_P Parameter: Tissue Value: Aerial
  misc_feature: MA Experiment ID: 20000173 Result: Down-regulated in Transcription
  misc_feature: MA Experiment 20000173 PARAMETER Experiment Name: At_42deg_Heat_P Parameter: Age (day) Value: 14
  misc_feature: MA Experiment 20000173 PARAMETER Experiment Name: At_42deg_Heat_P Parameter: Organism Value: A. thaliana
  misc_feature: MA Experiment 20000173 PARAMETER Experiment Name: At_42deg_Heat_P Parameter: Plant Line Value: WS
  misc_feature: MA Experiment 20000173 PARAMETER Experiment Name: At_42deg_Heat_P Parameter: Temperature (deg C) Value: 42 vs. 22
  misc_feature: MA Experiment 20000173 PARAMETER Experiment Name: At_42deg_Heat_P Parameter: Timepoint (hr) Value: 6
  misc_feature: MA Experiment 20000173 PARAMETER Experiment Name: At_42deg_Heat_P Parameter: Tissue Value: Aerial
  misc_feature: MA Experiment ID: 20000185 Result: Down-regulated in Transcription
  misc_feature: MA Experiment 20000185 PARAMETER Experiment Name: At_Roots__P Parameter: Age (day) Value: 7 vs. 21
  misc_feature: MA Experiment 20000185 PARAMETER Experiment Name: At_Roots__P Parameter: Organism Value: A. thaliana
  misc_feature: MA Experiment 20000185 PARAMETER Experiment Name: At_Roots__P Parameter: Tissue Value: Roots vs. Whole Plant
  misc_feature: MA Experiment ID: 20000437 Result: Down-regulated in Transcription
  misc_feature: MA Experiment 20000437 PARAMETER Experiment Name: At_Drought_P Parameter: Age (day) Value: 8
  misc_feature: MA Experiment 20000437 PARAMETER Experiment Name: At_Drought_P Parameter: Organism Value: A. thaliana
  misc_feature: MA Experiment 20000437 PARAMETER Experiment Name: At_Drought_P Parameter: Plant Line Value: WS
  misc_feature: MA Experiment 20000437 PARAMETER Experiment Name: At_Drought_P Parameter: Timepoint (hr) Value: 24
  misc_feature: MA Experiment 20000437 PARAMETER Experiment Name: At_Drought_P Parameter: Tissue Value: Whole Plant
  misc_feature: MA Experiment 20000437 PARAMETER Experiment Name: At_Drought_P Parameter: Treatment Value: Drought vs. No Drought
  misc_feature: MA Experiment ID: 20000453 Result: Down-regulated in Transcription
  misc_feature: MA Experiment 20000453 PARAMETER Experiment Name: At_100uM_ABA_P Parameter: Age (day) Value: 15
  misc_feature: MA Experiment 20000453 PARAMETER Experiment Name: At_100uM_ABA_P Parameter: Organism Value: A. thaliana
  misc_feature: MA Experiment 20000453 PARAMETER Experiment Name: At_100uM_ABA_P Parameter: Plant Line Value: WS
  misc_feature: MA Experiment 20000453 PARAMETER Experiment Name: At_100uM_ABA_P Parameter: Timepoint (hr) Value: 24
  misc_feature: MA Experiment 20000453 PARAMETER Experiment Name: At_100uM_ABA_P Parameter: Tissue Value: Aerial
  misc_feature: MA Experiment 20000453 PARAMETER Experiment Name: At_100uM_ABA_P Parameter: Treatment Value: 100uM ABA vs. No Treatment
  misc_feature: MA Experiment ID: 20000794 Result: Down-regulated in Transcription
  misc_feature: MA Experiment 20000794 PARAMETER Experiment Name: At_Petals_P Parameter: Age (day) Value: 23-25 days
  misc_feature: MA Experiment 20000794 PARAMETER Experiment Name: At_Petals_P Parameter: Plant Line Value: WS
  misc_feature: MA Experiment 20000794 PARAMETER Experiment Name: At_Petals_P Parameter: Tissue Value: Petals vs. Whole plant
  misc_feature: MA Experiment ID: 20001247 Result: Down-regulated in Transcription
  misc_feature: MA Experiment 20001247 PARAMETER Experiment Name: At_Far-red-induction_P Parameter: Age (day) Value: 7
  misc_feature: MA Experiment 20001247 PARAMETER Experiment Name: At_Far-red-induction_P Parameter: Light Value: Far-red vs. White
  misc_feature: MA Experiment 20001247 PARAMETER Experiment Name: At_Far-red-induction_P Parameter: Organism Value: A. thaliana
  misc_feature: MA Experiment 20001247 PARAMETER Experiment Name: At_Far-red-induction_P Parameter: Plant Line Value: Columbia
  misc_feature: MA Experiment 20001247 PARAMETER Experiment Name: At_Far-red-induction_P Parameter: Timepoint (hr) Value: 1
  misc_feature: MA Experiment 20001247 PARAMETER Experiment Name: At_Far-red-induction_P Parameter: Tissue Value: Whole Plant
  misc_feature: MA Experiment ID: 20001451 Result: Down-regulated in Transcription
  misc_feature: MA Experiment 20001451 PARAMETER Experiment Name: At_Far-red-induction_P Parameter: Age (day) Value: 7
  misc_feature: MA Experiment 20001451 PARAMETER Experiment Name: At_Far-red-induction_P Parameter: Light Value: Far-red vs. White
  misc_feature: MA Experiment 20001451 PARAMETER Experiment Name: At_Far-red-induction_P Parameter: Organism Value: A. thaliana
  misc_feature: MA Experiment 20001451 PARAMETER Experiment Name: At_Far-red-induction_P Parameter: Plant Line Value: Columbia
  misc_feature: MA Experiment 20001451 PARAMETER Experiment Name: At_Far-red-induction_P Parameter: Timepoint (hr) Value: 24
  misc_feature: MA Experiment 20001451 PARAMETER Experiment Name: At_Far-red-induction_P Parameter: Tissue Value: Whole Plant
  misc_feature: MA Experiment ID: 20001458 Result: Up-regulated in Transcription
  misc_feature: MA Experiment 20001458 PARAMETER Experiment Name: At_50mM_NH4NO3_L-to-H_P Parameter: Age (day) Value: Undefined
  misc_feature: MA Experiment 20001458 PARAMETER Experiment Name: At_50mM_NH4NO3_L-to-H_P Parameter: Organism Value: Undefined
  misc_feature: MA Experiment 20001458 PARAMETER Experiment Name: At_50mM_NH4NO3_L-to-H_P Parameter: Plant Line Value: Undefined
  misc_feature: MA Experiment 20001458 PARAMETER Experiment Name: At_50mM_NH4NO3_L-to-H_P Parameter: Timepoint (hr) Value: 2
  misc_feature: MA Experiment 20001458 PARAMETER Experiment Name: At_50mM_NH4NO3_L-to-H_P Parameter: Tissue Value: Siliques
  misc_feature: MA Experiment 20001458 PARAMETER Experiment Name: At_50mM_NH4NO3_L-to-H_P Parameter: Treatment Value: 50mM NH4NO3 vs. 100mM Manitol
  misc_feature: MA Experiment ID: 20001557 Result: Down-regulated in Transcription
  misc_feature: MA Experiment 20001557 PARAMETER Experiment Name: At_Drought_Soil_Dry_P Parameter: Age (day) Value: 27
  misc_feature: MA Experiment 20001557 PARAMETER Experiment Name: At_Drought_Soil_Dry_P Parameter: Organism Value: A. thaliana
  misc_feature: MA Experiment 20001557 PARAMETER Experiment Name: At_Drought_Soil_Dry_P Parameter: Plant Line Value: WS
  misc_feature: MA Experiment 20001557 PARAMETER Experiment Name: At_Drought_Soil_Dry_P Parameter: Post Timepoint (hr) Value: 3
  misc_feature: MA Experiment 20001557 PARAMETER Experiment Name: At_Drought_Soil_Dry_P Parameter: Post-Treatment Value: Re-Water vs. No Drought
  misc_feature: MA Experiment 20001557 PARAMETER Experiment Name: At_Drought_Soil_Dry_P Parameter: Timepoint (day) Value: 13
  misc_feature: MA Experiment 20001557 PARAMETER Experiment Name: At_Drought_Soil_Dry_P Parameter: Treatment Value: Drought vs. No Drought
  misc_feature: MA Experiment ID: 20001757 Result: Up-regulated in Transcription
  misc_feature: MA Experiment 20001757 PARAMETER Experiment Name: At_50mM_NH4NO3_L-to-H_P Parameter: Timepoint (hr) Value: 6
  misc_feature: MA Experiment 20001757 PARAMETER Experiment Name: At_50mM_NH4NO3_L-to-H_P Parameter: Tissue Value: Leaf
  misc_feature: MA Experiment 20001757 PARAMETER Experiment Name: At_50mM_NH4NO3_L-to-H_P Parameter: Treatment Value: 50mM NH4NO3 vs 100mM Mannitol
  misc_feature: MA Experiment ID: 20001904 Result: Down-regulated in Transcription
  misc_feature: MA Experiment 20001904 PARAMETER Experiment Name: At_Drought_Reproduction_P Parameter: Age (day) Value: 37
  misc_feature: MA Experiment 20001904 PARAMETER Experiment Name: At_Drought_Reproduction_P Parameter: Organism Value: A. thaliana
  misc_feature: MA Experiment 20001904 PARAMETER Experiment Name: At_Drought_Reproduction_P Parameter: Plant Line Value: WS
  misc_feature: MA Experiment 20001904 PARAMETER Experiment Name: At_Drought_Reproduction_P Parameter: Timepoint (day) Value: 7
  misc_feature: MA Experiment 20001904 PARAMETER Experiment Name: At_Drought_Reproduction_P Parameter: Tissue Value: Rosettes
  misc_feature: MA Experiment 20001904 PARAMETER Experiment Name: At_Drought_Reproduction_P Parameter: Treatment Value: Drought vs. No Drought
  misc_feature: MA Experiment ID: 20001906 Result: Down-regulated in Transcription
  misc_feature: MA Experiment 20001906 PARAMETER Experiment Name: At_Drought_Reproduction_P Parameter: Age (day) Value: 35
  misc_feature: MA Experiment 20001906 PARAMETER Experiment Name: At_Drought_Reproduction_P Parameter: Organism Value: A. thaliana
  misc_feature: MA Experiment 20001906 PARAMETER Experiment Name: At_Drought_Reproduction_P Parameter: Plant Line Value: WS
  misc_feature: MA Experiment 20001906 PARAMETER Experiment Name: At_Drought_Reproduction_P Parameter: Timepoint (day) Value: 5
  misc_feature: MA Experiment 20001906 PARAMETER Experiment Name: At_Drought_Reproduction_P Parameter: Tissue Value: Siliques
  misc_feature: MA Experiment 20001906 PARAMETER Experiment Name: At_Drought_Reproduction_P Parameter: Treatment Value: Drought vs. No Drought
  misc_feature: MA Experiment ID: 20001908 Result: Down-regulated in Transcription
  misc_feature: MA Experiment 20001908 PARAMETER Experiment Name: At_Drought_Reproduction_P Parameter: Age (day) Value: 40
  misc_feature: MA Experiment 20001908 PARAMETER Experiment Name: At_Drought_Reproduction_P Parameter: Organism Value: A. thaliana
  misc_feature: MA Experiment 20001908 PARAMETER Experiment Name: At_Drought_Reproduction_P Parameter: Plant Line Value: WS
  misc_feature: MA Experiment 20001908 PARAMETER Experiment Name: At_Drought_Reproduction_P Parameter: Timepoint (day) Value: 10
  misc_feature: MA Experiment 20001908 PARAMETER Experiment Name: At_Drought_Reproduction_P Parameter: Tissue Value: Siliques
  misc_feature: MA Experiment 20001908 PARAMETER Experiment Name: At_Drought_Reproduction_P Parameter: Treatment Value: Drought vs. No Drought
atggcgattgtttccgtctctaactcttttctcactttcaattctcccaatcagctccgatttagccgaagaagattctctgccatggcttcttcaactactggagtgagagtcgctgaaggagaaggcaatttgccaaaacttgtccttacttctcctcagaacagcgaggctgagatatatctcttcggaggctgcattacttcttggaaagttgcgagcggtaaagatcttctttttgtcagaccagatgctgtcttcaataagattaagcccattagcggagggattccacattgttttccacagtttggacctgggctaattcaacagcatgggtttggaaggaacatggactggtctgttgtcgattcccagaatgcagatgacaatgctgctgttactcttgagcttaaggatggtccctatagtcgagccatgtgggactttgctttccaggctctatacaaggtcattgttggcgcggactccctttccactgagctaaagattacaaacacagacgataaaccattttctttcagcactgcgttgcatacttacttccgtgcttcttctgcgggggcctccgtgagaggtctaaagggttgtaaaactctcaataaggatccagaccctaagaacccaatagagggtaaagaagacagggatgcagtcacttttcctggatttgtggataccgtctatcttgatgctcccaatgaattgcagtttgataatggcttgggtgataaaataatcatcaaaaacacaaattggtcggatgcggtcttgtggaacccgcatactcagatggaggcttgttacagagactttgtgtgcgtggaaaatgcaaagcttggggatgtcaagctagagccgggacagtcttggactgcaacacaacttctcagcatcagttgaaaacattgtactttaaacttataatgtccagtggatccatttt

SEQ ID NO: 91384 - protein, 307 aa, Arabidopsis thaliana; identical to SEQ ID NO: 23063
  peptide (1)..(307): Ceres Seq. ID no. 12727438
  misc_feature (46)..(305): Pfam Name: Aldose 1-epimerase Pfam Description: Aldose 1-epimerase
  misc_feature (1)..(307): Homolog of NCBI NO: 15240009 NR Description: apospory-associated protein C-like; protein id:
  misc_feature (36)..(306): Homolog of NCBI NO: 6970044 NR Description: apospory-associated protein C; APOC
  misc_feature (36)..(279): Homolog of NCBI NO: 38344152 NR Description: OSJNBa0041A02.19 [Oryza sativa (japonica
  misc_feature (29)..(287): Homolog of NCBI NO: 15242099 NR Description: apospory-associated protein C; protein id:
  misc_feature (45)..(279): Homolog of NCBI NO: 2501555 NR Description: POSSIBLE APOSPORY-ASSOCIATED PROTEIN C
  misc_feature (38)..(279): Homolog of NCBI NO: 40253263 NR Description: putative Aldose 1-epimerase [Oryza sativa
  misc_feature (36)..(287): Homolog of NCBI NO: 19387263 NR Description: putative apospory-associated protein C [Oryza
  misc_feature (40)..(307): Homolog of NCBI NO: 16612258 NR Description: AT3g01590/F4P13_13 [Arabidopsis thaliana]
  misc_feature (40)..(307): Homolog of NCBI NO: 18395868 NR Description: expressed protein; protein id: At3g01590.1, by cDNA: 41354., supported by cDNA: gi_16612257, supported by gi_20258972 [Arabidopsis thaliana]
  misc_feature (40)..(306): Homolog of NCBI NO: 21593295 NR Description: possible apospory-associated like protein

SEQ ID NO: 91385 - protein, 279 aa, Arabidopsis thaliana; identical to SEQ ID NO: 23064
  peptide (1)..(279): Ceres Seq. ID no. 12727439
  misc_feature (18)..(277): Pfam Name: Aldose 1-epimerase Pfam Description: Aldose 1-epimerase
  misc_feature (1)..(279): Homolog of NCBI NO: 15240009 NR Description: apospory-associated protein C-like; protein id:
  misc_feature (8)..(278): Homolog of NCBI NO: 6970044 NR Description: apospory-associated protein C; APOC
  misc_feature (8)..(251): Homolog of NCBI NO: 38344152 NR Description: OSJNBa0041A02.19 [Oryza sativa (japonica
  misc_feature (1)..(259): Homolog of NCBI NO: 15242099 NR Description: apospory-associated protein C; protein id:
  misc_feature (17)..(251): Homolog of NCBI NO: 2501555 NR Description: POSSIBLE APOSPORY-ASSOCIATED PROTEIN C
  misc_feature (10)..(251): Homolog of NCBI NO: 40253263 NR Description: putative Aldose 1-epimerase [Oryza sativa
  misc_feature (8)..(259): Homolog of NCBI NO: 19387263 NR Description: putative apospory-associated protein C [Oryza
  misc_feature (12)..(279): Homolog of NCBI NO: 16612258 NR Description: AT3g01590/F4P13_13 [Arabidopsis thaliana]
  misc_feature (12)..(279): Homolog of NCBI NO: 18395868 NR Description: expressed protein; protein id: At3g01590.1, by cDNA: 41354., supported by cDNA: gi_16612257, supported by gi_20258972 [Arabidopsis thaliana]
  misc_feature (12)..(278): Homolog of NCBI NO: 21593295 NR Description: possible apospory-associated like protein

SEQ ID NO: 91386 - protein, 190 aa, Arabidopsis thaliana; identical to SEQ ID NO: 23065
  peptide (1)..(190): Ceres Seq. ID no. 12727440
  misc_feature (1)..(188): Pfam Name: Aldose 1-epimerase Pfam Description: Aldose 1-epimerase
  misc_feature (1)..(190): Homolog of NCBI NO: 15240009 NR Description: apospory-associated protein C-like; protein id:
  misc_feature (1)..(189): Homolog of NCBI NO: 6970044 NR Description: apospory-associated protein C; APOC
  misc_feature (1)..(162): Homolog of NCBI NO: 38344152 NR Description: OSJNBa0041A02.19 [Oryza sativa (japonica
  misc_feature (1)..(170): Homolog of NCBI NO: 15242099 NR Description: apospory-associated protein C; protein id:
  misc_feature (1)..(162): Homolog of NCBI NO: 2501555 NR Description: POSSIBLE APOSPORY-ASSOCIATED PROTEIN C
  misc_feature (1)..(162): Homolog of NCBI NO: 40253263 NR Description: putative Aldose 1-epimerase [Oryza sativa
  misc_feature (1)..(170): Homolog of NCBI NO: 19387263 NR Description: putative apospory-associated protein C [Oryza
  misc_feature (1)..(190): Homolog of NCBI NO: 16612258 NR Description: AT3g01590/F4P13_13 [Arabidopsis thaliana]
  misc_feature (1)..(190): Homolog of NCBI NO: 18395868 NR Description: expressed protein; protein id: At3g01590.1, by cDNA: 41354., supported by cDNA: gi_16612257, supported by gi_20258972 [Arabidopsis thaliana]
  misc_feature (1)..(189): Homolog of NCBI NO: 21593295 NR Description: possible apospory-associated like protein

SEQ ID NO: 91387 - DNA, 1917 bp, Arabidopsis thaliana
  misc_feature (1)..(1917): Ceres Seq. ID no. 12727441
  misc_feature: MA Experiment ID: 20000169 Result: Down-regulated in Transcription
  misc_feature: MA Experiment 20000169 PARAMETER Experiment Name: At_100uM_ABA_P Parameter: Age (day) Value: 14
  misc_feature: MA Experiment 20000169 PARAMETER Experiment Name: At_100uM_ABA_P Parameter: Organism Value: A. thaliana
  misc_feature: MA Experiment 20000169 PARAMETER Experiment Name: At_100uM_ABA_P Parameter: Plant Line Value: WS
  misc_feature: MA Experiment 20000169 PARAMETER Experiment Name: At_100uM_ABA_P Parameter: Timepoint (hr) Value: 6
  misc_feature: MA Experiment 20000169 PARAMETER Experiment Name: At_100uM_ABA_P Parameter: Tissue Value: Aerial
  misc_feature: MA Experiment 20000169 PARAMETER Experiment Name: At_100uM_ABA_P Parameter: Treatment Value: 100uM ABA vs. No Treatment
  misc_feature: MA Experiment ID: 20000180 Result: Down-regulated in Transcription
  misc_feature: MA Experiment 20000180 PARAMETER Experiment Name: At_Germinating_Seeds_P Parameter: Age (hr) Value: 24 vs. 0
  misc_feature: MA Experiment 20000180 PARAMETER Experiment Name: At_Germinating_Seeds_P Parameter: Tissue Value: Germinating Seeds
  misc_feature: MA Experiment ID: 20000227 Result: Up-regulated in Transcription
  misc_feature: MA Experiment 20000227 PARAMETER Experiment Name: At_Root-Tips-vs-Tops_P Parameter: Tissue Value: Root Tips vs. Root Tops
  misc_feature: MA Experiment ID: 20000234 Result: Up-regulated in Transcription
  misc_feature: MA Experiment 20000234 PARAMETER Experiment Name: At_Siliques_P Parameter: Age (day) Value: 21
  misc_feature: MA Experiment 20000234 PARAMETER Experiment Name: At_Siliques_P Parameter: Organism Value: A. thaliana
  misc_feature: MA Experiment 20000234 PARAMETER Experiment Name: At_Siliques_P Parameter: Plant Line Value: WS
  misc_feature: MA Experiment 20000234 PARAMETER Experiment Name: At_Siliques_P Parameter: Tissue Value: Less Than 5mm Siliques vs. Whole Plant
  misc_feature: MA Experiment ID: 20000264 Result: Up-regulated in Transcription
  misc_feature: MA Experiment 20000264 PARAMETER Experiment Name: At_Open_Flower_P Parameter: Age (day) Value: 21
  misc_feature: MA Experiment 20000264 PARAMETER Experiment Name: At_Open_Flower_P Parameter: Plant Line Value: WS
  misc_feature: MA Experiment 20000264 PARAMETER Experiment Name: At_Open_Flower_P Parameter: Tissue Value: Open Flower vs. Whole Plant
  misc_feature: MA Experiment ID: 20000286 Result: Up-regulated in Transcription
  misc_feature: MA Experiment 20000286 PARAMETER Experiment Name: At_Open_Flower_P Parameter: Age (day) Value: 21
  misc_feature: MA Experiment 20000286 PARAMETER Experiment Name: At_Open_Flower_P Parameter: Plant Line Value: WS
  misc_feature: MA Experiment 20000286 PARAMETER Experiment Name: At_Open_Flower_P Parameter: Tissue Value: Half Open vs. Whole Plant
  misc_feature: MA Experiment ID: 20001458 Result: Up-regulated in Transcription
  misc_feature: MA Experiment 20001458 PARAMETER Experiment Name: At_50mM_NH4NO3_L-to-H_P Parameter: Age (day) Value: Undefined
  misc_feature: MA Experiment 20001458 PARAMETER Experiment Name: At_50mM_NH4NO3_L-to-H_P Parameter: Organism Value: Undefined
  misc_feature: MA Experiment 20001458 PARAMETER Experiment Name: At_50mM_NH4NO3_L-to-H_P Parameter: Plant Line Value: Undefined
  misc_feature: MA Experiment 20001458 PARAMETER Experiment Name: At_50mM_NH4NO3_L-to-H_P Parameter: Timepoint (hr) Value: 2
  misc_feature: MA Experiment 20001458 PARAMETER Experiment Name: At_50mM_NH4NO3_L-to-H_P Parameter: Tissue Value: Siliques
  misc_feature: MA Experiment 20001458 PARAMETER Experiment Name: At_50mM_NH4NO3_L-to-H_P Parameter: Treatment Value: 50mM NH4NO3 vs. 100mM Manitol
  misc_feature: MA Experiment ID: 20001556 Result: Up-regulated in Transcription
  misc_feature: MA Experiment 20001556 PARAMETER Experiment Name: At_Drought_Soil_Dry_P Parameter: Age (day) Value: 26
  misc_feature: MA Experiment 20001556 PARAMETER Experiment Name: At_Drought_Soil_Dry_P Parameter: Organism Value: A. thaliana
  misc_feature: MA Experiment 20001556 PARAMETER Experiment Name: At_Drought_Soil_Dry_P Parameter: Plant Line Value: WS
  misc_feature: MA Experiment 20001556 PARAMETER Experiment Name: At_Drought_Soil_Dry_P Parameter: Post Timepoint (hr) Value: None
  misc_feature: MA Experiment 20001556 PARAMETER Experiment Name: At_Drought_Soil_Dry_P Parameter: Post-Treatment Value: None
  misc_feature: MA Experiment 20001556 PARAMETER Experiment Name: At_Drought_Soil_Dry_P Parameter: Timepoint (day) Value: 12
  misc_feature: MA Experiment 20001556 PARAMETER Experiment Name: At_Drought_Soil_Dry_P Parameter: Treatment Value: Drought vs. No Drought
  misc_feature: MA Experiment ID: 20001557 Result: Up-regulated in Transcription
  misc_feature: MA Experiment 20001557 PARAMETER Experiment Name: At_Drought_Soil_Dry_P Parameter: Age (day) Value: 27
  misc_feature: MA Experiment 20001557 PARAMETER Experiment Name: At_Drought_Soil_Dry_P Parameter: Organism Value: A. thaliana
  misc_feature: MA Experiment 20001557 PARAMETER Experiment Name: At_Drought_Soil_Dry_P Parameter: Plant Line Value: WS
  misc_feature: MA Experiment 20001557 PARAMETER Experiment Name: At_Drought_Soil_Dry_P Parameter: Post Timepoint (hr) Value: 3
  misc_feature: MA Experiment 20001557 PARAMETER Experiment Name: At_Drought_Soil_Dry_P Parameter: Post-Treatment Value: Re-Water vs. No Drought
  misc_feature: MA Experiment 20001557 PARAMETER Experiment Name: At_Drought_Soil_Dry_P Parameter: Timepoint (day) Value: 13
  misc_feature: MA Experiment 20001557 PARAMETER Experiment Name: At_Drought_Soil_Dry_P Parameter: Treatment Value: Drought vs. No Drought
  misc_feature: MA Experiment ID: 20001558 Result: Up-regulated in Transcription
  misc_feature: MA Experiment 20001558 PARAMETER Experiment Name: At_Drought_Soil_Dry_P Parameter: Age (day) Value: 27
  misc_feature: MA Experiment 20001558 PARAMETER Experiment Name: At_Drought_Soil_Dry_P Parameter: Organism Value: A. thaliana
  misc_feature: MA Experiment 20001558 PARAMETER Experiment Name: At_Drought_Soil_Dry_P Parameter: Plant Line Value: WS
  misc_feature: MA Experiment 20001558 PARAMETER Experiment Name: At_Drought_Soil_Dry_P Parameter: Post Timepoint (hr) Value: 6
  misc_feature: MA Experiment 20001558 PARAMETER Experiment Name: At_Drought_Soil_Dry_P Parameter: Post-Treatment Value: Re-Water vs. No Drought
  misc_feature: MA Experiment 20001558 PARAMETER Experiment Name: At_Drought_Soil_Dry_P Parameter: Timepoint (day) Value: 13
  misc_feature: MA Experiment 20001558 PARAMETER Experiment Name: At_Drought_Soil_Dry_P Parameter: Treatment Value: Drought vs. No Drought
  misc_feature: MA Experiment ID: 20001560 Result: Up-regulated in Transcription
  misc_feature: MA Experiment 20001560 PARAMETER Experiment Name: At_Drought_Soil_Dry_P Parameter: Age (day) Value: 28
  misc_feature: MA Experiment 20001560 PARAMETER Experiment Name: At_Drought_Soil_Dry_P Parameter: Organism Value: A. thaliana
  misc_feature: MA Experiment 20001560 PARAMETER Experiment Name: At_Drought_Soil_Dry_P Parameter: Plant Line Value: WS
  misc_feature: MA Experiment 20001560 PARAMETER Experiment Name: At_Drought_Soil_Dry_P Parameter: Post Timepoint (hr) Value: None
  misc_feature: MA Experiment 20001560 PARAMETER Experiment Name: At_Drought_Soil_Dry_P Parameter: Post-Treatment Value: None
  misc_feature: MA Experiment 20001560 PARAMETER Experiment Name: At_Drought_Soil_Dry_P Parameter: Timepoint (day) Value: 14
  misc_feature: MA Experiment 20001560 PARAMETER Experiment Name: At_Drought_Soil_Dry_P Parameter: Treatment Value: Drought vs. No Drought
  misc_feature: MA Experiment ID: 20001757 Result: Up-regulated in Transcription
  misc_feature: MA Experiment 20001757 PARAMETER Experiment Name: At_50mM_NH4NO3_L-to-H_P Parameter: Timepoint (hr) Value: 6
  misc_feature: MA Experiment 20001757 PARAMETER Experiment Name: At_50mM_NH4NO3_L-to-H_P Parameter: Tissue Value: Leaf
  misc_feature: MA Experiment 20001757 PARAMETER Experiment Name: At_50mM_NH4NO3_L-to-H_P Parameter: Treatment Value: 50mM NH4NO3 vs 100mM Mannitol
cctcttctaaaacctaaccgccgtttaaaccaccttcggcaccgccattgatatactctactgttttcgtcaaatcgaaggaaccctaatttcgagggcactgaggaagctcaatcaatggctacggtaaaggattcggggtttgaagcccttgagaagcttaaggcaacagagccaccagtttttctagcgccaagttcaatatctgaggatgctcgctctgcatctcagtatctattcatgaagttgaagccgcataaccctaaatgtccatttgatcagctctcttctgatgggtttgatgcggagcagatttggcagcaaattgatatgcaatctcaacctttgttgactagcttgcggcaggaagtcaagagatttgctaaaaaccctgaagagattcgtaaacttgggaagttggcccttaaggtttctcatgaagatgatattgatgagatggatatggatggttttgactcggatgatgttgatgatgaggataaagagatagaatctaatgacagcgaaggagaagatgaagaggaagaggaagaggacgaggaagaagaagaggaggaagaggaggaggaggaggaggagaaggatggagacaatgaaggaatagaggataagttcttcaagataaaagaattggaggaatttttagaggaaggtgaagcagaagagtatgggatagaccacaaaaacaaaaaaggagtggcacagagaaagaagcaaaatttgagcgatgatgaagacgaagaagatgatgatgatgaagaagaagatgttgagtttgatgcttttgctggtggtgacgacgaagagacagataaattaggaaaagcaaggtatgatgatttctttggtggcaaaaaggagacaaaaatgaagttgaaagatttgagtgaagatgaggaagctgaaatagaaaacaaaggcaatgaaaaactctctacccatgagagagcacgactaaagcttcaatccaagattgaacagatggagaaagcaaacttggacccaaaacattggacaatgcagggagagataactgcggcaaagaggccaatgaatagtgctctagaagttgatttagattttgagcacaatgccaggcctgctcctgtaatcacagaagaagtcacagcctcacttgaagatttgatcaagagcagaatcattgaggctcgtttcgatgatgttcaacgagcacctcgtctacccactaaaggaaaaagagaagccaaggaattggacgaaagcaaaagcaagaaaggtcttgccgaagtttacgaggcagaatactttcagaaggctaatccagcttttgccccaacaactcactctgatgaactaaagaaagaggcaagcatgttgttcaagaaactatgcctgaagttggatgctctctcccacttccacttcacacctaaaccagtgattgaagaaatgtctataccaaacgtttcagccatagcaatggaagaggttgcgcccgtggccgtctcagatgcagcaatgcttgccccagaggaaatattttccgggaaaggtgacattaaggatgagtctgagctcacacaggaagatagaaagaggaggagagcgaataagaagagaaagtttaaggctgaatctgcaaatgaaccgcctaaaaaggcgctggatacaagtaccaagaacccttaaactgttacatgttgaagaaaggagagagttacagaggcaaattcaagatgataagatctcggtcaagagcattgctacacagacagcttgaagattagataaaacaacagttttgaatgagagaaatatttaaactttgtctttcacaaatttgaattttattgtatttttttctctttgtatgagtagttccattttccttgtatcgatagaaaaattccaaag

SEQ ID NO: 91388 - protein, 524 aa, Arabidopsis thaliana
  peptide (1)..(524): Ceres Seq. ID no. 12727442
  misc_feature (11)..(523): Pfam Name: Mpp10 protein Pfam Description: Mpp10 protein
  misc_feature (1)..(524): Homolog of NCBI NO: 18425086 NR Description: expressed protein; protein id: At5g66540.1, by cDNA: gi_14488062 [Arabidopsis thaliana] gene_id:K1F13.21~unknown protein [Arabidopsis thaliana]
  misc_feature (124)..(524): Homolog of NCBI NO: 29351667 NR Description: similar to U3 small nucleolar ribonucleoprotein
  misc_feature (124)..(521): Homolog of NCBI NO: 2230873 NR Description: M phase phosphoprotein 10 [Homo sapiens]
  misc_feature (29)..(522): Homolog of NCBI NO: 28175284 NR Description: Unknown (protein for IMAGE:5543289) [Xenopus
  misc_feature (124)..(524): Homolog of NCBI NO: 34856326 NR Description: similar to U3 small nucleolar ribonucleoprotein
  misc_feature (110)..(510): Homolog of NCBI NO: 6322461 NR Description: part of small (ribosomal) subunit (SSU) (contains U3 snoRNA); Mpp10p [Saccharomyces cerevisiae] U3 small nucleolar ribonucleoprotein protein MPP10
  misc_feature (124)..(511): Homolog of NCBI NO: 19920954 NR Description: CG13097-PA [Drosophila melanogaster]
  misc_feature (261)..(523): Homolog of NCBI NO: 40740848 NR Description: hypothetical protein AN4298.2 [Aspergillus
  misc_feature (55)..(277): Homolog of NCBI NO: 40740848 NR Description: hypothetical protein AN4298.2 [Aspergillus
  misc_feature (109)..(490): Homolog of NCBI NO: 19114546 NR Description: putative component of the U3 small nucleolar [Schizosaccharomyces pombe] >gi|3183346|sp|O13910|YDW3_SCHPO protein C23C11.03 in chromosome I >gi|7493124|pir||T38241
MATVKDSGFEALEKLKATEPPVFLAPSSISEDARSASQYLFMKLKPHNPKCPFDQLSSDGFDAEQIWQQIDMQSQPLLTSLRQEVKRFAKNPEEIRKLGKLALKVSHEDDIDEMDMDGFDSDDVDDEDKEIESNDSEGEDEEEEEEDEEEEEEEEEEEEEEKDGDNEGIEDKFFKIKELEEFLEEGEAEEYGIDHKNKKGVAQRKKQNLSDDEDEEDDDDEEEDVEFDAFAGGDDEETDKLGKARYDDFFGGKKETKMKLKDLSEDEEAEIENKGNEKLSTHERARLKLQSKIEQMEKANLDPKHWTMQGEITAAKRPMNSALEVDLDFEHNARPAPVITEEVTASLEDLIKSRIIEARFDDVQRAPRLPTKGKREAKELDESKSKKGLAEVYEAEYFQKANPAFAPTTHSDELKKEASMLFKKLCLKLDALSHFHFTPKPVIEEMSIPNVSAIAMEEVAPVAVSDAAMLAPEEIFSGKGDIKDESELTQEDRKRRRANKKRKFKAESANEPPKKALDTSTKNP

SEQ ID NO: 91389 - protein, 483 aa, Arabidopsis thaliana
  peptide (1)..(483): Ceres Seq. ID no. 12727443
  misc_feature (1)..(482): Pfam Name: Mpp10 protein Pfam Description: Mpp10 protein
  misc_feature (1)..(483): Homolog of NCBI NO: 18425086 NR Description: expressed protein; protein id: At5g66540.1, by cDNA: gi_14488062 [Arabidopsis thaliana] gene_id:K1F13.21~unknown protein [Arabidopsis thaliana]
  misc_feature (83)..(483): Homolog of NCBI NO: 29351667 NR Description: similar to U3 small nucleolar ribonucleoprotein
  misc_feature (83)..(480): Homolog of NCBI NO: 2230873 NR Description: M phase phosphoprotein 10 [Homo sapiens]
  misc_feature (1)..(481): Homolog of NCBI NO: 28175284 NR Description: Unknown (protein for IMAGE:5543289) [Xenopus
  misc_feature (83)..(483): Homolog of NCBI NO: 34856326 NR Description: similar to U3 small nucleolar ribonucleoprotein
  misc_feature (69)..(469): Homolog of NCBI NO: 6322461 NR Description: part of small (ribosomal) subunit (SSU) (contains U3 snoRNA); Mpp10p [Saccharomyces cerevisiae] U3 small nucleolar ribonucleoprotein protein MPP10
  misc_feature (83)..(470): Homolog of NCBI NO: 19920954 NR Description: CG13097-PA [Drosophila melanogaster]
  misc_feature (220)..(482): Homolog of NCBI NO: 40740848 NR Description: hypothetical protein AN4298.2 [Aspergillus
  misc_feature (14)..(236): Homolog of NCBI NO: 40740848 NR Description: hypothetical protein AN4298.2 [Aspergillus
  misc_feature (68)..(449): Homolog of NCBI NO: 19114546 NR Description: putative component of the U3 small nucleolar [Schizosaccharomyces pombe] >gi|3183346|sp|O13910|YDW3_SCHPO protein C23C11.03 in chromosome I >gi|7493124|pir||T38241
MKLKPHNPKCPFDQLSSDGFDAEQIWQQIDMQSQPLLTSLRQEVKRFAKNPEEIRKLGKLALKVSHEDDIDEMDMDGFDSDDVDDEDKEIESNDSEGEDEEEEEEDEEEEEEEEEEEEEEKDGDNEGIEDKFFKIKELEEFLEEGEAEEYGIDHKNKKGVAQRKKQNLSDDEDEEDDDDEEEDVEFDAFAGGDDEETDKLGKARYDDFFGGKKETKMKLKDLSEDEEAEIENKGNEKLSTHERARLKLQSKIEQMEKANLDPKHWTMQGEITAAKRPMNSALEVDLDFEHNARPAPVITEEVTASLEDLIKSRIIEARFDDVQRAPRLPTKGKREAKELDESKSKKGLAEVYEAEYFQKANPAFAPTTHSDELKKEASMLFKKLCLKLDALSHFHFTPKPVIEEMSIPNVSAIAMEEVAPVAVSDAAMLAPEEIFSGKGDIKDESELTQEDRKRRRANKKRKFKAESANEPPKKALDTSTKNP

SEQ ID NO: 91390 - protein, 453 aa, Arabidopsis thaliana
  peptide (1)..(453): Ceres Seq. ID no. 12727444
  misc_feature (1)..(452): Pfam Name: Mpp10 protein Pfam Description: Mpp10 protein
  misc_feature (1)..(453): Homolog of NCBI NO: 18425086 NR Description: expressed protein; protein id: At5g66540.1, by cDNA: gi_14488062 [Arabidopsis thaliana] gene_id:K1F13.21~unknown protein [Arabidopsis thaliana]
  misc_feature (53)..(453): Homolog of NCBI NO: 29351667 NR Description: similar to U3 small nucleolar ribonucleoprotein
  misc_feature (53)..(450): Homolog of NCBI NO: 2230873 NR Description: M phase phosphoprotein 10 [Homo sapiens]
  misc_feature (1)..(451): Homolog of NCBI NO: 28175284 NR Description: Unknown (protein for IMAGE:5543289) [Xenopus
  misc_feature (53)..(453): Homolog of NCBI NO: 34856326 NR Description: similar to U3 small nucleolar ribonucleoprotein
  misc_feature (39)..(439): Homolog of NCBI NO: 6322461 NR Description: part of small (ribosomal) subunit (SSU) (contains U3 snoRNA); Mpp10p [Saccharomyces cerevisiae] U3 small nucleolar ribonucleoprotein protein MPP10
  misc_feature (53)..(440): Homolog of NCBI NO: 19920954 NR Description: CG13097-PA [Drosophila melanogaster]
  misc_feature (190)..(452): Homolog of NCBI NO: 40740848 NR Description: hypothetical protein AN4298.2 [Aspergillus
  misc_feature (1)..(206): Homolog of NCBI NO: 40740848 NR Description: hypothetical protein AN4298.2 [Aspergillus
  misc_feature (38)..(419): Homolog of NCBI NO: 19114546 NR Description: putative component of the U3 small nucleolar [Schizosaccharomyces pombe] >gi|3183346|sp|O13910|YDW3_SCHPO protein C23C11.03 in chromosome I >gi|7493124|pir||T38241
MQSQPLLTSLRQEVKRFAKNPEEIRKLGKLALKVSHEDDIDEMDMDGFDSDDVDDEDKEIESNDSEGEDEEEEEEDEEEEEEEEEEEEEEKDGDNEGIEDKFFKIKELEEFLEEGEAEEYGIDHKNKKGVAQRKKQNLSDDEDEEDDDDEEEDVEFDAFAGGDDEETDKLGKARYDDFFGGKKETKMKLKDLSEDEEAEIENKGNEKLSTHERARLKLQSKIEQMEKANLDPKHWTMQGEITAAKRPMNSALEVDLDFEHNARPAPVITEEVTASLEDLIKSRIIEARFDDVQRAPRLPTKGKREAKELDESKSKKGLAEVYEAEYFQKANPAFAPTTHSDELKKEASMLFKKLCLKLDALSHFHFTPKPVIEEMSIPNVSAIAMEEVAPVAVSDAAMLAPEEIFSGKGDIKDESELTQEDRKRRRANKKRKFKAESANEPPKKALDTSTKNP

SEQ ID NO: 91391 - DNA, 1845 bp, Arabidopsis thaliana
  misc_feature (1)..(1845): Ceres Seq. ID no. 12727449
  misc_feature: MA Experiment ID: 20000185 Result: Up-regulated in Transcription
  misc_feature: MA Experiment 20000185 PARAMETER Experiment Name: At_Roots__P Parameter: Age (day) Value: 7 vs. 21
  misc_feature: MA Experiment 20000185 PARAMETER Experiment Name: At_Roots__P Parameter: Organism Value: A. thaliana
  misc_feature: MA Experiment 20000185 PARAMETER Experiment Name: At_Roots__P Parameter: Tissue Value: Roots vs. Whole Plant
  misc_feature: MA Experiment ID: 20000227 Result: Up-regulated in Transcription
  misc_feature: MA Experiment 20000227 PARAMETER Experiment Name: At_Root-Tips-vs-Tops_P Parameter: Tissue Value: Root Tips vs. Root Tops
  misc_feature: MA Experiment ID: 20000234 Result: Up-regulated in Transcription
  misc_feature: MA Experiment 20000234 PARAMETER Experiment Name: At_Siliques_P Parameter: Age (day) Value: 21
  misc_feature: MA Experiment 20000234 PARAMETER Experiment Name: At_Siliques_P Parameter: Organism Value: A. thaliana
  misc_feature: MA Experiment 20000234 PARAMETER Experiment Name: At_Siliques_P Parameter: Plant Line Value: WS
  misc_feature: MA Experiment 20000234 PARAMETER Experiment Name: At_Siliques_P Parameter: Tissue Value: Less Than 5mm Siliques vs. Whole Plant
  misc_feature: MA Experiment ID: 20000235 Result: Up-regulated in Transcription
  misc_feature: MA Experiment 20000235 PARAMETER Experiment Name: At_Siliques_P Parameter: Age (day) Value: 21
  misc_feature: MA Experiment 20000235 PARAMETER Experiment Name: At_Siliques_P Parameter: Organism Value: A. thaliana
  misc_feature: MA Experiment 20000235 PARAMETER Experiment Name: At_Siliques_P Parameter: Plant Line Value: WS
  misc_feature: MA Experiment 20000235 PARAMETER Experiment Name: At_Siliques_P Parameter: Tissue Value: 5-10mm Siliques vs. Whole Plant
  misc_feature: MA Experiment ID: 20000264 Result: Up-regulated in Transcription
  misc_feature: MA Experiment 20000264 PARAMETER Experiment Name: At_Open_Flower_P Parameter: Age (day) Value: 21
  misc_feature: MA Experiment 20000264 PARAMETER Experiment Name: At_Open_Flower_P Parameter: Plant Line Value: WS
  misc_feature: MA Experiment 20000264 PARAMETER Experiment Name: At_Open_Flower_P Parameter: Tissue Value: Open Flower vs. Whole Plant
  misc_feature: MA Experiment ID: 20000265 Result: Up-regulated in Transcription
  misc_feature: MA Experiment 20000265 PARAMETER Experiment Name: At_Open_Flower_P Parameter: Age (day) Value: 21
  misc_feature: MA Experiment 20000265 PARAMETER Experiment Name: At_Open_Flower_P Parameter: Plant Line Value: WS
  misc_feature: MA Experiment 20000265 PARAMETER Experiment Name: At_Open_Flower_P Parameter: Tissue Value: Closed Flower vs. Whole Plant
  misc_feature: MA Experiment ID: 20000286 Result: Up-regulated in Transcription
  misc_feature: MA Experiment 20000286 PARAMETER Experiment Name: At_Open_Flower_P Parameter: Age (day) Value: 21
  misc_feature: MA Experiment 20000286 PARAMETER Experiment Name: At_Open_Flower_P Parameter: Plant Line Value: WS
  misc_feature: MA Experiment 20000286 PARAMETER Experiment Name: At_Open_Flower_P Parameter: Tissue Value: Half Open vs. Whole Plant
  misc_feature: MA Experiment ID: 20000439 Result: Up-regulated in Transcription
  misc_feature: MA Experiment 20000439 PARAMETER Experiment Name: At_Roots__P Parameter: Age (day) Value: 14 vs. 21
  misc_feature: MA Experiment 20000439 PARAMETER Experiment Name: At_Roots__P Parameter: Organism Value: A. thaliana
  misc_feature: MA Experiment 20000439 PARAMETER Experiment Name: At_Roots__P Parameter: Tissue Value: Roots vs. Whole Plant
  misc_feature: MA Experiment ID: 20001556 Result: Up-regulated in Transcription
  misc_feature: MA Experiment 20001556 PARAMETER Experiment Name: At_Drought_Soil_Dry_P Parameter: Age (day) Value: 26
  misc_feature: MA Experiment 20001556 PARAMETER Experiment Name: At_Drought_Soil_Dry_P Parameter: Organism Value: A. thaliana
  misc_feature: MA Experiment 20001556 PARAMETER Experiment Name: At_Drought_Soil_Dry_P Parameter: Plant Line Value: WS
  misc_feature: MA Experiment 20001556 PARAMETER Experiment Name: At_Drought_Soil_Dry_P Parameter: Post Timepoint (hr) Value: None
  misc_feature: MA Experiment 20001556 PARAMETER Experiment Name: At_Drought_Soil_Dry_P Parameter: Post-Treatment Value: None
  misc_feature: MA Experiment 20001556 PARAMETER Experiment Name: At_Drought_Soil_Dry_P Parameter: Timepoint (day) Value: 12
  misc_feature: MA Experiment 20001556 PARAMETER Experiment Name: At_Drought_Soil_Dry_P Parameter: Treatment Value: Drought vs. No Drought
atgggatttggagtaggtggtggaggtggtagaatgttggatttgaggattgtccaaaatcacaagcgttcaaagagtgccagctttccagaaaagaaaagagttgaaggagataaaacctcaaatagttctcatgaagcctctcaacgaatgaagctggacatgggacgttcaaatgaatcaaagcataatcaatatcattcaaacacggagacttcattgaagcaagagattactcacctcgagacaagattacaagatcagtttaaggttcgttgtgcattagagaaagccttaggttatcgaacagcatcttcttacgtactgactgaaacaaacgacattgccatgcctaagccagctactgatttaatcaaagacgttgcggtgctcgaaatggaagttatacatttggaacagtatcttctttcattatacagaaaagcctttgagcagcaaatctcttctgtatctccaaatttagagaacaagaagccaaaatctcctcctgttacaacccctagaaggcgtctagacttttctgaagatgatgataccccctcgaaaacagatcaacacacagttcctctgcttgatgataatcaaaatcaatcaaagaaaacagagattgctgcggttgaccgagaccagatggaccccagttttcgccgtagtcactctcaacgttcggcatttgggagtagaaaagcttctcccgaagattcttggggtaaagccagccgctcttgtcactcacagccactgtatgtgcagaatggagataacctaatcagtctagctgaacatcttggcacccgaatctcggatcatgttccagaaacacccaacaagttatctgaaggaatggtcaagtgcatgtcagaaatatactgcaagcttgcagagccaccttctgtgctacatcgtgggctttcatctccaaactcgtctttatcatcaagtgcattttcgccctctgaccaatacgatacatcgagccctggattcggaaacagctcctcttttgatgttcggctagataactctttccatgtagaaggagaaaaggacttcagtggaccttacagcagcattgttgaagtgctttgcatttacagagacgccaaaaaggccagtgaggtggaagatcttctgcaaaacttcaagtcacttattagtagattggaggaagtcgatccaaggaagttgaaacatgaagagaagctagcgttttggataaatgtgcacaatgcacttgtgatgcatgcgtttttagcttatgggattccacagaacaatgtgaagagagtcttacttctactcaaggctgcatataacattggtggacacacaattagcgccgaagcgatacaaagttcgattcttgggtgcaaaatgtctcatcctggacagtggcttagactactatttgcttcgaggaaattcaaagcaggggatgaaagattagcttatgcaatcgatcatcctgagcctctcctgcattttgcacttacttcaggcagccactccgatcccgcggttcgtgtatatacaccgaaaagaatccagcaagagcttgaaacgtcgaaagaagagtacataagaatgaacttaagcatacgcaagcagagaatcctattgccaaagcttgtggagacgtttgcaaaagactccggtttatgtccggcgggtttgacagagatggttaaccggagtataccggagtcttcaaggaaatgtgtaaagagatgtcaatctagtactagtaaaccacgaaagacaattgattggatccctcacagctttacatttagatatcttattcttagagaagctgccaaatga

SEQ ID NO: 91392 - protein, 614 aa, Arabidopsis thaliana
  peptide (1)..(614): Ceres Seq. ID no. 12727450
  misc_feature (389)..(534): Pfam Name: Protein of unknown function, DUF547 Pfam Description: Protein of unknown function, DUF547
  misc_feature (213)..(614): Homolog of NCBI NO: 15224054 NR Description: unknown protein; protein id: At2g23700.1 thaliana] >gi|20197175|gb|AAC17092.2| unknown protein thaliana] >gi|26451207|dbj|BAC42707.1| unknown protein
  misc_feature (19)..(186): Homolog of NCBI NO: 15224054 NR Description: unknown protein; protein id: At2g23700.1 thaliana] >gi|20197175|gb|AAC17092.2| unknown protein thaliana] >gi|26451207|dbj|BAC42707.1| unknown protein
  misc_feature (213)..(614): Homolog of NCBI NO: 39104579 NR Description: unknown protein [Arabidopsis thaliana]
  misc_feature (19)..(186): Homolog of NCBI NO: 39104579 NR Description: unknown protein [Arabidopsis thaliana]
  misc_feature (213)..(614): Homolog of NCBI NO: 7486263 NR Description: hypothetical protein At2g23700 [imported] -
  misc_feature (19)..(186): Homolog of NCBI NO: 7486263 NR Description: hypothetical protein At2g23700 [imported] -
  misc_feature (227)..(613): Homolog of NCBI NO: 40539066 NR Description: hypothetical protein [Oryza sativa (japonica
  misc_feature (19)..(171): Homolog of NCBI NO: 40539066 NR Description: hypothetical protein [Oryza sativa (japonica
  misc_feature (60)..(614): Homolog of NCBI NO: 28916180 NR Description: putative ternary complex factor MIP1 [Antirrhinum
  misc_feature (57)..(439): Homolog of NCBI NO: 20330763 NR Description: Hypothetical protein [Oryza sativa (japonica
MGFGVGGGGGRMLDLRIVQNHKRSKSASFPEKKRVEGDKTSNSSHEASQRMKLDMGRSNESKHNQYHSNTETSLKQEITHLETRLQDQFKVRCALEKALGYRTASSYVLTETNDIAMPKPATDLIKDVAVLEMEVIHLEQYLLSLYRKAFEQQISSVSPNLENKKPKSPPVTTPRRRLDFSEDDDTPSKTDQHTVPLLDDNQNQSKKTEIAAVDRDQMDPSFRRSHSQRSAFGSRKASPEDSWGKASRSCHSQPLYVQNGDNLISLAEHLGTRISDHVPETPNKLSEGMVKCMSEIYCKLAEPPSVLHRGLSSPNSSLSSSAFSPSDQYDTSSPGFGNSSSFDVRLDNSFHVEGEKDFSGPYSSIVEVLCIYRDAKKASEVEDLLQNFKSLISRLEEVDPRKLKHEEKLAFWINVHNALVMHAFLAYGIPQNNVKRVLLLLKAAYNIGGHTISAEAIQSSILGCKMSHPGQWLRLLFASRKFKAGDERLAYAIDHPEPLLHFALTSGSHSDPAVRVYTPKRIQQELETSKEEYIRMNLSIRKQRILLPKLVETFAKDSGLCPAGLTEMVNRSIPESSRKCVKRCQSSTSKPRKTIDWIPHSFTFRYLILREAAK

SEQ ID NO: 91393 - protein, 603 aa, Arabidopsis thaliana
  peptide (1)..(603): Ceres Seq. ID no. 12727451
  misc_feature (378)..(523): Pfam Name: Protein of unknown function, DUF547 Pfam Description: Protein of unknown function, DUF547
  misc_feature (202)..(603): Homolog of NCBI NO: 15224054 NR Description: unknown protein; protein id: At2g23700.1 thaliana] >gi|20197175|gb|AAC17092.2| unknown protein thaliana] >gi|26451207|dbj|BAC42707.1| unknown protein
  misc_feature (8)..(175): Homolog of NCBI NO: 15224054 NR Description: unknown protein; protein id: At2g23700.1 thaliana] >gi|20197175|gb|AAC17092.2| unknown protein thaliana] >gi|26451207|dbj|BAC42707.1| unknown protein
  misc_feature (202)..(603): Homolog of NCBI NO: 39104579 NR Description: unknown protein [Arabidopsis thaliana]
  misc_feature (8)..(175): Homolog of NCBI NO: 39104579 NR Description: unknown protein [Arabidopsis thaliana]
  misc_feature (202)..(603): Homolog of NCBI NO: 7486263 NR Description: hypothetical protein At2g23700 [imported] -
  misc_feature (8)..(175): Homolog of NCBI NO: 7486263 NR Description: hypothetical protein At2g23700 [imported] -
  misc_feature (216)..(602): Homolog of NCBI NO: 40539066 NR Description: hypothetical protein [Oryza sativa (japonica
  misc_feature (8)..(160): Homolog of NCBI NO: 40539066 NR Description: hypothetical protein [Oryza sativa (japonica
  misc_feature (49)..(603): Homolog of NCBI NO: 28916180 NR Description: putative ternary complex factor MIP1 [Antirrhinum
  misc_feature (46)..(428): Homolog of NCBI NO: 20330763 NR Description: Hypothetical protein [Oryza sativa (japonica
MLDLRIVQNHKRSKSASFPEKKRVEGDKTSNSSHEASQRMKLDMGRSNESKHNQYHSNTETSLKQEITHLETRLQDQFKVRCALEKALGYRTASSYVLTETNDIAMPKPATDLIKDVAVLEMEVIHLEQYLLSLYRKAFEQQISSVSPNLENKKPKSPPVTTPRRRLDFSEDDDTPSKTDQHTVPLLDDNQNQSKKTEIAAVDRDQMDPSFRRSHSQRSAFGSRKASPEDSWGKASRSCHSQPLYVQNGDNLISLAEHLGTRISDHVPETPNKLSEGMVKCMSEIYCKLAEPPSVLHRGLSSPNSSLSSSAFSPSDQYDTSSPGFGNSSSFDVRLDNSFHVEGEKDFSGPYSSIVEVLCIYRDAKKASEVEDLLQNFKSLISRLEEVDPRKLKHEEKLAFWINVHNALVMHAFLAYGIPQNNVKRVLLLLKAAYNIGGHTISAEAIQSSILGCKMSHPGQWLRLLFASRKFKAGDERLAYAIDHPEPLLHFALTSGSHSDPAVRVYTPKRIQQELETSKEEYIRMNLSIRKQRILLPKLVETFAKDSGLCPAGLTEMVNRSIPESSRKCVKRCQSSTSKPRKTIDWIPHSFTFRYLILREAAK

SEQ ID NO: 91394 - protein, 564 aa, Arabidopsis thaliana
  peptide (1)..(564): Ceres Seq. ID no. 12727452
  misc_feature (339)..(484): Pfam Name: Protein of unknown function, DUF547 Pfam Description: Protein of unknown function, DUF547
  misc_feature (163)..(564): Homolog of NCBI NO: 15224054 NR Description: unknown protein; protein id: At2g23700.1 thaliana] >gi|20197175|gb|AAC17092.2| unknown protein thaliana] >gi|26451207|dbj|BAC42707.1| unknown protein
  misc_feature (1)..(136): Homolog of NCBI NO: 15224054 NR Description: unknown protein; protein id: At2g23700.1 thaliana] >gi|20197175|gb|AAC17092.2| unknown protein thaliana] >gi|26451207|dbj|BAC42707.1| unknown protein
  misc_feature (163)..(564): Homolog of NCBI NO: 39104579 NR Description: unknown protein [Arabidopsis thaliana]
  misc_feature (1)..(136): Homolog of NCBI NO: 39104579 NR Description: unknown protein [Arabidopsis thaliana]
  misc_feature (163)..(564): Homolog of NCBI NO: 7486263 NR Description: hypothetical protein At2g23700 [imported] -
  misc_feature (1)..(136): Homolog of NCBI NO: 7486263 NR Description: hypothetical protein At2g23700 [imported] -
  misc_feature (177)..(563): Homolog of NCBI NO: 40539066 NR Description: hypothetical protein [Oryza sativa (japonica
  misc_feature (1)..(121): Homolog of NCBI NO: 40539066 NR Description: hypothetical protein [Oryza sativa (japonica
  misc_feature (10)..(564): Homolog of NCBI NO: 28916180 NR Description: putative ternary complex factor MIP1 [Antirrhinum
  misc_feature (7)..(389): Homolog of NCBI NO: 20330763 NR Description: Hypothetical protein [Oryza sativa (japonica
MKLDMGRSNESKHNQYHSNTETSLKQEITHLETRLQDQFKVRCALEKALGYRTASSYVLTETNDIAMPKPATDLIKDVAVLEMEVIHLEQYLLSLYRKAFEQQISSVSPNLENKKPKSPPVTTPRRRLDFSEDDDTPSKTDQHTVPLLDDNQNQSKKTEIAAVDRDQMDPSFRRSHSQRSAFGSRKASPEDSWGKASRSCHSQPLYVQNGDNLISLAEHLGTRISDHVPETPNKLSEGMVKCMSEIYCKLAEPPSVLHRGLSSPNSSLSSSAFSPSDQYDTSSPGFGNSSSFDVRLDNSFHVEGEKDFSGPYSSIVEVLCIYRDAKKASEVEDLLQNFKSLISRLEEVDPRKLKHEEKLAFWINVHNALVMHAFLAYGIPQNNVKRVLLLLKAAYNIGGHTISAEAIQSSILGCKMSHPGQWLRLLFASRKFKAGDERLAYAIDHPEPLLHFALTSGSHSDPAVRVYTPKRIQQELETSKEEYIRMNLSIRKQRILLPKLVETFAKDSGLCPAGLTEMVNRSIPESSRKCVKRCQSSTSKPRKTIDWIPHSFTFRYLILREAAK

SEQ ID NO: 91395 - DNA, 1356 bp, Arabidopsis thaliana
  misc_feature (1)..(1356): Ceres Seq. ID no. 12727453
  misc_feature: MA Experiment ID: 20000328 Result: Down-regulated in Transcription
  misc_feature: MA Experiment 20000328 PARAMETER Experiment Name: At_42deg_Heat_Sub_P Parameter: Age (day) Value: 14
  misc_feature: MA Experiment 20000328 PARAMETER Experiment Name: At_42deg_Heat_Sub_P Parameter: Organism Value: A. thaliana
  misc_feature: MA Experiment 20000328 PARAMETER Experiment Name: At_42deg_Heat_Sub_P Parameter: Plant Line Value: WS
  misc_feature: MA Experiment 20000328 PARAMETER Experiment Name: At_42deg_Heat_Sub_P Parameter: Temperature (deg C) Value: 42 vs. 22
  misc_feature: MA Experiment 20000328 PARAMETER Experiment Name: At_42deg_Heat_Sub_P Parameter: Timepoint (hr) Value: 6
  misc_feature: MA Experiment 20000328 PARAMETER Experiment Name: At_42deg_Heat_Sub_P Parameter: Tissue Value: Aerial
  misc_feature: MA Experiment ID: 20000329 Result: Up-regulated in Transcription
  misc_feature: MA Experiment 20000329 PARAMETER Experiment Name: At_4deg_Cold_Sub_P Parameter: Age (day) Value: 14
  misc_feature: MA Experiment 20000329 PARAMETER Experiment Name: At_4deg_Cold_Sub_P Parameter: Organism Value: A. thaliana
  misc_feature: MA Experiment 20000329 PARAMETER Experiment Name: At_4deg_Cold_Sub_P Parameter: Plant Line Value: WS
  misc_feature: MA Experiment 20000329 PARAMETER Experiment Name: At_4deg_Cold_Sub_P Parameter: Temperature (deg C) Value: 4 vs. 22
  misc_feature: MA Experiment 20000329 PARAMETER Experiment Name: At_4deg_Cold_Sub_P Parameter: Timepoint (hr) Value: 6
  misc_feature: MA Experiment 20000329 PARAMETER Experiment Name: At_4deg_Cold_Sub_P Parameter: Tissue Value: Aerial
  misc_feature: MA Experiment ID: 20000347 Result: Up-regulated in Transcription
  misc_feature: MA Experiment 20000347 PARAMETER Experiment Name: At_2mM_SA_Sub_P Parameter: Age (day) Value: 14
  misc_feature: MA Experiment 20000347 PARAMETER Experiment Name: At_2mM_SA_Sub_P Parameter: Organism Value: A. thaliana
  misc_feature: MA Experiment 20000347 PARAMETER Experiment Name: At_2mM_SA_Sub_P Parameter: Plant Line Value: WS
  misc_feature: MA Experiment 20000347 PARAMETER Experiment Name: At_2mM_SA_Sub_P Parameter: Timepoint (hr) Value: 6
  misc_feature: MA Experiment 20000347 PARAMETER Experiment Name: At_2mM_SA_Sub_P Parameter: Tissue Value: Aerial
  misc_feature: MA Experiment 20000347 PARAMETER Experiment Name: At_2mM_SA_Sub_P Parameter: Treatment Value: 2mM SA vs. No Treatment
  misc_feature: MA Experiment ID: 20000348 Result: Down-regulated in Transcription
  misc_feature: MA Experiment 20000348 PARAMETER Experiment Name: At_100uM_ABA_Sub_P Parameter: Age (day) Value: 14
  misc_feature: MA Experiment 20000348 PARAMETER Experiment Name: At_100uM_ABA_Sub_P Parameter: Organism Value: A. thaliana
  misc_feature: MA Experiment 20000348 PARAMETER Experiment Name: At_100uM_ABA_Sub_P Parameter: Plant Line Value: WS
  misc_feature: MA Experiment 20000348 PARAMETER Experiment Name: At_100uM_ABA_Sub_P Parameter: Timepoint (hr) Value: 1
  misc_feature: MA Experiment 20000348 PARAMETER Experiment Name: At_100uM_ABA_Sub_P Parameter: Tissue Value: Aerial
  misc_feature: MA Experiment 20000348 PARAMETER Experiment Name: At_100uM_ABA_Sub_P Parameter: Treatment Value: 100uM ABA vs. No Treatment
  misc_feature: MA Experiment ID: 20000440 Result: Down-regulated in Transcription
  misc_feature: MA Experiment 20000440 PARAMETER Experiment Name: At_Closed-Flower__Sub_P Parameter: Tissue Value: Closed Flower vs. Whole Plant
atggtacgtcggaaaagacaagaagaagatgaaaagattgagattgaaagggttaaggaagaaagtttgaagctagctaagcaggcggaagaaaagagaagattagaagagtcgaaggagcaaggcaaaagaatacaagtggacgatgatcagcttgcaaagactacttctaaagataagggacaaattaatcattccaaagatgtagtggaagaagatgtgaatcctcctcctagcagtattgatggcaaatctgagattggagatggaacatctgtcaatcctcgatgtttatgttgttttcattgccacagaccatttgttatgcacgagattttgaagaagggaaaatttcacatagattgctacaaggagtactaccgtaatcgcaactgctatgtttgccaacaaaagattcctgtaaatgcggaaggtataagaaagttcagtgagcatccgttctggaaggagaaatactgtcctattcatgatgaggatggaactgccaagtgttgcagctgtgaaagattagagcctaggggaacgaactatgtaatgcttggtgatttccggtggctatgtatagagtgtatgggatcagcggttatggatactaacgaagtccagcctttgcactttgaaatccgtgaattcttcgaaggcttgttcttgaaggttgacaaagaatttgctctgcttcttgtcgagaaacaagcgcttaataaagctgaggaagaagagaagatcgactaccatcgtgcagccgtaaccagaggtctttgcatgtctgaagagcaaattgtcccaagtataataaaagggccacggatgggaccggacaatcagctaataacagacatagttacagagtctcaaagagtgagtggattcgaggttacagggattctcatcatatatggacttcctaggttactaacaggatatatcttggctcacgagatgatgcatgcttggcttagactcaatggttataagaatcttaagttagagcttgaagaaggattatgtcaagcgttaggtctcagatggttggagtctcagacatttgcatctactgatgctgctgctgctgctgctgtagcttcttcctcttctttttcttcttccactgctcctccagccgctatcacgtcaaagaaaagtgacgactggtctattttcgagaagaagctcgtagagttttgcatgaatcagatcaaagaggatgattcaccggtctacggtctcggattcaaacaagtttacgagatgatggtctcaaataactacaacattaaggatacccttaaagatatcgttagcgcttccaacgctacaccagattcaacggtttga

SEQ ID NO: 91396 - protein, 451 aa, Arabidopsis thaliana
  peptide (1)..(451): Ceres Seq. ID no. 12727454
  misc_feature (1)..(451): Homolog of NCBI NO: 8843722 NR Description: emb|CAB16816.1~gene_id:MSN2.2~similar to unknown
  misc_feature (1)..(451): Homolog of NCBI NO: 30698242 NR Description: expressed protein [Arabidopsis thaliana]
  misc_feature (3)..(447): Homolog of NCBI NO: 22326876 NR Description: disease resistance protein (TIR-NBS-LRR class), protein id: At5g17890.1, supported by cDNA: gi_19310532
  misc_feature (6)..(440): Homolog of NCBI NO: 15240018 NR Description: putative protein; protein id: At5g66620.1 thaliana] >gi|10177543|dbj|BAB10938.1|
  misc_feature (109)..(447): Homolog of NCBI NO: 10177891 NR Description: emb|CAB16816.1|~gene_id:MPI7.6~similar to unknown
  misc_feature (67)..(440): Homolog of NCBI NO: 27808630 NR Description: At5g66630 [Arabidopsis thaliana]
  misc_feature (67)..(440): Homolog of NCBI NO: 30698240 NR Description: expressed protein [Arabidopsis thaliana]
  misc_feature (132)..(451): Homolog of NCBI NO: 15240017 NR Description: putative protein; protein id: At5g66610.1 thaliana] >gi|10177542|dbj|BAB10937.1|
  misc_feature (2)..(439): Homolog of NCBI NO: 17065046 NR Description: Unknown protein [Arabidopsis thaliana]
  misc_feature (94)..(439): Homolog of NCBI NO: 22329212 NR Description: putative protein; protein id: At4g36860.1,
MVRRKRQEEDEKIEIERVKEESLKLAKQAEEKRRLEESKEQGKRIQVDDDQLAKTTSKDKGQINHSKDVVEEDVNPPPSSIDGKSEIGDGTSVNPRCLCCFHCHRPFVMHEILKKGKFHIDCYKEYYRNRNCYVCQQKIPVNAEGIRKFSEHPFWKEKYCPIHDEDGTAKCCSCERLEPRGTNYVMLGDFRWLCIECMGSAVMDTNEVQPLHFEIREFFEGLFLKVDKEFALLLVEKQALNKAEEEEKIDYHRAAVTRGLCMSEEQIVPSIIKGPRMGPDNQLITDIVTESQRVSGFEVTGILIIYGLPRLLTGYILAHEMMHAWLRLNGYKNLKLELEEGLCQALGLRWLESQTFASTDAAAAAAVASSSSFSSSTAPPAAITSKKSDDWSIFEKKLVEFCMNQIKEDDSPVYGLGFKQVYEMMVSNNYNIKDTLKDIVSASNATPDSTV

SEQ ID NO: 91397 - protein, 343 aa, Arabidopsis thaliana
  peptide (1)..(343): Ceres Seq. ID no. 12727455
  misc_feature (1)..(343): Homolog of NCBI NO: 8843722 NR Description: emb|CAB16816.1~gene_id:MSN2.2~similar to unknown
  misc_feature (1)..(343): Homolog of NCBI NO: 30698242 NR Description: expressed protein [Arabidopsis thaliana]
  misc_feature (1)..(339): Homolog of NCBI NO: 22326876 NR Description: disease resistance protein (TIR-NBS-LRR class), protein id: At5g17890.1, supported by cDNA: gi_19310532
  misc_feature (1)..(332): Homolog of NCBI NO: 15240018 NR Description: putative protein; protein id: At5g66620.1 thaliana] >gi|10177543|dbj|BAB10938.1|
  misc_feature (1)..(339): Homolog of NCBI NO: 10177891 NR Description: emb|CAB16816.1|~gene_id:MPI7.6~similar to unknown
  misc_feature (1)..(332): Homolog of NCBI NO: 27808630 NR Description: At5g66630 [Arabidopsis thaliana]
  misc_feature (1)..(332): Homolog of NCBI NO: 30698240 NR Description: expressed protein [Arabidopsis thaliana]
  misc_feature (24)..(343): Homolog of NCBI NO: 15240017 NR Description: putative protein; protein id: At5g66610.1 thaliana] >gi|10177542|dbj|BAB10937.1|
  misc_feature (1)..(331): Homolog of NCBI NO: 17065046 NR Description: Unknown protein [Arabidopsis thaliana]
  misc_feature (1)..(331): Homolog of NCBI NO: 22329212 NR Description: putative protein; protein id: At4g36860.1,
MHEILKKGKFHIDCYKEYYRNRNCYVCQQKIPVNAEGIRKFSEHPFWKEKYCPIHDEDGTAKCCSCERLEPRGTNYVMLGDFRWLCIECMGSAVMDTNEVQPLHFEIREFFEGLFLKVDKEFALLLVEKQALNKAEEEEKIDYHRAAVTRGLCMSEEQIVPSIIKGPRMGPDNQLITDIVTESQRVSGFEVTGILIIYGLPRLLTGYILAHEMMHAWLRLNGYKNLKLELEEGLCQALGLRWLESQTFASTDAAAAAAVASSSSFSSSTAPPAAITSKKSDDWSIFEKKLVEFCMNQIKEDDSPVYGLGFKQVYEMMVSNNYNIKDTLKDIVSASNATPDSTV

SEQ ID NO: 91398 - protein, 266 aa, Arabidopsis thaliana
  peptide (1)..(266): Ceres Seq. ID no. 12727456
  misc_feature (1)..(266): Homolog of NCBI NO: 8843722 NR Description: emb|CAB16816.1~gene_id:MSN2.2~similar to unknown
  misc_feature (1)..(266): Homolog of NCBI NO: 30698242 NR Description: expressed protein [Arabidopsis thaliana]
  misc_feature (1)..(262): Homolog of NCBI NO: 22326876 NR Description: disease resistance protein (TIR-NBS-LRR class), protein id: At5g17890.1, supported by cDNA: gi_19310532
  misc_feature (1)..(255): Homolog of NCBI NO: 15240018 NR Description: putative protein; protein id: At5g66620.1 thaliana] >gi|10177543|dbj|BAB10938.1|
  misc_feature (1)..(262): Homolog of NCBI NO: 10177891 NR Description: emb|CAB16816.1|~gene_id:MPI7.6~similar to unknown
  misc_feature (1)..(255): Homolog of NCBI NO: 27808630 NR Description: At5g66630 [Arabidopsis thaliana]
  misc_feature (1)..(255): Homolog of NCBI NO: 30698240 NR Description: expressed protein [Arabidopsis thaliana]
  misc_feature (1)..(266): Homolog of NCBI NO: 15240017 NR Description: putative protein; protein id: At5g66610.1 thaliana] >gi|10177542|dbj|BAB10937.1|
  misc_feature (1)..(254): Homolog of NCBI NO: 17065046 NR Description: Unknown protein [Arabidopsis thaliana]
  misc_feature (1)..(254): Homolog of NCBI NO: 22329212 NR Description: putative protein; protein id: At4g36860.1,
MLGDFRWLCIECMGSAVMDTNEVQPLHFEIREFFEGLFLKVDKEFALLLVEKQALNKAEEEEKIDYHRAAVTRGLCMSEEQIVPSIIKGPRMGPDNQLITDIVTESQRVSGFEVTGILIIYGLPRLLTGYILAHEMMHAWLRLNGYKNLKLELEEGLCQALGLRWLESQTFASTDAAAAAAVASSSSFSSSTAPPAAITSKKSDDWSIFEKKLVEFCMNQIKEDDSPVYGLGFKQVYEMMVSNNYNIKDTLKDIVSASNATPDSTV

SEQ ID NO: 91399 - DNA, 687 bp, Arabidopsis thaliana
  misc_feature (1)..(687): Ceres Seq. ID no. 12727465
  misc_feature: MA Experiment ID: 20000439 Result: Up-regulated in Transcription
  misc_feature: MA Experiment 20000439 PARAMETER Experiment Name: At_Roots__P Parameter: Age (day) Value: 14 vs. 21
  misc_feature: MA Experiment 20000439 PARAMETER Experiment Name: At_Roots__P Parameter: Organism Value: A. thaliana
  misc_feature: MA Experiment 20000439 PARAMETER Experiment Name: At_Roots__P Parameter: Tissue Value: Roots vs. Whole Plant
  misc_feature: MA Experiment ID: 20000709 Result: Down-regulated in Transcription
  misc_feature: MA Experiment 20000709 PARAMETER Experiment Name: At_15mM_NH4NO3_L-to-H_P Parameter: Age (hr) Value: 14
  misc_feature: MA Experiment 20000709 PARAMETER Experiment Name: At_15mM_NH4NO3_L-to-H_P Parameter: Organism Value: A. thaliana
  misc_feature: MA Experiment 20000709 PARAMETER Experiment Name: At_15mM_NH4NO3_L-to-H_P Parameter: Plant Line Value: WS
  misc_feature: MA Experiment 20000709 PARAMETER Experiment Name: At_15mM_NH4NO3_L-to-H_P Parameter: Timepoint (hr) Value: 4
  misc_feature: MA Experiment 20000709 PARAMETER Experiment Name: At_15mM_NH4NO3_L-to-H_P Parameter: Tissue Value: Aerial
  misc_feature: MA Experiment 20000709 PARAMETER Experiment Name: At_15mM_NH4NO3_L-to-H_P Parameter: Treatment Value: 15mM NH4NO3 vs. 30mM Mannitol
  misc_feature: MA Experiment ID: 20001554 Result: Up-regulated in Transcription
  misc_feature: MA Experiment 20001554 PARAMETER Experiment Name: At_Drought_Soil_Dry_P Parameter: Age (day) Value: 21
  misc_feature: MA Experiment 20001554 PARAMETER Experiment Name: At_Drought_Soil_Dry_P Parameter: Organism Value: A. thaliana
  misc_feature: MA Experiment 20001554 PARAMETER Experiment Name: At_Drought_Soil_Dry_P Parameter: Plant Line Value: WS
  misc_feature: MA Experiment 20001554 PARAMETER Experiment Name: At_Drought_Soil_Dry_P Parameter: Post Timepoint (hr) Value: None
  misc_feature: MA Experiment 20001554 PARAMETER Experiment Name: At_Drought_Soil_Dry_P Parameter: Post-Treatment Value: None
  misc_feature: MA Experiment 20001554 PARAMETER Experiment Name: At_Drought_Soil_Dry_P Parameter: Timepoint (day) Value: 7
  misc_feature: MA Experiment 20001554 PARAMETER Experiment Name: At_Drought_Soil_Dry_P Parameter: Treatment Value: Drought vs. No Drought
  misc_feature: MA Experiment ID: 20001557 Result: Down-regulated in Transcription
  misc_feature: MA Experiment 20001557 PARAMETER Experiment Name: At_Drought_Soil_Dry_P Parameter: Age (day) Value: 27
  misc_feature: MA Experiment 20001557 PARAMETER Experiment Name: At_Drought_Soil_Dry_P Parameter: Organism Value: A. thaliana
  misc_feature: MA Experiment 20001557 PARAMETER Experiment Name: At_Drought_Soil_Dry_P Parameter: Plant Line Value: WS
  misc_feature: MA Experiment 20001557 PARAMETER Experiment Name: At_Drought_Soil_Dry_P Parameter: Post Timepoint (hr) Value: 3
  misc_feature: MA Experiment 20001557 PARAMETER Experiment Name: At_Drought_Soil_Dry_P Parameter: Post-Treatment Value: Re-Water vs. No Drought
  misc_feature: MA Experiment 20001557 PARAMETER Experiment Name: At_Drought_Soil_Dry_P Parameter: Timepoint (day) Value: 13
  misc_feature: MA Experiment 20001557 PARAMETER Experiment Name: At_Drought_Soil_Dry_P Parameter: Treatment Value: Drought vs. No Drought
  misc_feature: MA Experiment ID: 20001558 Result: Down-regulated in Transcription
  misc_feature: MA Experiment 20001558 PARAMETER Experiment Name: At_Drought_Soil_Dry_P Parameter: Age (day) Value: 27
  misc_feature: MA Experiment 20001558 PARAMETER Experiment Name: At_Drought_Soil_Dry_P Parameter: Organism Value: A. thaliana
  misc_feature: MA Experiment 20001558 PARAMETER Experiment Name: At_Drought_Soil_Dry_P Parameter: Plant Line Value: WS
  misc_feature: MA Experiment 20001558 PARAMETER Experiment Name: At_Drought_Soil_Dry_P Parameter: Post Timepoint (hr) Value: 6
  misc_feature: MA Experiment 20001558 PARAMETER Experiment Name: At_Drought_Soil_Dry_P Parameter: Post-Treatment Value: Re-Water vs. No Drought
  misc_feature: MA Experiment 20001558 PARAMETER Experiment Name: At_Drought_Soil_Dry_P Parameter: Timepoint (day) Value: 13
  misc_feature: MA Experiment 20001558 PARAMETER Experiment Name: At_Drought_Soil_Dry_P Parameter: Treatment Value: Drought vs. No Drought
atggatcatggtaggttaatggatgatcaaatgatgctaggctctcaagtgtacccctacacgacccaaccccaaaattcacactgcatcatcgttaaccagatcgatggaggcgaagaatcaaaaccggtgaagcggaggaggaagaggaggagtaaaggttcatcagccaccaacgaagaagacgtggcggagatcggagggatgttgaggaagaggaagttgaccgatgaacaagtgaacatgctcgaatatagcttcgggaacgagcataagctggagtcagggaggaaggagaagatcgccggagagttaggtcttgacccgagacaggtggctgtttggttccagaaccgccgtgcacgttggaagaacaagaaactagaggaagagtacgccaaactcaaaaaccaccacgacaacgtcgtactcggccaatgccaactcgagtctcagatattgaaactaacagaacaattgagtgaagctcaaagtgaaattcgaaaactgtcggaacgacttgaagaaatgccaaccaacagttcaagttcatcgctttctgttgaagccaacaatgcaccaactgatttcgagcttgccccggaaactaattataacatcccgttttatatgttagataataattatttacaaagcatggagtattgggatggtttgtatgtataa

SEQ ID NO: 91400 - protein, 228 aa, Arabidopsis thaliana
  peptide (1)..(228): Ceres Seq. ID no. 12727466
  misc_feature (72)..(125): Pfam Name: Homeobox domain Pfam Description: Homeobox domain
  misc_feature (1)..(228): Homolog of NCBI NO: 15240052 NR Description: homeodomain transcription factor-like; protein At5g66700.1 [Arabidopsis thaliana] >gi|8843728|dbj|BAA97276.1|
  misc_feature (7)..(228): Homolog of NCBI NO: 15234508 NR Description: homeodomain protein; protein id: At4g36740.1
  misc_feature (1)..(226): Homolog of NCBI NO: 15224190 NR Description: homeodomain protein; protein id: At2g18550.1 thaliana] >gi|25411880|pir||F84565 probable homeodomain
  misc_feature (42)..(170): Homolog of NCBI NO: 33146844 NR Description: homeodomain protein-like [Oryza sativa (japonica
  misc_feature (115)..(222): Homolog of NCBI NO: 11231049 NR Description: homeobox-leucine zipper protein [Zinnia elegans]
  misc_feature (59)..(194): Homolog of NCBI NO: 7446256 NR Description: homeotic protein VAHOX1 - tomato
  misc_feature (39)..(194): Homolog of NCBI NO: 18034441 NR Description: homeodomain leucine zipper protein CPHB-5
  misc_feature (42)..(196): Homolog of NCBI NO: 3868841 NR Description: CRHB7 [Ceratopteris richardii]
  misc_feature (37)..(227): Homolog of NCBI NO: 15232122 NR Description: homeobox-leucine zipper protein HAT5 (HD-ZIP
  misc_feature (68)..(183): Homolog of NCBI NO: 3868839 NR Description: CRHB6 [Ceratopteris richardii]
MDHGRLMDDQMMLGSQVYPYTTQPQNSHCIIVNQIDGGEESKPVKRRRKRRSKGSSATNEEDVAEIGGMLRKRKLTDEQVNMLEYSFGNEHKLESGRKEKIAGELGLDPRQVAVWFQNRRARWKNKKLEEEYAKLKNHHDNVVLGQCQLESQILKLTEQLSEAQSEIRKLSERLEEMPTNSSSSSLSVEANNAPTDFELAPETNYNIPFYMLDNNYLQSMEYWDGLYV

SEQ ID NO: 91401 - protein, 222 aa, Arabidopsis thaliana
  peptide (1)..(222): Ceres Seq. ID no. 12727467
  misc_feature (66)..(119): Pfam Name: Homeobox domain Pfam Description: Homeobox domain
  misc_feature (1)..(222): Homolog of NCBI NO: 15240052 NR Description: homeodomain transcription factor-like; protein At5g66700.1 [Arabidopsis thaliana] >gi|8843728|dbj|BAA97276.1|
  misc_feature (1)..(222): Homolog of NCBI NO: 15234508 NR Description: homeodomain protein; protein id: At4g36740.1
  misc_feature (1)..(220): Homolog of NCBI NO: 15224190 NR Description: homeodomain protein; protein id: At2g18550.1 thaliana] >gi|25411880|pir||F84565 probable homeodomain
  misc_feature (36)..(164): Homolog of NCBI NO: 33146844 NR Description: homeodomain protein-like [Oryza sativa (japonica
  misc_feature (109)..(216): Homolog of NCBI NO: 11231049 NR Description: homeobox-leucine zipper protein [Zinnia elegans]
  misc_feature (53)..(188): Homolog of NCBI NO: 7446256 NR Description: homeotic protein VAHOX1 - tomato
  misc_feature (33)..(188): Homolog of NCBI NO: 18034441 NR Description: homeodomain leucine zipper protein CPHB-5
  misc_feature (36)..(190): Homolog of NCBI NO: 3868841 NR Description: CRHB7 [Ceratopteris richardii]
  misc_feature (31)..(221): Homolog of NCBI NO: 15232122 NR Description: homeobox-leucine zipper protein HAT5 (HD-ZIP
  misc_feature (62)..(177): Homolog of NCBI NO: 3868839 NR Description: CRHB6 [Ceratopteris richardii]
MDDQMMLGSQVYPYTTQPQNSHCIIVNQIDGGEESKPVKRRRKRRSKGSSATNEEDVAEIGGMLRKRKLTDEQVNMLEYSFGNEHKLESGRKEKIAGELGLDPRQVAVWFQNRRARWKNKKLEEEYAKLKNHHDNVVLGQCQLESQILKLTEQLSEAQSEIRKLSERLEEMPTNSSSSSLSVEANNAPTDFELAPETNYNIPFYMLDNNYLQSMEYWDGLYV

SEQ ID NO: 91402 - protein, 218 aa, Arabidopsis thaliana
  peptide (1)..(218): Ceres Seq. ID no. 12727468
  misc_feature (62)..(115): Pfam Name: Homeobox domain Pfam Description: Homeobox domain
  misc_feature (1)..(218): Homolog of NCBI NO: 15240052 NR Description: homeodomain transcription factor-like; protein At5g66700.1 [Arabidopsis thaliana] >gi|8843728|dbj|BAA97276.1|
  misc_feature (1)..(218): Homolog of NCBI NO: 15234508 NR Description: homeodomain protein; protein id: At4g36740.1
  misc_feature (1)..(216): Homolog of NCBI NO: 15224190 NR Description: homeodomain protein; protein id: At2g18550.1 thaliana] >gi|25411880|pir||F84565 probable homeodomain
  misc_feature (32)..(160): Homolog of NCBI NO: 33146844 NR Description: homeodomain protein-like [Oryza sativa (japonica
  misc_feature (105)..(212): Homolog of NCBI NO: 11231049 NR Description: homeobox-leucine zipper protein [Zinnia elegans]
  misc_feature (49)..(184): Homolog of NCBI NO: 7446256 NR Description: homeotic protein VAHOX1 - tomato
  misc_feature (29)..(184): Homolog of NCBI NO: 18034441 NR Description: homeodomain leucine zipper protein CPHB-5
  misc_feature (32)..(186): Homolog of NCBI NO: 3868841 NR Description: CRHB7 [Ceratopteris richardii]
  misc_feature (27)..(217): Homolog of NCBI NO: 15232122 NR Description: homeobox-leucine zipper protein HAT5 (HD-ZIP
  misc_feature (58)..(173): Homolog of NCBI NO: 3868839 NR Description: CRHB6 [Ceratopteris richardii]
MMLGSQVYPYTTQPQNSHCIIVNQIDGGEESKPVKRRRKRRSKGSSATNEEDVAEIGGMLRKRKLTDEQVNMLEYSFGNEHKLESGRKEKIAGELGLDPRQVAVWFQNRRARWKNKKLEEEYAKLKNHHDNVVLGQCQLESQILKLTEQLSEAQSEIRKLSERLEEMPTNSSSSSLSVEANNAPTDFELAPETNYNIPFYMLDNNYLQSMEYWDGLYV

SEQ ID NO: 91403 - DNA, 893 bp, Arabidopsis thaliana
  misc_feature (1)..(893): Ceres Seq. ID no. 12727485
  misc_feature: MA Experiment ID: 20000180 Result: Down-regulated in Transcription
  misc_feature: MA Experiment 20000180 PARAMETER Experiment Name: At_Germinating_Seeds_P Parameter: Age (hr) Value: 24 vs. 0
  misc_feature: MA Experiment 20000180 PARAMETER Experiment Name: At_Germinating_Seeds_P Parameter: Tissue Value: Germinating Seeds
aaaccctaacgtcacatcgaactctaaaccacactgagatggcgaaatggtggcgaggcctgagatccgtgacggcggaggtggctgatcttccggcttcttcattcggtcgatcgattcgatgtattcatcagtatcagacgatccaggcgattccacgtgaagctacgggtcgaggagtatcggctcgggatcggacgattggtcgtattcccgccgtcgttttcccgcaatcgcttctagatactgatgcttcgaagcgaggcgtgtcgaggaagcagctattgacggcggataagaagcagatcaagtctattattgactctgttggtctcccattcttctgttctaccactttccagcttcagatccgagctggtcagggttcgtcgacgcttgttgaatcgggtcgagtacttcccctcaaggttcatagagacgaagaaactggaaagatacttaatttagtattcgtatgggctgatgatggggagaagttgaaggttgatgttcctgttgttttcaaagggttggatcattgtcctggtctccagaaagggggaaacctgcggacaatccgaagcactctgaaactactagggccagctgagcacattccatctaaaatcgaagtagatgtgagcaatctggacattgaagacaaagtgttattgcaagacgttgtatttcatccatcattgaagctactgagcaagaatgaaaccatgcccgtgtgtaagattgtcgccacaagcccggtgaaagaaccagaagctgttcaagcataaaataagtctttgaaaagagtaatgtaatgtctctctgaagtttctgttccatacaaaaatgatcatttgtagaattctcagaggaaagaagcagatttttagaat

SEQ ID NO: 91404 - protein, 261 aa, Arabidopsis thaliana
  peptide (1)..(261): Ceres Seq. ID no. 12727486
  misc_feature (13)..(261): Homolog of NCBI NO: 15240108 NR Description: putative protein; protein id: At5g66860.1, by cDNA: gi_15450929, supported by cDNA: gi_17978762 [Arabidopsis >gi|9758136|dbj|BAB08628.1| gene_id:MUD21.12~pir||T05594~similar
  misc_feature (46)..(247): Homolog of NCBI NO: 15236554 NR Description: putative protein; protein id: At4g23620.1, by cDNA: 6527., supported by cDNA: gi_18253004 [Arabidopsis
  misc_feature (46)..(213): Homolog of NCBI NO: 34912284 NR Description: P0451D05.2 [Oryza sativa (japonica
  misc_feature (78)..(258): Homolog of NCBI NO: 22961530 NR Description: hypothetical protein [Rhodopseudomonas palustris]
  misc_feature (103)..(261): Homolog of NCBI NO: 15644375 NR Description: general stress protein Ctc [Thermotoga maritima]
  misc_feature (103)..(257): Homolog of NCBI NO: 23106991 NR Description: hypothetical protein [Novosphingobium
TLTSHRTLNHTEMAKWWRGLRSVTAEVADLPASSFGRSIRCIHQYQTIQAIPREATGRGVSARDRTIGRIPAVVFPQSLLDTDASKRGVSRKQLLTADKKQIKSIIDSVGLPFFCSTTFQLQIRAGQGSSTLVESGRVLPLKVHRDEETGKILNLVFVWADDGEKLKVDVPVVFKGLDHCPGLQKGGNLRTIRSTLKLLGPAEHIPSKIEVDVSNLDIEDKVLLQDVVFHPSLKLLSKNETMPVCKIVATSPVKEPEAVQA

SEQ ID NO: 91405 - protein, 249 aa, Arabidopsis thaliana
  peptide (1)..(249): Ceres Seq. ID no. 12727487
  misc_feature (1)..(249): Homolog of NCBI NO: 15240108 NR Description: putative protein; protein id: At5g66860.1, by cDNA: gi_15450929, supported by cDNA: gi_17978762 [Arabidopsis >gi|9758136|dbj|BAB08628.1| gene_id:MUD21.12~pir||T05594~similar
  misc_feature (34)..(235): Homolog of NCBI NO: 15236554 NR Description: putative protein; protein id: At4g23620.1, by cDNA: 6527., supported by cDNA: gi_18253004 [Arabidopsis
  misc_feature (34)..(201): Homolog of NCBI NO: 34912284 NR Description: P0451D05.2 [Oryza sativa (japonica
  misc_feature (66)..(246): Homolog of NCBI NO: 22961530 NR Description: hypothetical protein [Rhodopseudomonas palustris]
  misc_feature (91)..(249): Homolog of NCBI NO: 15644375 NR Description: general stress protein Ctc [Thermotoga maritima]
  misc_feature (91)..(245): Homolog of NCBI NO: 23106991 NR Description: hypothetical protein [Novosphingobium
MAKWWRGLRSVTAEVADLPASSFGRSIRCIHQYQTIQAIPREATGRGVSARDRTIGRIPAVVFPQSLLDTDASKRGVSRKQLLTADKKQIKSIIDSVGLPFFCSTTFQLQIRAGQGSSTLVESGRVLPLKVHRDEETGKILNLVFVWADDGEKLKVDVPVVFKGLDHCPGLQKGGNLRTIRSTLKLLGPAEHIPSKIEVDVSNLDIEDKVLLQDVVFHPSLKLLSKNETMPVCKIVATSPVKEPEAVQA

SEQ ID NO: 91406 - DNA, 2430 bp, Arabidopsis thaliana
  misc_feature (1)..(2430): Ceres Seq. ID no. 12727496
  misc_feature: MA Experiment ID: 20000184 Result: Down-regulated in Transcription
  misc_feature: MA Experiment 20000184 PARAMETER Experiment Name: At_Shoots__P Parameter: Age (day) Value: 7
  misc_feature: MA Experiment 20000184 PARAMETER Experiment Name: At_Shoots__P Parameter: Tissue Value: Shoots vs. Whole Plant
  misc_feature: MA Experiment ID: 20000234 Result: Down-regulated in Transcription
  misc_feature: MA Experiment 20000234 PARAMETER Experiment Name: At_Siliques_P Parameter: Age (day) Value: 21
  misc_feature: MA Experiment 20000234 PARAMETER Experiment Name: At_Siliques_P Parameter: Organism Value: A. thaliana
  misc_feature: MA Experiment 20000234 PARAMETER Experiment Name: At_Siliques_P Parameter: Plant Line Value: WS
  misc_feature: MA Experiment 20000234 PARAMETER Experiment Name: At_Siliques_P Parameter: Tissue Value: Less Than 5mm Siliques vs. Whole Plant
  misc_feature: MA Experiment ID: 20000264 Result: Down-regulated in Transcription
  misc_feature: MA Experiment 20000264 PARAMETER Experiment Name: At_Open_Flower_P Parameter: Age (day) Value: 21
  misc_feature: MA Experiment 20000264 PARAMETER Experiment Name: At_Open_Flower_P Parameter: Plant Line Value: WS
  misc_feature: MA Experiment 20000264 PARAMETER Experiment Name: At_Open_Flower_P Parameter: Tissue Value: Open Flower vs. Whole Plant
  misc_feature: MA Experiment ID: 20000265 Result: Down-regulated in Transcription
  misc_feature: MA Experiment 20000265 PARAMETER Experiment Name: At_Open_Flower_P Parameter: Age (day) Value: 21
  misc_feature: MA Experiment 20000265 PARAMETER Experiment Name: At_Open_Flower_P Parameter: Plant Line Value: WS
  misc_feature: MA Experiment 20000265 PARAMETER Experiment Name: At_Open_Flower_P Parameter: Tissue Value: Closed Flower vs. Whole Plant
  misc_feature: MA Experiment ID: 20000495 Result: Down-regulated in Transcription
  misc_feature: MA Experiment 20000495 PARAMETER Experiment Name: At_Guard_Cells_P Parameter: Harvest Date Value: 8/2/2002
  misc_feature: MA Experiment 20000495 PARAMETER Experiment Name: At_Guard_Cells_P Parameter: Organism Value: A. thaliana
  misc_feature: MA Experiment 20000495 PARAMETER Experiment Name: At_Guard_Cells_P Parameter: Tissue Value: Guard Cells vs. Leaves
  misc_feature: MA Experiment ID: 20001451 Result: Down-regulated in Transcription
  misc_feature: MA Experiment 20001451 PARAMETER Experiment Name: At_Far-red-induction_P Parameter: Age (day) Value: 7
  misc_feature: MA Experiment 20001451 PARAMETER Experiment Name: At_Far-red-induction_P Parameter: Light Value: Far-red vs. White
  misc_feature: MA Experiment 20001451 PARAMETER Experiment Name: At_Far-red-induction_P Parameter: Organism Value: A. thaliana
  misc_feature: MA Experiment 20001451 PARAMETER Experiment Name: At_Far-red-induction_P Parameter: Plant Line Value: Columbia
  misc_feature: MA Experiment 20001451 PARAMETER Experiment Name: At_Far-red-induction_P Parameter: Timepoint (hr) Value: 24
  misc_feature: MA Experiment 20001451 PARAMETER Experiment Name: At_Far-red-induction_P Parameter: Tissue Value: Whole Plant
atgaacgattgggctagtttgggaataggttctattggggaagctgtgttttccaagctcctgaaagttgtgattgatgaagcaaaaaagttcaaagctttcaaacccttgtccaaggatctcgtatcaacaatggagatattgtttccgttaactcaaaagattgattcgatgcaaaaagagcttgactttggtgtaaaggaactaaaggaacttagggatacgatcgaaagagctgatgtagctgttcggaagtttccaagagtcaagtggtacgagaaatctaaatatactagaaaaattgagagaatcaataaggatatgcttaagttctgtcagattgatcttcagcttcttcagcataggaatcagttgacgttgttgggtttgacgggaaaccttgtgaattcggttgatggtttaagtaaaagaatggaccttttgagtgttcctgcgcctgtttttagggatctttgttcggttcccaagcttgataaggttattgttggattggattggccattgggggagttaaagaagagactccttgacgattctgtggttactcttgtggtttctgctcctcctggttgcgggaaaaccacgctggttagtcggctttgtgacgatccagatatcaaagggaagttcaagcatatcttctttaatgttgtgtcaaatactcctaactttagggtaatagtacagaatttactccagcacaacggttacaatgcacttacatttgagaatgattctcaagcagaagttggcttaagaaaactgctggaggaacttaaagaaaatggtcctatattgttggtgttggatgatgtgtggcggggagcggattctttccttcagaaatttcaaattaagttaccaaattataagattttggtgacttctcggtttgactttccgagttttgattccaattatcgtttgaaacctttggaagatgatgatgctagagcccttctcattcattgggcatcgcgaccttgtaacacgtctcctgatgagtacgaagatctcctccagaagatattgaaacgttgcaatggattcccaatcgtaattgaagtagtgggtgtttcactcaaaggacgatctctaaatacatggaaaggtcaggtggaaagctggtctgaaggggaaaaaattcttggtaagccttatccaactgtgctagaatgtttgcagcctagttttgatgctctggatcccaaccttaaggagtgctttttggacatgggctcatttcttgaggaccaaaagatacgtgcttcggtaataattgatatgtgggtggaattatacggtaaaggtagtagtatcttgtatatgtaccttgaagaccttgcctcccagaatctacttaaacttgttcctctcggcacaaatgagcacgaagacggtttctacaatgacttcttagtgactcaacatgatatccttagggagttggctatctgtcaaagcgaatttaaggaaaacttagaaagaaaaagactaaatctggagatactagagaatacatttccagactggtgtttgaatactattaatgcctctttattgtctatctctacggatgatttgttctcatcgaaatggttggaaatggattgccccaatgttgaggctttagttctaaatctctcttcatcagactatgcattgccaagcttcatctctggaatgaagaagctgaaggttctgacaatcacaaatcacggtttttatccagcaagattgagtaatttctcgtgtctcagctcattaccaaacctgaaacggattagattggaaaaagtttcaatcactttgctagacattccccaactgcaactcagcagtcttaagaagctgtctttggtcatgtgtagtttcggtgaggttttctacgacacagaagatatagttgtctctaatgctctatcgaaattacaagagattgacatagactactgctatgatcttgatgagttaccgtattggatctctgaaattgtttcattgaagacacttagcatcacaaactgtaacaagctctctcaacttccagaagctataggcaacttgagtagactagaagtgttgaggctgtgttcttctatgaatctctctgagctgcctgaagcgactgagggactcagcaacttgcggtttctggatatttctcattgcttaggattgagaaagttgcctcaagagattggcaaactgcagaatctgaaaaagatctcgatgagaaagtgttcgggatgcgagttgccggagtcagtgacgaatctagagaatctggaggtcaaatgcgatgaagaaactggattgttgtgggaaaggctgaagccaaaaatgagaaatttgagagttcaggaggaggaaatagagcataacctgaacttgcttcaaatgttttaa

SEQ ID NO: 91407 - protein, 809 aa, Arabidopsis thaliana
  peptide (1)..(809): Ceres Seq. ID no. 12727497
  misc_feature (153)..(280): Pfam Name: NB-ARC domain Pfam Description: NB-ARC domain
  misc_feature (3)..(809): Homolog of NCBI NO: 15240127 NR Description: disease resistance protein (CC-NBS-LRR class), protein id: At5g66910.1, supported by cDNA: gi_18087525
  misc_feature (404)..(809): Homolog of NCBI NO: 15240125 NR Description: disease resistance protein (NBS-LRR class), protein id: At5g66890.1 [Arabidopsis thaliana] contains similarity to disease resistance
  misc_feature (12)..(798): Homolog of NCBI NO: 15238281 NR Description: disease resistance protein (CC-NBS-LRR class), protein id: At5g04720.1, supported by cDNA: gi_15292720,
  misc_feature (13)..(798): Homolog of NCBI NO: 30689664 NR Description: disease resistance protein (CC-NBS-LRR class),
  misc_feature (183)..(803): Homolog of NCBI NO: 15238054 NR Description: disease resistance protein (NBS-LRR class), protein id: At5g47280.1 [Arabidopsis thaliana]
  misc_feature (273)..(795): Homolog of NCBI NO: 30692890 NR Description: disease resistance protein (CC-NBS-LRR class),
  misc_feature (273)..(795): Homolog of NCBI NO: 25403197 NR Description: probable disease resistance protein [imported] - thaliana >gi|10998939|gb|AAG26078.1|AC069299_4 disease resistance putative [Arabidopsis thaliana]
  misc_feature (1)..(323): Homolog of NCBI NO: 27808630 NR Description: At5g66630 [Arabidopsis thaliana]
  misc_feature (1)..(323): Homolog of NCBI NO: 30698240 NR Description: expressed protein [Arabidopsis thaliana]
  misc_feature (153)..(752): Homolog of NCBI NO: 34391519 NR Description: disease resistance protein-like protein MsR1
MNDWASLGIGSIGEAVFSKLLKVVIDEAKKFKAFKPLSKDLVSTMEILFPLTQKIDSMQKELDFGVKELKELRDTIERADVAVRKFPRVKWYEKSKYTRKIERINKDMLKFCQIDLQLLQHRNQLTLLGLTGNLVNSVDGLSKRMDLLSVPAPVFRDLCSVPKLDKVIVGLDWPLGELKKRLLDDSVVTLVVSAPPGCGKTTLVSRLCDDPDIKGKFKHIFFNVVSNTPNFRVIVQNLLQHNGYNALTFENDSQAEVGLRKLLEELKENGPILLVLDDVWRGADSFLQKFQIKLPNYKILVTSRFDFPSFDSNYRLKPLEDDDARALLIHWASRPCNTSPDEYEDLLQKILKRCNGFPIVIEVVGVSLKGRSLNTWKGQVESWSEGEKILGKPYPTVLECLQPSFDALDPNLKECFLDMGSFLEDQKIRASVIIDMWVELYGKGSSILYMYLEDLASQNLLKLVPLGTNEHEDGFYNDFLVTQHDILRELAICQSEFKENLERKRLNLEILENTFPDWCLNTINASLLSISTDDLFSSKWLEMDCPNVEALVLNLSSSDYALPSFISGMKKLKVLTITNHGFYPARLSNFSCLSSLPNLKRIRLEKVSITLLDIPQLQLSSLKKLSLVMCSFGEVFYDTEDIVVSNALSKLQEIDIDYCYDLDELPYWISEIVSLKTLSITNCNKLSQLPEAIGNLSRLEVLRLCSSMNLSELPEATEGLSNLRFLDISHCLGLRKLPQEIGKLQNLKKISMRKCSGCELPESVTNLENLEVKCDEETGLLWERLKPKMRNLRVQEEEIEHNLNLLQMF

SEQ ID NO: 91408 - protein, 765 aa, Arabidopsis thaliana
  peptide (1)..(765): Ceres Seq. ID no. 12727498
  misc_feature (109)..(236): Pfam Name: NB-ARC domain Pfam Description: NB-ARC domain
  misc_feature (1)..(765): Homolog of NCBI NO: 15240127 NR Description: disease resistance protein (CC-NBS-LRR class), protein id: At5g66910.1, supported by cDNA: gi_18087525
  misc_feature (360)..(765): Homolog of NCBI NO: 15240125 NR Description: disease resistance protein (NBS-LRR class), protein id: At5g66890.1 [Arabidopsis thaliana] contains similarity to disease resistance
  misc_feature (1)..(754): Homolog of NCBI NO: 15238281 NR Description: disease resistance protein (CC-NBS-LRR class), protein id: At5g04720.1, supported by cDNA: gi_15292720,
  misc_feature (1)..(754): Homolog of NCBI NO: 30689664 NR Description: disease resistance protein (CC-NBS-LRR class),
  misc_feature (139)..(759): Homolog of NCBI NO: 15238054 NR Description: disease resistance protein (NBS-LRR class), protein id: At5g47280.1 [Arabidopsis thaliana]
  misc_feature (229)..(751): Homolog of NCBI NO: 30692890 NR Description: disease resistance protein (CC-NBS-LRR class),
  misc_feature (229)..(751): Homolog of NCBI NO: 25403197 NR Description: probable disease resistance protein [imported] - thaliana >gi|10998939|gb|AAG26078.1|AC069299_4 disease resistance putative [Arabidopsis thaliana]
  misc_feature (1)..(279): Homolog of NCBI NO: 27808630 NR Description: At5g66630 [Arabidopsis thaliana]
  misc_feature (1)..(279): Homolog of NCBI NO: 30698240 NR Description: expressed protein [Arabidopsis thaliana]
  misc_feature (109)..(708): Homolog of NCBI NO: 34391519 NR Description: disease resistance protein-like protein MsR1
MEILFPLTQKIDSMQKELDFGVKELKELRDTIERADVAVRKFPRVKWYEKSKYTRKIERINKDMLKFCQIDLQLLQHRNQLTLLGLTGNLVNSVDGLSKRMDLLSVPAPVFRDLCSVPKLDKVIVGLDWPLGELKKRLLDDSVVTLVVSAPPGCGKTTLVSRLCDDPDIKGKFKHIFFNVVSNTPNFRVIVQNLLQHNGYNALTFENDSQAEVGLRKLLEELKENGPILLVLDDVWRGADSFLQKFQIKLPNYKILVTSRFDFPSFDSNYRLKPLEDDDARALLIHWASRPCNTSPDEYEDLLQKILKRCNGFPIVIEVVGVSLKGRSLNTWKGQVESWSEGEKILGKPYPTVLECLQPSFDALDPNLKECFLDMGSFLEDQKIRASVIIDMWVELYGKGSSILYMYLEDLASQNLLKLVPLGTNEHEDGFYNDFLVTQHDILRELAICQSEFKENLERKRLNLEILENTFPDWCLNTINASLLSISTDDLFSSKWLEMDCPNVEALVLNLSSSDYALPSFISGMKKLKVLTITNHGFYPARLSNFSCLSSLPNLKRIRLEKVSITLLDIPQLQLSSLKKLSLVMCSFGEVFYDTEDIVVSNALSKLQEIDIDYCYDLDELPYWISEIVSLKTLSITNCNKLSQLPEAIGNLSRLEVLRLCSSMNLSELPEATEGLSNLRFLDISHCLGLRKLPQEIGKLQNLKKISMRKCSGCELPESVTNLENLEVKCDEETGLLWERLKPKMRNLRVQEEEIEHNLNLLQMF

SEQ ID NO: 91409 - protein, 752 aa, Arabidopsis thaliana
  peptide (1)..(752): Ceres Seq. ID no. 12727499
  misc_feature (96)..(223): Pfam Name: NB-ARC domain Pfam Description: NB-ARC domain
  misc_feature (1)..(752): Homolog of NCBI NO: 15240127 NR Description: disease resistance protein (CC-NBS-LRR class), protein id: At5g66910.1, supported by cDNA: gi_18087525
  misc_feature (347)..(752): Homolog of NCBI NO: 15240125 NR Description: disease resistance protein (NBS-LRR class), protein id: At5g66890.1 [Arabidopsis thaliana] contains similarity to disease resistance
  misc_feature (1)..(741): Homolog of NCBI NO: 15238281 NR Description: disease resistance protein (CC-NBS-LRR class), protein id: At5g04720.1, supported by cDNA: gi_15292720,
  misc_feature (1)..(741): Homolog of NCBI NO: 30689664 NR Description: disease resistance protein (CC-NBS-LRR class),
  misc_feature (126)..(746): Homolog of NCBI NO: 15238054 NR Description: disease resistance protein (NBS-LRR class), protein id: At5g47280.1 [Arabidopsis thaliana]
  misc_feature (216)..(738): Homolog of NCBI NO: 30692890 NR Description: disease resistance protein (CC-NBS-LRR class),
  misc_feature (216)..(738): Homolog of NCBI NO: 25403197 NR Description: probable disease resistance protein [imported] - thaliana >gi|10998939|gb|AAG26078.1|AC069299_4 disease resistance putative [Arabidopsis thaliana]
  misc_feature (1)..(266): Homolog of NCBI NO: 27808630 NR Description: At5g66630 [Arabidopsis thaliana]
  misc_feature (1)..(266): Homolog of NCBI NO: 30698240 NR Description: expressed protein [Arabidopsis thaliana]
  misc_feature (96)..(695): Homolog of NCBI NO: 34391519 NR Description: disease resistance protein-like protein MsR1
MQKELDFGVKELKELRDTIERADVAVRKFPRVKWYEKSKYTRKIERINKDMLKFCQIDLQLLQHRNQLTLLGLTGNLVNSVDGLSKRMDLLSVPAPVFRDLCSVPKLDKVIVGLDWPLGELKKRLLDDSVVTLVVSAPPGCGKTTLVSRLCDDPDIKGKFKHIFFNVVSNTPNFRVIVQNLLQHNGYNALTFENDSQAEVGLRKLLEELKENGPILLVLDDVWRGADSFLQKFQIKLPNYKILVTSRFDFPSFDSNYRLKPLEDDDARALLIHWASRPCNTSPDEYEDLLQKILKRCNGFPIVIEVVGVSLKGRSLNTWKGQVESWSEGEKILGKPYPTVLECLQPSFDALDPNLKECFLDMGSFLEDQKIRASVIIDMWVELYGKGSSILYMYLEDLASQNLLKLVPLGTNEHEDGFYNDFLVTQHDILRELAICQSEFKENLERKRLNLEILENTFPDWCLNTINASLLSISTDDLFSSKWLEMDCPNVEALVLNLSSSDYALPSFISGMKKLKVLTITNHGFYPARLSNFSCLSSLPNLKRIRLEKVSITLLDIPQLQLSSLKKLSLVMCSFGEVFYDTEDIVVSNALSKLQEIDIDYCYDLDELPYWISEIVSLKTLSITNCNKLSQLPEAIGNLSRLEVLRLCSSMNLSELPEATEGLSNLRFLDISHCLGLRKLPQEIGKLQNLKKISMRKCSGCELPESVTNLENLEVKCDEETGLLWERLKPKMRNLRVQEEEIEHNLNLLQMF

SEQ ID NO: 91410 - DNA, 2670 bp, Arabidopsis thaliana
  misc_feature (1)..(2670): Ceres Seq. ID no. 12727500
  misc_feature: MA Experiment ID: 20000173 Result: Down-regulated in Transcription
  misc_feature: MA Experiment 20000173 PARAMETER Experiment Name: At_42deg_Heat_P Parameter: Age (day) Value: 14
  misc_feature: MA Experiment 20000173 PARAMETER Experiment Name: At_42deg_Heat_P Parameter: Organism Value: A. thaliana
  misc_feature: MA Experiment 20000173 PARAMETER Experiment Name: At_42deg_Heat_P Parameter: Plant Line Value: WS
  misc_feature: MA Experiment 20000173 PARAMETER Experiment Name: At_42deg_Heat_P Parameter: Temperature (deg C) Value: 42 vs. 22
  misc_feature: MA Experiment 20000173 PARAMETER Experiment Name: At_42deg_Heat_P Parameter: Timepoint (hr) Value: 6
  misc_feature: MA Experiment 20000173 PARAMETER Experiment Name: At_42deg_Heat_P Parameter: Tissue Value: Aerial
  misc_feature: MA Experiment ID: 20000182 Result: Up-regulated in Transcription
  misc_feature: MA Experiment 20000182 PARAMETER Experiment Name: At_2mM_SA_P Parameter: Age (day) Value: 14
  misc_feature: MA Experiment 20000182 PARAMETER Experiment Name: At_2mM_SA_P Parameter: Organism Value: A. thaliana
  misc_feature: MA Experiment 20000182 PARAMETER Experiment Name: At_2mM_SA_P Parameter: Plant Line Value: WS
  misc_feature: MA Experiment 20000182 PARAMETER Experiment Name: At_2mM_SA_P Parameter: Timepoint (hr) Value: 6
  misc_feature: MA Experiment 20000182 PARAMETER Experiment Name: At_2mM_SA_P Parameter: Tissue Value: Aerial
  misc_feature: MA Experiment 20000182 PARAMETER Experiment Name: At_2mM_SA_P Parameter: Treatment Value: 2mM SA vs. No Treatment
  misc_feature: MA Experiment ID: 20000227 Result: Down-regulated in Transcription
  misc_feature: MA Experiment 20000227 PARAMETER Experiment Name: At_Root-Tips-vs-Tops_P Parameter: Tissue Value: Root Tips vs. Root Tops
  misc_feature: MA Experiment ID: 20000234 Result: Down-regulated in Transcription
  misc_feature: MA Experiment 20000234 PARAMETER Experiment Name: At_Siliques_P Parameter: Age (day) Value: 21
  misc_feature: MA Experiment 20000234 PARAMETER Experiment Name: At_Siliques_P Parameter: Organism Value: A. thaliana
  misc_feature: MA Experiment 20000234 PARAMETER Experiment Name: At_Siliques_P Parameter: Plant Line Value: WS
  misc_feature: MA Experiment 20000234 PARAMETER Experiment Name: At_Siliques_P Parameter: Tissue Value: Less Than 5mm Siliques vs. Whole Plant
  misc_feature: MA Experiment ID: 20000264 Result: Down-regulated in Transcription
  misc_feature: MA Experiment 20000264 PARAMETER Experiment Name: At_Open_Flower_P Parameter: Age (day) Value: 21
  misc_feature: MA Experiment 20000264 PARAMETER Experiment Name: At_Open_Flower_P Parameter: Plant Line Value: WS
  misc_feature: MA Experiment 20000264 PARAMETER Experiment Name: At_Open_Flower_P Parameter: Tissue Value: Open Flower vs. Whole Plant
  misc_feature: MA Experiment ID: 20000495 Result: Down-regulated in Transcription
  misc_feature: MA Experiment 20000495 PARAMETER Experiment Name: At_Guard_Cells_P Parameter: Harvest Date Value: 8/2/2002
  misc_feature: MA Experiment 20000495 PARAMETER Experiment Name: At_Guard_Cells_P Parameter: Organism Value: A. thaliana
  misc_feature: MA Experiment 20000495 PARAMETER Experiment Name: At_Guard_Cells_P Parameter: Tissue Value: Guard Cells vs. Leaves
aaatctttctcaacatgttagattttcagtttctacagacaaatctgtgagctattttttcattcttggttttctctgttttggcaaattttggaggaaaggaatctgaagaggaaacaagaatggtcgtggtcgattggcttggtttgggattaggctctgttgctggagctttggtctcggaaggtctgaaagttttgatttcagaggcaaagaaggtgttagctttcaaatctgtgtctaacgagctcgcatcgacgatggagtcattgcttccggtgatcaaagagatcgaatcgatgcaagatggtatggaactacaagatcttaaagacacgatcgataaagctcttttactggttgagaagtgttcacatgtcgagaagtggaatataatcttgaaatcgaagtacacgagaaaagttgaggaaatcaataggaagatgctcaagttctgtcaggttcaacttcagcttcttctctttaggaaccaattgaagtctatgccttccatggaagctattcttaacaattatttccaaaacatcaataagaagctcgaccgtttgagtggttctcctgctcctccgcttgtttcgaagcgttgttctgttcccaagcttgataatatggttctggttggattggattggccattggtggagctgaagaagaaactccttgacaattccgtggttgtggtgtctggtcctcctggttgtgggaagaccacgctggttactaagctttgtgacgacccagagatcgaaggagaattcaagaaaatcttctatagcgttgtgtcgaatactcctaatttcagggccatagtacaaaacttactccaggacaacggttgcggagcaattacatttgacgatgattctcaagcagaaactggcttaagagatcttctggaggaactcacaaaagatggtcgtatattgttggtgttggatgatgtgtggcagggatccgagttcttgcttcgaaaatttcaaattgatttaccagattataagattttggtgacttctcagtttgattttacgagtttatggcccacttaccatttggtacctttgaaatatgaatatgctaggtcccttctcattcagtgggcatctccacctcttcacacatctccagatgagtatgaagatcttctccaaaagatattgaaacgttgcaatggattccctctcgtaattgaagtagtcggcatttcacttaaaggacaagctctgtatttatggaaaggtcaagtggaaagctggtctgaaggggaaacaattcttggtaacgctaatcctactgtgcgacaacgtctgcagcctagcttcaatgtcctgaaacctcatcttaaagagtgtttcatggacatgggttcatttcttcaggaccaaaagatacgtgcttcgcttataattgacatatggatggaattatatggtagaggtagttctagtactaacaagttcatgttataccttaatgagcttgcttcccagaatctgcttaaacttgttcatctcgggacaaataagcgcgaagacggtttttacaatgagttgttagtcactcaacataatattctgagggagttggctatttttcaaagtgaattggaaccaatcatgcaaagaaagaaactaaatttggagatacgagaggacaactttccggacgagtgtttaaatcaacctattaatgctcgacttttgtctatctatacggatgatttgttctcatcgaaatggttggaaatggattgccccaatgttgaggctttagttcttaatatctcctcattagactatgcattgccaagcttcattgctgaaatgaagaagctaaaggttctgacaatcgcaaatcacggtttttatccagcaagattgagtaatttctcgtgtctcagctcattaccaaacctgaaacggattagatttgaaaaggtttcagtcactttgctggacattcctcaattgcaactcggcagtctcaagaagctatcatttttcatgtgtagtttcggtgaggttttctacgacacagaagatatagatgtctctaaagctctatcgaatttacaagagattgacatagactactgctatgatcttgatgagttaccatattggatccccgaagttgtttcattgaagacacttagcatcacaaactgtaacaagctctctcaacttccagaagctatagggaacttgagtagactagaagtgttgaggatgtgttcttgtatgaatctctctgagctgcctgaagcaactgagagactcagcaacttgcggtctctggatatttctcattgcttaggattgagaaagttgcctcaagagattggcaaactacagaaactggagaatatctcgatgaggaagtgttcgggatgcgagttgccggattcagtgaggtatctagagaatctggaggtcaaatgcgatgaagtaactggattgttgtgggaaaggttgatgccagaaatgagaaatttgagagttcacacggaggaaacagagcataacctgaagttgcttctaacgttttaagttttgagtgaaaaaaaaaacattttcgtagcttgtgtattcttattgactctttaatgatcacaatctagactaaacgagtaataatattacaagagtc

SEQ ID NO: 91411 - protein, 815 aa, Arabidopsis thaliana
  peptide (1)..(815): Ceres Seq. ID no. 12727501
  misc_feature (11)..(153): Pfam Name: Arabidopsis broad-spectrum mildew resistance Pfam Description: Arabidopsis broad-spectrum mildew resistance
  misc_feature (5)..(815): Homolog of NCBI NO: 15240126 NR Description: disease resistance protein (CC-NBS-LRR class), protein id: At5g66900.1 [Arabidopsis thaliana]
  misc_feature (406)..(815): Homolog of NCBI NO: 15240125 NR Description: disease resistance protein (NBS-LRR class), protein id: At5g66890.1 [Arabidopsis thaliana] contains similarity to disease resistance
  misc_feature (261)..(795): Homolog of NCBI NO: 30692890 NR Description: disease resistance protein (CC-NBS-LRR class),
  misc_feature (15)..(233): Homolog of NCBI NO: 30692890 NR Description: disease resistance protein (CC-NBS-LRR class),
  misc_feature (14)..(804): Homolog of NCBI NO: 15238281 NR Description: disease resistance protein (CC-NBS-LRR class), protein id: At5g04720.1, supported by cDNA: gi_15292720,
  misc_feature (15)..(804): Homolog of NCBI NO: 30689664 NR Description: disease resistance protein (CC-NBS-LRR class),
  misc_feature (15)..(795): Homolog of NCBI NO: 25403197 NR Description: probable disease resistance protein [imported] - thaliana >gi|10998939|gb|AAG26078.1|AC069299_4 disease resistance putative [Arabidopsis thaliana]
  misc_feature (191)..(809): Homolog of NCBI NO: 15238054 NR Description: disease resistance protein (NBS-LRR class), protein id: At5g47280.1 [Arabidopsis thaliana]
  misc_feature (1)..(321): Homolog of NCBI NO: 27808630 NR Description: At5g66630 [Arabidopsis thaliana]
  misc_feature (1)..(321): Homolog of NCBI NO: 30698240 NR Description: expressed protein [Arabidopsis thaliana]
MVVVDWLGLGLGSVAGALVSEGLKVLISEAKKVLAFKSVSNELASTMESLLPVIKEIESMQDGMELQDLKDTIDKALLLVEKCSHVEKWNIILKSKYTRKVEEINRKMLKFCQVQLQLLLFRNQLKSMPSMEAILNNYFQNINKKLDRLSGSPAPPLVSKRCSVPKLDNMVLVGLDWPLVELKKKLLDNSVVVVSGPPGCGKTTLVTKLCDDPEIEGEFKKIFYSVVSNTPNFRAIVQNLLQDNGCGAITFDDDSQAETGLRDLLEELTKDGRILLVLDDVWQGSEFLLRKFQIDLPDYKILVTSQFDFTSLWPTYHLVPLKYEYARSLLIQWASPPLHTSPDEYEDLLQKILKRCNGFPLVIEVVGISLKGQALYLWKGQVESWSEGETILGNANPTVRQRLQPSFNVLKPHLKECFMDMGSFLQDQKIRASLIIDIWMELYGRGSSSTNKFMLYLNELASQNLLKLVHLGTNKREDGFYNELLVTQHNILRELAIFQSELEPIMQRKKLNLEIREDNFPDECLNQPINARLLSIYTDDLFSSKWLEMDCPNVEALVLNISSLDYALPSFIAEMKKLKVLTIANHGFYPARLSNFSCLSSLPNLKRIRFEKVSVTLLDIPQLQLGSLKKLSFFMCSFGEVFYDTEDIDVSKALSNLQEIDIDYCYDLDELPYWIPEVVSLKTLSITNCNKLSQLPEAIGNLSRLEVLRMCSCMNLSELPEATERLSNLRSLDISHCLGLRKLPQEIGKLQKLENISMRKCSGCELPDSVRYLENLEVKCDEVTGLLWERLMPEMRNLRVHTEETEHNLKLLLTF

SEQ ID NO: 91412 - protein, 769 aa, Arabidopsis thaliana
  peptide (1)..(769): Ceres Seq. ID no. 12727502
  misc_feature (1)..(107): Pfam Name: Arabidopsis broad-spectrum mildew resistance Pfam Description: Arabidopsis broad-spectrum mildew resistance
  misc_feature (1)..(769): Homolog of NCBI NO: 15240126 NR Description: disease resistance protein (CC-NBS-LRR class), protein id: At5g66900.1 [Arabidopsis thaliana]
  misc_feature (360)..(769): Homolog of NCBI NO: 15240125 NR Description: disease resistance protein (NBS-LRR class), protein id: At5g66890.1 [Arabidopsis thaliana] contains similarity to disease resistance
  misc_feature (215)..(749): Homolog of NCBI NO: 30692890 NR Description: disease resistance protein (CC-NBS-LRR class),
  misc_feature (1)..(187): Homolog of NCBI NO: 30692890 NR Description: disease resistance protein (CC-NBS-LRR class),
  misc_feature (1)..(758): Homolog of NCBI NO: 15238281 NR Description: disease resistance protein (CC-NBS-LRR class), protein id: At5g04720.1, supported by cDNA: gi_15292720,
  misc_feature (1)..(758): Homolog of NCBI NO: 30689664 NR Description: disease resistance protein (CC-NBS-LRR class),
  misc_feature (1)..(749): Homolog of NCBI NO: 25403197 NR Description: probable disease resistance protein [imported] - thaliana >gi|10998939|gb|AAG26078.1|AC069299_4 disease resistance putative [Arabidopsis thaliana]
  misc_feature (145)..(763): Homolog of NCBI NO: 15238054 NR Description: disease resistance protein (NBS-LRR class), protein id: At5g47280.1 [Arabidopsis thaliana]
  misc_feature (1)..(275): Homolog of NCBI NO: 27808630 NR Description: At5g66630 [Arabidopsis thaliana]
  misc_feature (1)..(275): Homolog of NCBI NO: 30698240 NR Description: expressed protein [Arabidopsis thaliana]
MESLLPVIKEIESMQDGMELQDLKDTIDKALLLVEKCSHVEKWNIILKSKYTRKVEEINRKMLKFCQVQLQLLLFRNQLKSMPSMEAILNNYFQNINKKLDRLSGSPAPPLVSKRCSVPKLDNMVLVGLDWPLVELKKKLLDNSVVVVSGPPGCGKTTLVTKLCDDPEIEGEFKKIFYSVVSNTPNFRAIVQNLLQDNGCGAITFDDDSQAETGLRDLLEELTKDGRILLVLDDVWQGSEFLLRKFQIDLPDYKILVTSQFDFTSLWPTYHLVPLKYEYARSLLIQWASPPLHTSPDEYEDLLQKILKRCNGFPLVIEVVGISLKGQALYLWKGQVESWSEGETILGNANPTVRQRLQPSFNVLKPHLKECFMDMGSFLQDQKIRASLIIDIWMELYGRGSSSTNKFMLYLNELASQNLLKLVHLGTNKREDGFYNELLVTQHNILRELAIFQSELEPIMQRKKLNLEIREDNFPDECLNQPINARLLSIYTDDLFSSKWLEMDCPNVEALVLNISSLDYALPSFIAEMKKLKVLTIANHGFYPARLSNFSCLSSLPNLKRIRFEKVSVTLLDIPQLQLGSLKKLSFFMCSFGEVFYDTEDIDVSKALSNLQEIDIDYCYDLDELPYWIPEVVSLKTLSITNCNKLSQLPEAIGNLSRLEVLRMCSCMNLSELPEATERLSNLRSLDISHCLGLRKLPQEIGKLQKLENISMRKCSGCELPDSVRYLENLEVKCDEVTGLLWERLMPEMRNLRVHTEETEHNLKLLLTF

SEQ ID NO: 91413 - protein, 756 aa, Arabidopsis thaliana
  peptide (1)..(756): Ceres Seq. ID no. 12727503
  misc_feature (1)..(94): Pfam Name: Arabidopsis broad-spectrum mildew resistance Pfam Description: Arabidopsis broad-spectrum mildew resistance
  misc_feature (1)..(756): Homolog of NCBI NO: 15240126 NR Description: disease resistance protein (CC-NBS-LRR class), protein id: At5g66900.1 [Arabidopsis thaliana]
  misc_feature (347)..(756): Homolog of NCBI NO: 15240125 NR Description: disease resistance protein (NBS-LRR class), protein id: At5g66890.1 [Arabidopsis thaliana] contains similarity to disease resistance
  misc_feature (202)..(736): Homolog of NCBI NO: 30692890 NR Description: disease resistance protein (CC-NBS-LRR class),
  misc_feature (1)..(174): Homolog of NCBI NO: 30692890 NR Description: disease resistance protein (CC-NBS-LRR class),
  misc_feature (1)..(745): Homolog of NCBI NO: 15238281 NR Description: disease resistance protein (CC-NBS-LRR class), protein id: At5g04720.1, supported by cDNA: gi_15292720,
  misc_feature (1)..(745): Homolog of NCBI NO: 30689664 NR Description: disease resistance protein (CC-NBS-LRR class),
  misc_feature (1)..(736): Homolog of NCBI NO: 25403197 NR Description: probable disease resistance protein [imported] - thaliana >gi|10998939|gb|AAG26078.1|AC069299_4 disease resistance putative [Arabidopsis thaliana]
  misc_feature (132)..(750): Homolog of NCBI NO: 15238054 NR Description: disease resistance protein (NBS-LRR class), protein id: At5g47280.1 [Arabidopsis thaliana]
  misc_feature (1)..(262): Homolog of NCBI NO: 27808630 NR Description: At5g66630 [Arabidopsis thaliana]
  misc_feature (1)..(262): Homolog of NCBI NO: 30698240 NR Description: expressed protein [Arabidopsis thaliana]
MQDGMELQDLKDTIDKALLLVEKCSHVEKWNIILKSKYTRKVEEINRKMLKFCQVQLQLLLFRNQLKSMPSMEAILNNYFQNINKKLDRLSGSPAPPLVSKRCSVPKLDNMVLVGLDWPLVELKKKLLDNSVVVVSGPPGCGKTTLVTKLCDDPEIEGEFKKIFYSVVSNTPNFRAIVQNLLQDNGCGAITFDDDSQAETGLRDLLEELTKDGRILLVLDDVWQGSEFLLRKFQIDLPDYKILVTSQFDFTSLWPTYHLVPLKYEYARSLLIQWASPPLHTSPDEYEDLLQKILKRCNGFPLVIEVVGISLKGQALYLWKGQVESWSEGETILGNANPTVRQRLQPSFNVLKPHLKECFMDMGSFLQDQKIRASLIIDIWMELYGRGSSSTNKFMLYLNELASQNLLKLVHLGTNKREDGFYNELLVTQHNILRELAIFQSELEPIMQRKKLNLEIREDNFPDECLNQPINARLLSIYTDDLFSSKWLEMDCPNVEALVLNISSLDYALPSFIAEMKKLKVLTIANHGFYPARLSNFSCLSSLPNLKRIRFEKVSVTLLDIPQLQLGSLKKLSFFMCSFGEVFYDTEDIDVSKALSNLQEIDIDYCYDLDELPYWIPEVVSLKTLSITNCNKLSQLPEAIGNLSRLEVLRMCSCMNLSELPEATERLSNLRSLDISHCLGLRKLPQEIGKLQKLENISMRKCSGCELPDSVRYLENLEVKCDEVTGLLWERLMPEMRNLRVHTEETEHNLKLLLTF

SEQ ID NO: 91414 - DNA, 1016 bp, Arabidopsis thaliana
  misc_feature (1)..(1016): Ceres Seq. ID no. 12727504
  misc_feature: MA Experiment ID: 20000794 Result: Up-regulated in Transcription
  misc_feature: MA Experiment 20000794 PARAMETER Experiment Name: At_Petals_P Parameter: Age (day) Value: 23-25 days
  misc_feature: MA Experiment 20000794 PARAMETER Experiment Name: At_Petals_P Parameter: Plant Line Value: WS
  misc_feature: MA Experiment 20000794 PARAMETER Experiment Name: At_Petals_P Parameter: Tissue Value: Petals vs. Whole plant
  misc_feature: MA Experiment ID: 20001905 Result: Up-regulated in Transcription
  misc_feature: MA Experiment 20001905 PARAMETER Experiment Name: At_Drought_Reproduction_P Parameter: Age (day) Value: 40
  misc_feature: MA Experiment 20001905 PARAMETER Experiment Name: At_Drought_Reproduction_P Parameter: Organism Value: A. thaliana
  misc_feature: MA Experiment 20001905 PARAMETER Experiment Name: At_Drought_Reproduction_P Parameter: Plant Line Value: WS
  misc_feature: MA Experiment 20001905 PARAMETER Experiment Name: At_Drought_Reproduction_P Parameter: Timepoint (day) Value: 10
  misc_feature: MA Experiment 20001905 PARAMETER Experiment Name: At_Drought_Reproduction_P Parameter: Tissue Value: Rosettes
  misc_feature: MA Experiment 20001905 PARAMETER Experiment Name: At_Drought_Reproduction_P Parameter: Treatment Value: Drought vs. No Drought
  misc_feature: MA Experiment ID: 20001911 Result: Up-regulated in Transcription
  misc_feature: MA Experiment 20001911 PARAMETER Experiment Name: At_Drought_Reproduction_P Parameter: Age (day) Value: 40
  misc_feature: MA Experiment 20001911 PARAMETER Experiment Name: At_Drought_Reproduction_P Parameter: Organism Value: A. thaliana
  misc_feature: MA Experiment 20001911 PARAMETER Experiment Name: At_Drought_Reproduction_P Parameter: Plant Line Value: WS
  misc_feature: MA Experiment 20001911 PARAMETER Experiment Name: At_Drought_Reproduction_P Parameter: Timepoint (day) Value: 10
  misc_feature: MA Experiment 20001911 PARAMETER Experiment Name: At_Drought_Reproduction_P Parameter: Tissue Value: Flowers
  misc_feature: MA Experiment 20001911 PARAMETER Experiment Name: At_Drought_Reproduction_P Parameter: Treatment Value: Drought vs. No Drought
aaggacgatcagaagaaatcttagagaaatcggaaaattctcttactcgggttttgcatcggtgaatatgaattgcgaagtttgtcagctaaaggaactggaagtggaatccttcgagatacgcgaagttttgcgctgcattctacatacgattgtctttcatcgtgcgcttggtcttatccgccctaaagatattgatttggagctttttgagatcacttatgtacaatgcggtgaaattgaagtggagaagaaaatcgatgaaaagattgagcagttcattaactggattgagaaacacccaaacaaaaagagtcagatttgtctatcgttctatgaagtcaaaagcaaacagccttcttggttcaccaaaatcgaacggttgtactgggaacaatggtacatcaatctgaatgtgcttcagcccactaagccccctgtcggaaagtctcaccattctaaactagttatggaccctggaggttcgattgatcaatttcctgttctcatctccaaaaattacatctttttattattataagagtgtgaagtgattgtcatgctctaatcaataactgtagaggcatcggaggagagaagttctcgtaggacactgcttgagcaatcccttcaagaagtcttgttccaaatcataaaattcgtgaatgagaagaaggatcatgttcctcccattaacgatggtgtaatctactacccttttgagatcactatcccaagctcatcggactctgcctttgggatggatatgttcaagaggatactacacagtggccatccatcaatgctcggctaaattccattttccacttaacttagtacatatacactttgatgtttcttggtgcagcctaactccaatcaacactttcctagttacattttctgtgtaaatatattatatgttaccctctcctcgtcgatggataatgttaccttatctatgctttgttgtatataagtgatgtgttgtatataaatttcagacttgcatttcc

SEQ ID NO: 91415 - protein, 179 aa, Arabidopsis thaliana
  peptide (1)..(179): Ceres Seq. ID no. 12727505
  misc_feature (23)..(165): Homolog of NCBI NO: 30698268 NR Description: expressed protein [Arabidopsis thaliana]
  misc_feature (34)..(165): Homolog of NCBI NO: 9758143 NR Description: gene_id:MUD21.19~pir||T38383~similar to unknown
  misc_feature (23)..(179): Homolog of NCBI NO: 30698266 NR Description: expressed protein [Arabidopsis thaliana]
  misc_feature (23)..(179): Homolog of NCBI NO: 15810345 NR Description: unknown protein [Arabidopsis thaliana]
RTIRRNLREIGKFSYSGFASVNMNCEVCQLKELEVESFEIREVLRCILHTIVFHRALGLIRPKDIDLELFEITYVQCGEIEVEKKIDEKIEQFINWIEKHPNKKSQICLSFYEVKSKQPSWFTKIERLYWEQWYINLNVLQPTKPPVGKSHHSKLVMDPGGSIDQFPVLISKNYIFLLL

SEQ ID NO: 91416 - protein, 157 aa, Arabidopsis thaliana
  peptide (1)..(157): Ceres Seq. ID no. 12727506
  misc_feature (1)..(143): Homolog of NCBI NO: 30698268 NR Description: expressed protein [Arabidopsis thaliana]
  misc_feature (12)..(143): Homolog of NCBI NO: 9758143 NR Description: gene_id:MUD21.19~pir||T38383~similar to unknown
  misc_feature (1)..(157): Homolog of NCBI NO: 30698266 NR Description: expressed protein [Arabidopsis thaliana]
  misc_feature (1)..(157): Homolog of NCBI NO: 15810345 NR Description: unknown protein [Arabidopsis thaliana]
MNCEVCQLKELEVESFEIREVLRCILHTIVFHRALGLIRPKDIDLELFEITYVQCGEIEVEKKIDEKIEQFINWIEKHPNKKSQICLSFYEVKSKQPSWFTKIERLYWEQWYINLNVLQPTKPPVGKSHHSKLVMDPGGSIDQFPVLISKNYIFLLL

SEQ ID NO: 91417 - DNA, 726 bp, Arabidopsis thaliana
  misc_feature (1)..(726): Ceres Seq. ID no. 12727525
  misc_feature: MA Experiment ID: 20000179 Result: Up-regulated in Transcription
  misc_feature: MA Experiment 20000179 PARAMETER Experiment Name: At_Germinating_Seeds_P Parameter: Age (hr) Value: 6 vs. 0
  misc_feature: MA Experiment 20000179 PARAMETER Experiment Name: At_Germinating_Seeds_P Parameter: Tissue Value: Germinating Seeds
  misc_feature: MA Experiment ID: 20000180 Result: Up-regulated in Transcription
  misc_feature: MA Experiment 20000180 PARAMETER Experiment Name: At_Germinating_Seeds_P Parameter: Age (hr) Value: 24 vs. 0
  misc_feature: MA Experiment 20000180 PARAMETER Experiment Name: At_Germinating_Seeds_P Parameter: Tissue Value: Germinating Seeds
  misc_feature: MA Experiment ID: 20001248 Result: Up-regulated in Transcription
  misc_feature: MA Experiment 20001248 PARAMETER Experiment Name: At_Far-red-induction_P Parameter: Age (day) Value: 7
  misc_feature: MA Experiment 20001248 PARAMETER Experiment Name: At_Far-red-induction_P Parameter: Light Value: Far-red vs. White
  misc_feature: MA Experiment 20001248 PARAMETER Experiment Name: At_Far-red-induction_P Parameter: Organism Value: A. thaliana
  misc_feature: MA Experiment 20001248 PARAMETER Experiment Name: At_Far-red-induction_P Parameter: Plant Line Value: Columbia
  misc_feature: MA Experiment 20001248 PARAMETER Experiment Name: At_Far-red-induction_P Parameter: Timepoint (hr) Value: 4
  misc_feature: MA Experiment 20001248 PARAMETER Experiment Name: At_Far-red-induction_P Parameter: Tissue Value: Whole Plant
atggattctgacataatgaacatgatgatgcatcagatggagaagcttcctgagttttgtaaccctaattcctctttcttctctcccgaccacaacaacacttacccttttctctttaactccactcattaccagtccgatcactcaatgaccaacgaaccaggtttccgctacggttccggtttactcactaacccttcttctatctctcccaacacagcttactcttccgtttttcttgacaaaagaaacaacagtaacaacaacaataatggcacgaacatggcagctatgcgagagatgatcttccgtatcgccgtgatgcaaccgatccatatcgatcccgaggcggttaagccaccgaagaggaggaacgtcaggatctctaaagatcctcaaagcgtggcggctaggcatagaagggagagaataagcgagaggattcggattttgcaacggcttgttcctggtgggacgaagatggatacagcttcgatgctcgatgaagcaattcattatgtgaagtttttaaagaaacaggtgcagtctctggaggagcaggcggtggttactggcggagggggaggaggaggaggaagggttttgatcggtggaggtggaatgacggcggcgagtggtggtggtggcggcgggggagtggttatgaaagggtgtggaacagtggggactcatcagatggtgggcaatgcacagattcttagatga

SEQ ID NO: 91418 - protein, 241 aa, Arabidopsis thaliana
  peptide (1)..(241): Ceres Seq. ID no. 12727526
  misc_feature (131)..(178): Pfam Name: Helix-loop-helix DNA-binding domain Pfam Description: Helix-loop-helix DNA-binding domain
  misc_feature (1)..(241): Homolog of NCBI NO: 15240189 NR Description: putative protein; protein id: At5g67060.1, by cDNA: gi_20127096 [Arabidopsis thaliana] emb|CAB62312.1~gene_id:K21H1.2~similar to unknown protein
  misc_feature (1)..(241): Homolog of NCBI NO: 15229725 NR Description: putative protein; protein id: At3g50330.1
  misc_feature (21)..(191): Homolog of NCBI NO: 15242494 NR Description: putative protein; protein id: At5g09750.1
  misc_feature (94)..(190): Homolog of NCBI NO: 15236714 NR Description: hypothetical protein; protein id: At4g00120.1
  misc_feature (95)..(191): Homolog of NCBI NO: 34910410 NR Description: P0692C11.28 [Oryza sativa (japonica
  misc_feature (95)..(185): Homolog of NCBI NO: 9294680 NR Description: emb|CAB62312.1~gene_id:MHC9.1~similar to unknown
  misc_feature (95)..(185): Homolog of NCBI NO: 15232534 NR Description: hypothetical protein; protein id: At3g21330.1, by cDNA: gi_20127094 [Arabidopsis thaliana]
  misc_feature (95)..(185): Homolog of NCBI NO: 28393737 NR Description: unknown protein [Arabidopsis thaliana]
  misc_feature (95)..(185): Homolog of NCBI NO: 15289790 NR Description: P0002B05.9 [Oryza sativa (japonica
  misc_feature (95)..(185): Homolog of NCBI NO: 34914234 NR Description: P0697C12.24 [Oryza sativa (japonica
MDSDIMNMMMHQMEKLPEFCNPNSSFFSPDHNNTYPFLFNSTHYQSDHSMTNEPGFRYGSGLLTNPSSISPNTAYSSVFLDKRNNSNNNNNGTNMAAMREMIFRIAVMQPIHIDPEAVKPPKRRNVRISKDPQSVAARHRRERISERIRILQRLVPGGTKMDTASMLDEAIHYVKFLKKQVQSLEEQAVVTGGGGGGGGRVLIGGGGMTAASGGGGGGGVVMKGCGTVGTHQMVGNAQILR

SEQ ID NO: 91419 - protein, 236 aa, Arabidopsis thaliana
  peptide (1)..(236): Ceres Seq. ID no. 12727527
  misc_feature (126)..(173): Pfam Name: Helix-loop-helix DNA-binding domain Pfam Description: Helix-loop-helix DNA-binding domain
  misc_feature (1)..(236): Homolog of NCBI NO: 15240189 NR Description: putative protein; protein id: At5g67060.1, by cDNA: gi_20127096 [Arabidopsis thaliana] emb|CAB62312.1~gene_id:K21H1.2~similar to unknown protein
  misc_feature (1)..(236): Homolog of NCBI NO: 15229725 NR Description: putative protein; protein id: At3g50330.1
  misc_feature (16)..(186): Homolog of NCBI NO: 15242494 NR Description: putative protein; protein id: At5g09750.1
  misc_feature (89)..(185): Homolog of NCBI NO: 15236714 NR Description: hypothetical protein; protein id: At4g00120.1
  misc_feature (90)..(186): Homolog of NCBI NO: 34910410 NR Description: P0692C11.28 [Oryza sativa (japonica
  misc_feature (90)..(180): Homolog of NCBI NO: 9294680 NR Description: emb|CAB62312.1~gene_id:MHC9.1~similar to unknown
  misc_feature (90)..(180): Homolog of NCBI NO: 15232534 NR Description: hypothetical protein; protein id: At3g21330.1, by cDNA: gi_20127094 [Arabidopsis thaliana]
  misc_feature (90)..(180): Homolog of NCBI NO: 28393737 NR Description: unknown protein [Arabidopsis thaliana]
  misc_feature (90)..(180): Homolog of NCBI NO: 15289790 NR Description: P0002B05.9 [Oryza sativa (japonica
  misc_feature (90)..(180): Homolog of NCBI NO: 34914234 NR Description: P0697C12.24 [Oryza sativa (japonica
MNMMMHQMEKLPEFCNPNSSFFSPDHNNTYPFLFNSTHYQSDHSMTNEPGFRYGSGLLTNPSSISPNTAYSSVFLDKRNNSNNNNNGTNMAAMREMIFRIAVMQPIHIDPEAVKPPKRRNVRISKDPQSVAARHRRERISERIRILQRLVPGGTKMDTASMLDEAIHYVKFLKKQVQSLEEQAVVTGGGGGGGGRVLIGGGGMTAASGGGGGGGVVMKGCGTVGTHQMVGNAQILR

SEQ ID NO: 91420 - protein, 234 aa, Arabidopsis thaliana
  peptide (1)..(234): Ceres Seq. ID no. 12727528
  misc_feature (124)..(171): Pfam Name: Helix-loop-helix DNA-binding domain Pfam Description: Helix-loop-helix DNA-binding domain
  misc_feature (1)..(234): Homolog of NCBI NO: 15240189 NR Description: putative protein; protein id: At5g67060.1, by cDNA: gi_20127096 [Arabidopsis thaliana] emb|CAB62312.1~gene_id:K21H1.2~similar to unknown protein
  misc_feature (1)..(234): Homolog of NCBI NO: 15229725 NR Description: putative protein; protein id: At3g50330.1
  misc_feature (14)..(184): Homolog of NCBI NO: 15242494 NR Description: putative protein; protein id: At5g09750.1
  misc_feature (87)..(183): Homolog of NCBI NO: 15236714 NR Description: hypothetical protein; protein id: At4g00120.1
  misc_feature (88)..(184): Homolog of NCBI NO: 34910410 NR Description: P0692C11.28 [Oryza sativa (japonica
  misc_feature (88)..(178): Homolog of NCBI NO: 9294680 NR Description: emb|CAB62312.1~gene_id:MHC9.1~similar to unknown
  misc_feature (88)..(178): Homolog of NCBI NO: 15232534 NR Description: hypothetical protein; protein id: At3g21330.1, by cDNA: gi_20127094 [Arabidopsis thaliana]
  misc_feature (88)..(178): Homolog of NCBI NO: 28393737 NR Description: unknown protein [Arabidopsis thaliana]
  misc_feature (88)..(178): Homolog of NCBI NO: 15289790 NR Description: P0002B05.9 [Oryza sativa (japonica
  misc_feature (88)..(178): Homolog of NCBI NO: 34914234 NR Description: P0697C12.24 [Oryza sativa (japonica
MMMHQMEKLPEFCNPNSSFFSPDHNNTYPFLFNSTHYQSDHSMTNEPGFRYGSGLLTNPSSISPNTAYSSVFLDKRNNSNNNNNGTNMAAMREMIFRIAVMQPIHIDPEAVKPPKRRNVRISKDPQSVAARHRRERISERIRILQRLVPGGTKMDTASMLDEAIHYVKFLKKQVQSLEEQAVVTGGGGGGGGRVLIGGGGMTAASGGGGGGGVVMKGCGTVGTHQMVGNAQILR

SEQ ID NO: 91421 - DNA, 954 bp, Arabidopsis thaliana
  misc_feature (1)..(954): Ceres Seq. ID no. 12727547
  misc_feature: MA Experiment ID: 20000315 Result: Down-regulated in Transcription
  misc_feature: MA Experiment 20000315 PARAMETER Experiment Name: At_14day_Shoots-Roots_Sub_P Parameter: Age (day) Value: 14
  misc_feature: MA Experiment 20000315 PARAMETER Experiment Name: At_14day_Shoots-Roots_Sub_P Parameter: Organism Value: A. thaliana
  misc_feature: MA Experiment 20000315 PARAMETER Experiment Name: At_14day_Shoots-Roots_Sub_P Parameter: Plant Line Value: WS
  misc_feature: MA Experiment 20000315 PARAMETER Experiment Name: At_14day_Shoots-Roots_Sub_P Parameter: Tissue Value: Shoots vs. Whole Plant
  misc_feature: MA Experiment ID: 20000327 Result: Down-regulated in Transcription
  misc_feature: MA Experiment 20000327 PARAMETER Experiment Name: At_42deg_Heat_Sub_P Parameter: Age (day) Value: 14
  misc_feature: MA Experiment 20000327 PARAMETER Experiment Name: At_42deg_Heat_Sub_P Parameter: Organism Value: A. thaliana
  misc_feature: MA Experiment 20000327 PARAMETER Experiment Name: At_42deg_Heat_Sub_P Parameter: Plant Line Value: WS
  misc_feature: MA Experiment 20000327 PARAMETER Experiment Name: At_42deg_Heat_Sub_P Parameter: Temperature (deg C) Value: 42 vs. 22
  misc_feature: MA Experiment 20000327 PARAMETER Experiment Name: At_42deg_Heat_Sub_P Parameter: Timepoint (hr) Value: 1
  misc_feature: MA Experiment 20000327 PARAMETER Experiment Name: At_42deg_Heat_Sub_P Parameter: Tissue Value: Aerial
  misc_feature: MA Experiment ID: 20000355 Result: Down-regulated in Transcription
  misc_feature: MA Experiment 20000355 PARAMETER Experiment Name: At_Siliques_Sub_P Parameter: Age (day) Value: 21
  misc_feature: MA Experiment 20000355 PARAMETER Experiment Name: At_Siliques_Sub_P Parameter: Organism Value: A. thaliana
  misc_feature: MA Experiment 20000355 PARAMETER Experiment Name: At_Siliques_Sub_P Parameter: Plant Line Value: WS
  misc_feature: MA Experiment 20000355 PARAMETER Experiment Name: At_Siliques_Sub_P Parameter: Tissue Value: Less Than 5mm Siliques vs. Whole Plant
atgaaaagtggagggaacacaaacactaaactcatacttgttcatccatacattcaaaagcaaacaagcacaaatcgtctatggcttctcgctttcgtttctttcttcacaatcgcttttctcctaactcttctctacaccaccgactccatcatctcttctaaaaacaactccgccaccgtctcctccgccgtcaattctgccgtcaccaccgctaccatctctcagttaccaacaacagccatcaatgcaatgcttcactacgcttcaagatcaaacgacagctaccacatgtcatacggagagatgaaatcaatctccgacgtcctccgccgctgctctccgccgtgtaatctcttagtcttcggtcttacacacgaaacccttctctggaaatcgctaaaccacaacgggcgtacagttttcatcgaagagaatcgttactacgctgcttacttcgaagaaatccacccggagatcgaagtcttcgatgttcagtacacgaccaaagctcgtgaggcgcgtgagcttgtgtcggcggttaaagaagcggcgaggaacgagtgtcgtccagtgcagaatcttctcttttcagattgtaaattaggactcaatgatttgccgaatcatgtatacgatgttgattgggatgtgatcttagttgatggaccacgtggcgacggtggagatgtaccggggaggatgtcgtcgattttcacggcggcggttcttgctcggagtaaaaaaggcgggaatccgaagacgcatgtgtttgttcatgattattacagagatgttgagagactttgtggggatgagtttctttgccgggagaatcttgtggaatctaatgatctgcttgcgcactacgtgttggagaagatggataaaaacagcacgcagttctgtcgtggtcgtaagaagaaacgctctgtttcttctccatcggcttga

SEQ ID NO: 91422 - protein, 317 aa, Arabidopsis thaliana
  peptide (1)..(317): Ceres Seq. ID no. 12727548
  misc_feature (59)..(303): Pfam Name: Protein of unknown function (DUF579) Pfam Description: Protein of unknown function (DUF579)
  misc_feature (1)..(317): Homolog of NCBI NO: 15240242 NR Description: putative protein; protein id: At5g67210.1 thaliana] >gi|10177608|dbj|BAB10955.1| to unknown protein [Arabidopsis thaliana]
  misc_feature (1)..(316): Homolog of NCBI NO: 21593034 NR Description: unknown [Arabidopsis thaliana]
  misc_feature (1)..(316): Homolog of NCBI NO: 15229700 NR Description: putative protein; protein id: At3g50220.1, by cDNA: 35440. [Arabidopsis thaliana] >gi|11282604|pir||T45568
  misc_feature (1)..(304): Homolog of NCBI NO: 18397819 NR Description: expressed protein; protein id: At2g15440.1, by cDNA: 32729. [Arabidopsis thaliana] >gi|25354650|pir||A84529
  misc_feature (22)..(306): Homolog of NCBI NO: 10241434 NR Description: putative protein [Oryza sativa (indica
  misc_feature (22)..(306): Homolog of NCBI NO: 32488916 NR Description: OSJNBb0059K02.7 [Oryza sativa (japonica
  misc_feature (24)..(292): Homolog of NCBI NO: 18409879 NR Description: hypothetical protein; protein id: At1g71690.1
  misc_feature (24)..(292): Homolog of NCBI NO: 25354648 NR Description: hypothetical protein F14O23.3 [imported] - thaliana >gi|7239492|gb|AAF43218.1|AC012654_2 EST gb|AI999169
  misc_feature (70)..(292): Homolog of NCBI NO: 18398986 NR Description: expressed protein; protein id: At1g33800.1, by cDNA: 114466., supported by cDNA: gi_17979548, supported by gi_20453344 [Arabidopsis thaliana] >gi|25354651|pir||E86461
  misc_feature (20)..(303): Homolog of NCBI NO: 15220402 NR Description: unknown protein; protein id: At1g67330.1 thaliana] >gi|9828617|gb|AAG00240.1|AC002130_5 F1N21.15
MKSGGNTNTKLILVHPYIQKQTSTNRLWLLAFVSFFTIAFLLTLLYTTDSIISSKNNSATVSSAVNSAVTTATISQLPTTAINAMLHYASRSNDSYHMSYGEMKSISDVLRRCSPPCNLLVFGLTHETLLWKSLNHNGRTVFIEENRYYAAYFEEIHPEIEVFDVQYTTKAREARELVSAVKEAARNECRPVQNLLFSDCKLGLNDLPNHVYDVDWDVILVDGPRGDGGDVPGRMSSIFTAAVLARSKKGGNPKTHVFVHDYYRDVERLCGDEFLCRENLVESNDLLAHYVLEKMDKNSTQFCRGRKKKRSVSSPSA

SEQ ID NO: 91423 - protein, 233 aa, Arabidopsis thaliana
  peptide (1)..(233): Ceres Seq. ID no. 12727549
  misc_feature (1)..(219): Pfam Name: Protein of unknown function (DUF579) Pfam Description: Protein of unknown function (DUF579)
  misc_feature (1)..(233): Homolog of NCBI NO: 15240242 NR Description: putative protein; protein id: At5g67210.1 thaliana] >gi|10177608|dbj|BAB10955.1| to unknown protein [Arabidopsis thaliana]
  misc_feature (1)..(232): Homolog of NCBI NO: 21593034 NR Description: unknown [Arabidopsis thaliana]
  misc_feature (1)..(232): Homolog of NCBI NO: 15229700 NR Description: putative protein; protein id: At3g50220.1, by cDNA: 35440. [Arabidopsis thaliana] >gi|11282604|pir||T45568
  misc_feature (1)..(220): Homolog of NCBI NO: 18397819 NR Description: expressed protein; protein id: At2g15440.1, by cDNA: 32729. [Arabidopsis thaliana] >gi|25354650|pir||A84529
  misc_feature (1)..(222): Homolog of NCBI NO: 10241434 NR Description: putative protein [Oryza sativa (indica
  misc_feature (1)..(222): Homolog of NCBI NO: 32488916 NR Description: OSJNBb0059K02.7 [Oryza sativa (japonica
  misc_feature (1)..(208): Homolog of NCBI NO: 18409879 NR Description: hypothetical protein; protein id: At1g71690.1
  misc_feature (1)..(208): Homolog of NCBI NO: 25354648 NR Description: hypothetical protein F14O23.3 [imported] - thaliana >gi|7239492|gb|AAF43218.1|AC012654_2 EST gb|AI999169
  misc_feature (1)..(208): Homolog of NCBI NO: 18398986 NR Description: expressed protein; protein id: At1g33800.1, by cDNA: 114466., supported by cDNA: gi_17979548, supported by gi_20453344 [Arabidopsis thaliana] >gi|25354651|pir||E86461
  misc_feature (1)..(219): Homolog of NCBI NO: 15220402 NR Description: unknown protein; protein id: At1g67330.1 thaliana] >gi|9828617|gb|AAG00240.1|AC002130_5 F1N21.15
MLHYASRSNDSYHMSYGEMKSISDVLRRCSPPCNLLVFGLTHETLLWKSLNHNGRTVFIEENRYYAAYFEEIHPEIEVFDVQYTTKAREARELVSAVKEAARNECRPVQNLLFSDCKLGLNDLPNHVYDVDWDVILVDGPRGDGGDVPGRMSSIFTAAVLARSKKGGNPKTHVFVHDYYRDVERLCGDEFLCRENLVESNDLLAHYVLEKMDKNSTQFCRGRKKKRSVSSPSA

SEQ ID NO: 91424 - protein, 220 aa, Arabidopsis thaliana
  peptide (1)..(220): Ceres Seq. ID no. 12727550
  misc_feature (1)..(206): Pfam Name: Protein of unknown function (DUF579) Pfam Description: Protein of unknown function (DUF579)
  misc_feature (1)..(220): Homolog of NCBI NO: 15240242 NR Description: putative protein; protein id: At5g67210.1 thaliana] >gi|10177608|dbj|BAB10955.1| to unknown protein [Arabidopsis thaliana]
  misc_feature (1)..(219): Homolog of NCBI NO: 21593034 NR Description: unknown [Arabidopsis thaliana]
  misc_feature (1)..(219): Homolog of NCBI NO: 15229700 NR Description: putative protein; protein id: At3g50220.1, by cDNA: 35440. [Arabidopsis thaliana] >gi|11282604|pir||T45568
  misc_feature (1)..(207): Homolog of NCBI NO: 18397819 NR Description: expressed protein; protein id: At2g15440.1, by cDNA: 32729. [Arabidopsis thaliana] >gi|25354650|pir||A84529
  misc_feature (1)..(209): Homolog of NCBI NO: 10241434 NR Description: putative protein [Oryza sativa (indica
  misc_feature (1)..(209): Homolog of NCBI NO: 32488916 NR Description: OSJNBb0059K02.7 [Oryza sativa (japonica
  misc_feature (1)..(195): Homolog of NCBI NO: 18409879 NR Description: hypothetical protein; protein id: At1g71690.1
  misc_feature (1)..(195): Homolog of NCBI NO: 25354648 NR Description: hypothetical protein F14O23.3 [imported] - thaliana >gi|7239492|gb|AAF43218.1|AC012654_2 EST gb|AI999169
  misc_feature (1)..(195): Homolog of NCBI NO: 18398986 NR Description: expressed protein; protein id: At1g33800.1, by cDNA: 114466., supported by cDNA: gi_17979548, supported by gi_20453344 [Arabidopsis thaliana] >gi|25354651|pir||E86461
  misc_feature (1)..(206): Homolog of NCBI NO: 15220402 NR Description: unknown protein; protein id: At1g67330.1 thaliana] >gi|9828617|gb|AAG00240.1|AC002130_5 F1N21.15
MSYGEMKSISDVLRRCSPPCNLLVFGLTHETLLWKSLNHNGRTVFIEENRYYAAYFEEIHPEIEVFDVQYTTKAREARELVSAVKEAARNECRPVQNLLFSDCKLGLNDLPNHVYDVDWDVILVDGPRGDGGDVPGRMSSIFTAAVLARSKKGGNPKTHVFVHDYYRDVERLCGDEFLCRENLVESNDLLAHYVLEKMDKNSTQFCRGRKKKRSVSSPSA

SEQ ID NO: 91425 - DNA, 1956 bp, Arabidopsis thaliana
  misc_feature (1)..(1956): Ceres Seq. ID no. 12727555
  misc_feature: MA Experiment ID: 20000495 Result: Down-regulated in Transcription
  misc_feature: MA Experiment 20000495 PARAMETER Experiment Name: At_Guard_Cells_P Parameter: Harvest Date Value: 8/2/2002
  misc_feature: MA Experiment 20000495 PARAMETER Experiment Name: At_Guard_Cells_P Parameter: Organism Value: A. thaliana
  misc_feature: MA Experiment 20000495 PARAMETER Experiment Name: At_Guard_Cells_P Parameter: Tissue Value: Guard Cells vs. Leaves
aaaataaagggaaaaaaaaaaaattggagaggaagagaaaggaggaaatcgaaaccattcggttggtgatgggccaagcgccgtcgtctacggcggaatcgaacggacgagagttagatttgaggttatggtctccggtgattgttgctggaggtgaatcgatggctgtggggaatgttgtggatcgggatttcaccggagatctgccggatgagtgtttagctcatgtgtttcagtttcttggagctggagatcggaagcgatgctctcttgtttgtaaacggtggttgctcgtcgacggtcagagtcgtcatcggttatctctagatgctaaggatgagatctcctctttccttacctctatgttcaatcgattcgattcggtgacgaagcttgctctccgatgtgatcggaagtctgttagcttgagcgatgaagctttggctatgatctctgttcgttgtttgaatctgactcgtgttaagcttcgtggttgtcgcgagattacggatctgggaatggaagacttcgctaagaattgtaaaaatcttaagaagctatctgttggatcttgcaatttcggagctaaaggcgtgaacgcgatgctcgaacattgtaagcttctggaggaattgtcggtgaagcgacttcgaggaattcatgaagcagctgagttgattcacctacctgatgatgcttcatcttcttcgctcaggtctatttgcttgaaggagctcgttaatggccaggtatttgaaccgttgcttgctactacaagaacactgaaaacactgaaaatcattcgttgtttgggtgattgggataaagttcttcagatgattgcaaatggtaagagttctttaagtgaaattcacttagagaggctccaagttagtgacattgggctatctgcgatatctaaatgctcaaatgttgagacattgcatatagtgaaaactccagaatgttcaaactttggtctgatttatgtagctgagagatgtaagctgctgaggaagcttcatattgatggttggaggactaataggataggtgatgaaggtttactttctgtagccaaacactgtttaaacttgcaagaacttgtgctgattggtgttaatgcaacacatatgagtttagcagccattgcttcaaactgtgagaaactcgaacggttagcactttgcggaagtggaacaataggcgatacagagattgcttgcatcgctaggaaatgtggagcattgaggaaattctgtattaaaggatgtcctgtttcggatcgagggattgaggcgctcgctgttggttgtcctaatctggttaaattgaaggtgaagaaatgtaaagttgtgactggagagattggagattggctgcgtgaacaaaggaggacactagtggtgagtatggatggtgatgaaaccgaagcagtggtggtggtggatggtgaggttgaaaccgttgtggaggagccaagggtggctcaagcaggtggaattgtggcagagattggttcaagtaatggtggtggaggaagtagattagcgatgattaggtcaaagttagggtttcttgctggaagaaacttggtaacttgcacattcagaagatggtctcacaatgataatgctagtagttctacttgatcagctataactatgaaagcggtaattgtcaaaaaaaaaatctttttaagagaaatttctatctgtattttgtaatcctcgttcgttttcatgtgtgcaagacttgttgattagaaaagtcattacaatggagaccatttattgtattgactattgatttggtgtcatatttgttttctctgtttggaatctcaacattagtcatttgatgggaatgaattgtcatttttttttacttatagttacaatgtagctgtgttggtaaggtttgcaaaggttttgtttcttaagaaactattttggt

SEQ ID NO: 91426 - protein, 549 aa, Arabidopsis thaliana
  peptide (1)..(549): Ceres Seq. ID no. 12727556
  misc_feature (23)..(549): Homolog of NCBI NO: 18425169 NR Description: SKP1 interacting partner 2 (SKIP2); protein id: supported by cDNA: gi_10716948, supported by cDNA: gi_15810226
  misc_feature (23)..(547): Homolog of NCBI NO: 18409012 NR Description: F-box protein family, AtFBL16; protein id:
  misc_feature (52)..(548): Homolog of NCBI NO: 30013671 NR Description: Avr9/Cf-9 rapidly elicited protein 189 [Nicotiana
  misc_feature (23)..(324): Homolog of NCBI NO: 15810227 NR Description: putative SKP1 interacting partner SKIP2
  misc_feature (7)..(538): Homolog of NCBI NO: 18412996 NR Description: F-box protein family, AtFBL8/AtFBL24; protein id: [Arabidopsis thaliana] >gi|25407371|pir||B85072 hypothetical
  misc_feature (23)..(538): Homolog of NCBI NO: 15220130 NR Description: F-box protein family; protein id: At1g47056.1
  misc_feature (49)..(472): Homolog of NCBI NO: 21743072 NR Description: OSJNBb0002J11.1 [Oryza sativa (japonica
  misc_feature (68)..(441): Homolog of NCBI NO: 25151694 NR Description: Rad-51 (Fifty one) like, Short RFS-1, F-box domain
  misc_feature (68)..(441): Homolog of NCBI NO: 25151696 NR Description: Rad-51 (Fifty one) like, Short RFS-1, F-box domain
  misc_feature (68)..(431): Homolog of NCBI NO: 630513 NR Description: hypothetical protein C02F5.7 - Caenorhabditis
NKGKKKKLERKRKEEIETIRLVMGQAPSSTAESNGRELDLRLWSPVIVAGGESMAVGNVVDRDFTGDLPDECLAHVFQFLGAGDRKRCSLVCKRWLLVDGQSRHRLSLDAKDEISSFLTSMFNRFDSVTKLALRCDRKSVSLSDEALAMISVRCLNLTRVKLRGCREITDLGMEDFAKNCKNLKKLSVGSCNFGAKGVNAMLEHCKLLEELSVKRLRGIHEAAELIHLPDDASSSSLRSICLKELVNGQVFEPLLATTRTLKTLKIIRCLGDWDKVLQMIANGKSSLSEIHLERLQVSDIGLSAISKCSNVETLHIVKTPECSNFGLIYVAERCKLLRKLHIDGWRTNRIGDEGLLSVAKHCLNLQELVLIGVNATHMSLAAIASNCEKLERLALCGSGTIGDTEIACIARKCGALRKFCIKGCPVSDRGIEALAVGCPNLVKLKVKKCKVVTGEIGDWLREQRRTLVVSMDGDETEAVVVVDGEVETVVEEPRVAQAGGIVAEIGSSNGGGGSRLAMIRSKLGFLAGRNLVTCTFRRWSHNDNASSST

SEQ ID NO: 91427 - protein, 527 aa, Arabidopsis thaliana
  peptide (1)..(527): Ceres Seq. ID no. 12727557
  misc_feature (1)..(527): Homolog of NCBI NO: 18425169 NR Description: SKP1 interacting partner 2 (SKIP2); protein id: supported by cDNA: gi_10716948, supported by cDNA: gi_15810226
  misc_feature (1)..(525): Homolog of NCBI NO: 18409012 NR Description: F-box protein family, AtFBL16; protein id:
  misc_feature (30)..(526): Homolog of NCBI NO: 30013671 NR Description: Avr9/Cf-9 rapidly elicited protein 189 [Nicotiana
  misc_feature (1)..(302): Homolog of NCBI NO: 15810227 NR Description: putative SKP1 interacting partner SKIP2
  misc_feature (1)..(516): Homolog of NCBI NO: 18412996 NR Description: F-box protein family, AtFBL8/AtFBL24; protein id: [Arabidopsis thaliana] >gi|25407371|pir||B85072 hypothetical
  misc_feature (1)..(516): Homolog of NCBI NO: 15220130 NR Description: F-box protein family; protein id: At1g47056.1
  misc_feature (27)..(450): Homolog of NCBI NO: 21743072 NR Description: OSJNBb0002J11.1 [Oryza sativa (japonica
  misc_feature (46)..(419): Homolog of NCBI NO: 25151694 NR Description: Rad-51 (Fifty one) like, Short RFS-1, F-box domain
  misc_feature (46)..(419): Homolog of NCBI NO: 25151696 NR Description: Rad-51 (Fifty one) like, Short RFS-1, F-box domain
  misc_feature (46)..(409): Homolog of NCBI NO: 630513 NR Description: hypothetical protein C02F5.7 - Caenorhabditis
MGQAPSSTAESNGRELDLRLWSPVIVAGGESMAVGNVVDRDFTGDLPDECLAHVFQFLGAGDRKRCSLVCKRWLLVDGQSRHRLSLDAKDEISSFLTSMFNRFDSVTKLALRCDRKSVSLSDEALAMISVRCLNLTRVKLRGCREITDLGMEDFAKNCKNLKKLSVGSCNFGAKGVNAMLEHCKLLEELSVKRLRGIHEAAELIHLPDDASSSSLRSICLKELVNGQVFEPLLATTRTLKTLKIIRCLGDWDKVLQMIANGKSSLSEIHLERLQVSDIGLSAISKCSNVETLHIVKTPECSNFGLIYVAERCKLLRKLHIDGWRTNRIGDEGLLSVAKHCLNLQELVLIGVNATHMSLAAIASNCEKLERLALCGSGTIGDTEIACIARKCGALRKFCIKGCPVSDRGIEALAVGCPNLVKLKVKKCKVVTGEIGDWLREQRRTLVVSMDGDETEAVVVVDGEVETVVEEPRVAQAGGIVAEIGSSNGGGGSRLAMIRSKLGFLAGRNLVTCTFRRWSHNDNASSST

SEQ ID NO: 91428 - protein, 496 aa, Arabidopsis thaliana
  peptide (1)..(496): Ceres Seq. ID no. 12727558
  misc_feature (1)..(496): Homolog of NCBI NO: 18425169 NR Description: SKP1 interacting partner 2 (SKIP2); protein id: supported by cDNA: gi_10716948, supported by cDNA: gi_15810226
  misc_feature (1)..(494): Homolog of NCBI NO: 18409012 NR Description: F-box protein family, AtFBL16; protein id:
  misc_feature (1)..(495): Homolog of NCBI NO: 30013671 NR Description: Avr9/Cf-9 rapidly elicited protein 189 [Nicotiana
  misc_feature (1)..(271): Homolog of NCBI NO: 15810227 NR Description: putative SKP1 interacting partner SKIP2
  misc_feature (1)..(485): Homolog of NCBI NO: 18412996 NR Description: F-box protein family, AtFBL8/AtFBL24; protein id: [Arabidopsis thaliana] >gi|25407371|pir||B85072 hypothetical
  misc_feature (1)..(485): Homolog of NCBI NO: 15220130 NR Description: F-box protein family; protein id: At1g47056.1
  misc_feature (1)..(419): Homolog of NCBI NO: 21743072 NR Description: OSJNBb0002J11.1 [Oryza sativa (japonica
  misc_feature (15)..(388): Homolog of NCBI NO: 25151694 NR Description: Rad-51 (Fifty one) like, Short RFS-1, F-box domain
  misc_feature (15)..(388): Homolog of NCBI NO: 25151696 NR Description: Rad-51 (Fifty one) like, Short RFS-1, F-box domain
  misc_feature (15)..(378): Homolog of NCBI NO: 630513 NR Description: hypothetical protein C02F5.7 - Caenorhabditis
MAVGNVVDRDFTGDLPDECLAHVFQFLGAGDRKRCSLVCKRWLLVDGQSRHRLSLDAKDEISSFLTSMFNRFDSVTKLALRCDRKSVSLSDEALAMISVRCLNLTRVKLRGCREITDLGMEDFAKNCKNLKKLSVGSCNFGAKGVNAMLEHCKLLEELSVKRLRGIHEAAELIHLPDDASSSSLRSICLKELVNGQVFEPLLATTRTLKTLKIIRCLGDWDKVLQMIANGKSSLSEIHLERLQVSDIGLSAISKCSNVETLHIVKTPECSNFGLIYVAERCKLLRKLHIDGWRTNRIGDEGLLSVAKHCLNLQELVLIGVNATHMSLAAIASNCEKLERLALCGSGTIGDTEIACIARKCGALRKFCIKGCPVSDRGIEALAVGCPNLVKLKVKKCKVVTGEIGDWLREQRRTLVVSMDGDETEAVVVVDGEVETVVEEPRVAQAGGIVAEIGSSNGGGGSRLAMIRSKLGFLAGRNLVTCTFRRWSHNDNASSST

SEQ ID NO: 91429 - DNA, 1207 bp, Arabidopsis thaliana
  misc_feature (1)..(1207): Ceres Seq. ID no. 12727579
  misc_feature: MA Experiment ID: 20000171 Result: Up-regulated in Transcription
  misc_feature: MA Experiment 20000171 PARAMETER Experiment Name: At_42deg_Heat_P Parameter: Age (day) Value: 14
  misc_feature: MA Experiment 20000171 PARAMETER Experiment Name: At_42deg_Heat_P Parameter: Organism Value: A. thaliana
  misc_feature: MA Experiment 20000171 PARAMETER Experiment Name: At_42deg_Heat_P Parameter: Plant Line Value: WS
  misc_feature: MA Experiment 20000171 PARAMETER Experiment Name: At_42deg_Heat_P Parameter: Temperature (deg C) Value: 42 vs. 22
  misc_feature: MA Experiment 20000171 PARAMETER Experiment Name: At_42deg_Heat_P Parameter: Timepoint (hr) Value: 1
  misc_feature: MA Experiment 20000171 PARAMETER Experiment Name: At_42deg_Heat_P Parameter: Tissue Value: Aerial
  misc_feature: MA Experiment ID: 20000173 Result: Up-regulated in Transcription
  misc_feature: MA Experiment 20000173 PARAMETER Experiment Name: At_42deg_Heat_P Parameter: Age (day) Value: 14
  misc_feature: MA Experiment 20000173 PARAMETER Experiment Name: At_42deg_Heat_P Parameter: Organism Value: A. thaliana
  misc_feature: MA Experiment 20000173 PARAMETER Experiment Name: At_42deg_Heat_P Parameter: Plant Line Value: WS
  misc_feature: MA Experiment 20000173 PARAMETER Experiment Name: At_42deg_Heat_P Parameter: Temperature (deg C) Value: 42 vs. 22
  misc_feature: MA Experiment 20000173 PARAMETER Experiment Name: At_42deg_Heat_P Parameter: Timepoint (hr) Value: 6
  misc_feature: MA Experiment 20000173 PARAMETER Experiment Name: At_42deg_Heat_P Parameter: Tissue Value: Aerial
  misc_feature: MA Experiment ID: 20000180 Result: Up-regulated in Transcription
  misc_feature: MA Experiment 20000180 PARAMETER Experiment Name: At_Germinating_Seeds_P Parameter: Age (hr) Value: 24 vs. 0
  misc_feature: MA Experiment 20000180 PARAMETER Experiment Name: At_Germinating_Seeds_P Parameter: Tissue Value: Germinating Seeds
  misc_feature: MA Experiment ID: 20000185 Result: Up-regulated in Transcription
  misc_feature: MA Experiment 20000185 PARAMETER Experiment Name: At_Roots__P Parameter: Age (day) Value: 7 vs. 21
  misc_feature: MA Experiment 20000185 PARAMETER Experiment Name: At_Roots__P Parameter: Organism Value: A. thaliana
  misc_feature: MA Experiment 20000185 PARAMETER Experiment Name: At_Roots__P Parameter: Tissue Value: Roots vs. Whole Plant
  misc_feature: MA Experiment ID: 20000439 Result: Up-regulated in Transcription
  misc_feature: MA Experiment 20000439 PARAMETER Experiment Name: At_Roots__P Parameter: Age (day) Value: 14 vs. 21
  misc_feature: MA Experiment 20000439 PARAMETER Experiment Name: At_Roots__P Parameter: Organism Value: A. thaliana
  misc_feature: MA Experiment 20000439 PARAMETER Experiment Name: At_Roots__P Parameter: Tissue Value: Roots vs. Whole Plant
  misc_feature: MA Experiment ID: 20000460 Result: Down-regulated in Transcription
  misc_feature: MA Experiment 20000460 PARAMETER Experiment Name: At_10percent_PEG_P Parameter: Age (day) Value: 12
  misc_feature: MA Experiment 20000460 PARAMETER Experiment Name: At_10percent_PEG_P Parameter: Organism Value: A. thaliana
  misc_feature: MA Experiment 20000460 PARAMETER Experiment Name: At_10percent_PEG_P Parameter: Plant Line Value: WS
  misc_feature: MA Experiment 20000460 PARAMETER Experiment Name: At_10percent_PEG_P Parameter: Timepoint (day) Value: 12
  misc_feature: MA Experiment 20000460 PARAMETER Experiment Name: At_10percent_PEG_P Parameter: Tissue Value: Whole Plant
  misc_feature: MA Experiment 20000460 PARAMETER Experiment Name: At_10percent_PEG_P Parameter: Treatment Value: 10percent PEG vs. No Treatment
  misc_feature: MA Experiment ID: 20000527 Result: Down-regulated in Transcription
  misc_feature: MA Experiment 20000527 PARAMETER Experiment Name: At_10percent_PEG_P Parameter: Age (day) Value: 20
  misc_feature: MA Experiment 20000527 PARAMETER Experiment Name: At_10percent_PEG_P Parameter: Organism Value: A. thaliana
  misc_feature: MA Experiment 20000527 PARAMETER Experiment Name: At_10percent_PEG_P Parameter: Plant Line Value: WS
  misc_feature: MA Experiment 20000527 PARAMETER Experiment Name: At_10percent_PEG_P Parameter: Timepoint (day) Value: 20
  misc_feature: MA Experiment 20000527 PARAMETER Experiment Name: At_10percent_PEG_P Parameter: Tissue Value: Whole Plant
  misc_feature: MA Experiment 20000527 PARAMETER Experiment Name: At_10percent_PEG_P Parameter: Treatment Value: 10percent PEG vs. No Treatment
  misc_feature: MA Experiment ID: 20001450 Result: Down-regulated in Transcription
  misc_feature: MA Experiment 20001450 PARAMETER Experiment Name: At_Far-red-induction_P Parameter: Age (day) Value: 7
  misc_feature: MA Experiment 20001450 PARAMETER Experiment Name: At_Far-red-induction_P Parameter: Light Value: Far-red vs. White
  misc_feature: MA Experiment 20001450 PARAMETER Experiment Name: At_Far-red-induction_P Parameter: Organism Value: A. thaliana
  misc_feature: MA Experiment 20001450 PARAMETER Experiment Name: At_Far-red-induction_P Parameter: Plant Line Value: Columbia
  misc_feature: MA Experiment 20001450 PARAMETER Experiment Name: At_Far-red-induction_P Parameter: Timepoint (hr) Value: 8
  misc_feature: MA Experiment 20001450 PARAMETER Experiment Name: At_Far-red-induction_P Parameter: Tissue Value: Whole Plant
cattcctgtaaacacaaaaacttgtaatttccaacgaaatggcgcggttcagtctggttgtagtcgtgactcttagtcttgccatctctatgttccctgacacaaccactgctcaactcaaaaccaatttctacggaaactcatgtccgaatgttgaacaaatcgtgaaaaaagtcgtccaagaaaaaatcaaacagaccttcgtcaccatcccagctactctccgcctcttcttccacgattgcttcgtcaatggatgtgatgcgtcggtcatgattcaatcaacgcctaccaacaaagccgagaaggatcatccagacaatatttctttggccggagatggatttgacgttgtgatcaaagccaagaaagctcttgacgctatcccaagttgcaaaaacaaagtctcttgtgctgatattcttgctttagccacccgtgatgttgttgtcgccgccaaaggtccgtcgtacgcagtggaactcggaaggtttgatggtttggtgtcgactgcggctagcgttaacggaaacttgcccggaccaaataacaaagttacagaacttaacaagctttttgccaaaaacaaacttacccaagaggacatgatcgctctttcagcggctcacacacttggattcgcccattgtggcaaagtgttcaacagaatctacaacttcaacctcacacacgccgttgacccaactctaaacaaagcctacgctaaagaacttcagttggcttgtcccaagacagttgacccaagaatcgccatcaacatggacccaaccactccaagacaattcgacaacatttacttcaagaatctgcaacaaggcaaaggactcttcacttccgaccaagttctcttcaccgatggtcgctcaaagcccaccgttaacgattgggccaagaattctgttgctttcaacaaggctttcgtaaccgctatgaccaaactcggccgcgttggcgttaagactagacgcaacggtaacattcgtcgtgactgtggtgcctttaactgatcatcctttttgggttttgttttcgagatttgttctttgacatgttatgagtttttgttttgttgtcttctgtttgtttctgcttcttgtatttttgaaaaacacattaacgaatctataccgttgttttatttctcgtgactgtaatattaataatcttatttctattaaacttgttt

SEQ ID NO: 91430 - protein, 329 aa, Arabidopsis thaliana
  peptide (1)..(329): Ceres Seq. ID no. 12727580
  misc_feature (43)..(293): Pfam Name: Peroxidase Pfam Description: Peroxidase
  misc_feature (1)..(329): Homolog of NCBI NO: 15240737 NR Description: peroxidase, putative; protein id: At5g67400.1 thaliana] >gi|26397661|sp|Q43873|PE73_ARATH Peroxidase 73 (Atperox P73) (PRXR11) (ATP10a) >gi|1402902|emb|CAA66967.1|
  misc_feature (1)..(329): Homolog of NCBI NO: 15229646 NR Description: peroxidase, putative; protein id: At3g49960.1 thaliana] >gi|25453201|sp|Q96510|PE35_ARATH Peroxidase 35
  misc_feature (7)..(329): Homolog of NCBI NO: 15235597 NR Description: peroxidase, putative; protein id: At4g37520.1, by cDNA: 2583., supported by cDNA: gi_17065479, supported by gi_20148496 [Arabidopsis thaliana]
  misc_feature (7)..(329): Homolog of NCBI NO: 21554605 NR Description: peroxidase, prxr2 [Arabidopsis thaliana]
  misc_feature (6)..(329): Homolog of NCBI NO: 15235600 NR Description: peroxidase, putative; protein id: At4g37530.1, by cDNA: gi_18874553 [Arabidopsis thaliana] Peroxidase 51 precursor (Atperox P51) (ATP37)
  misc_feature (21)..(329): Homolog of NCBI NO: 1546708 NR Description: peroxidase ATP9a [Arabidopsis thaliana]
  misc_feature (6)..(329): Homolog of NCBI NO: 17979440 NR Description: putative peroxidase [Arabidopsis thaliana]
  misc_feature (6)..(329): Homolog of NCBI NO: 28629828 NR Description: peroxidase 1 [Artemisia annua]
  misc_feature (1)..(329): Homolog of NCBI NO: 14485511 NR Description: putative peroxidase [Solanum tuberosum]
  misc_feature (1)..(325): Homolog of NCBI NO: 4138647 NR Description: peroxidase [Trifolium repens]
MARFSLVVVVTLSLAISMFPDTTTAQLKTNFYGNSCPNVEQIVKKVVQEKIKQTFVTIPATLRLFFHDCFVNGCDASVMIQSTPTNKAEKDHPDNISLAGDGFDVVIKAKKALDAIPSCKNKVSCADILALATRDVVVAAKGPSYAVELGRFDGLVSTAASVNGNLPGPNNKVTELNKLFAKNKLTQEDMIALSAAHTLGFAHCGKVFNRIYNFNLTHAVDPTLNKAYAKELQLACPKTVDPRIAINMDPTTPRQFDNIYFKNLQQGKGLFTSDQVLFTDGRSKPTVNDWAKNSVAFNKAFVTAMTKLGRVGVKTRRNGNIRRDCGAFN

SEQ ID NO: 91431 - protein, 312 aa, Arabidopsis thaliana
  peptide (1)..(312): Ceres Seq. ID no. 12727581
  misc_feature (26)..(276): Pfam Name: Peroxidase Pfam Description: Peroxidase
  misc_feature (1)..(312): Homolog of NCBI NO: 15240737 NR Description: peroxidase, putative; protein id: At5g67400.1 thaliana] >gi|26397661|sp|Q43873|PE73_ARATH Peroxidase 73 (Atperox P73) (PRXR11) (ATP10a) >gi|1402902|emb|CAA66967.1|
  misc_feature (1)..(312): Homolog of NCBI NO: 15229646 NR Description: peroxidase, putative; protein id: At3g49960.1 thaliana] >gi|25453201|sp|Q96510|PE35_ARATH Peroxidase 35
  misc_feature (1)..(312): Homolog of NCBI NO: 15235597 NR Description: peroxidase, putative; protein id: At4g37520.1, by cDNA: 2583., supported by cDNA: gi_17065479, supported by gi_20148496 [Arabidopsis thaliana]
  misc_feature (1)..(312): Homolog of NCBI NO: 21554605 NR Description: peroxidase, prxr2 [Arabidopsis thaliana]
  misc_feature (1)..(312): Homolog of NCBI NO: 15235600 NR Description: peroxidase, putative; protein id: At4g37530.1, by cDNA: gi_18874553 [Arabidopsis thaliana] Peroxidase 51 precursor (Atperox P51) (ATP37)
  misc_feature (4)..(312): Homolog of NCBI NO: 1546708 NR Description: peroxidase ATP9a [Arabidopsis thaliana]
  misc_feature (1)..(312): Homolog of NCBI NO: 17979440 NR Description: putative peroxidase [Arabidopsis thaliana]
  misc_feature (1)..(312): Homolog of NCBI NO: 28629828 NR Description: peroxidase 1 [Artemisia annua]
  misc_feature (1)..(312): Homolog of NCBI NO: 14485511 NR Description: putative peroxidase [Solanum tuberosum]
  misc_feature (1)..(308): Homolog of NCBI NO: 4138647 NR Description: peroxidase [Trifolium repens]
MFPDTTTAQLKTNFYGNSCPNVEQIVKKVVQEKIKQTFVTIPATLRLFFHDCFVNGCDASVMIQSTPTNKAEKDHPDNISLAGDGFDVVIKAKKALDAIPSCKNKVSCADILALATRDVVVAAKGPSYAVELGRFDGLVSTAASVNGNLPGPNNKVTELNKLFAKNKLTQEDMIALSAAHTLGFAHCGKVFNRIYNFNLTHAVDPTLNKAYAKELQLACPKTVDPRIAINMDPTTPRQFDNIYFKNLQQGKGLFTSDQVLFTDGRSKPTVNDWAKNSVAFNKAFVTAMTKLGRVGVKTRRNGNIRRDCGAFN

SEQ ID NO: 91432 - protein, 251 aa, Arabidopsis thaliana
  peptide (1)..(251): Ceres Seq. ID no. 12727582
  misc_feature (1)..(215): Pfam Name: Peroxidase Pfam Description: Peroxidase
  misc_feature (1)..(251): Homolog of NCBI NO: 15240737 NR Description: peroxidase, putative; protein id: At5g67400.1 thaliana] >gi|26397661|sp|Q43873|PE73_ARATH Peroxidase 73 (Atperox P73) (PRXR11) (ATP10a) >gi|1402902|emb|CAA66967.1|
  misc_feature (1)..(251): Homolog of NCBI NO: 15229646 NR Description: peroxidase, putative; protein id: At3g49960.1 thaliana] >gi|25453201|sp|Q96510|PE35_ARATH Peroxidase 35
  misc_feature (1)..(251): Homolog of NCBI NO: 15235597 NR Description: peroxidase, putative; protein id: At4g37520.1, by cDNA: 2583., supported by cDNA: gi_17065479, supported by gi_20148496 [Arabidopsis thaliana]
  misc_feature (1)..(251): Homolog of NCBI NO: 21554605 NR Description: peroxidase, prxr2 [Arabidopsis thaliana]
  misc_feature (1)..(251): Homolog of NCBI NO: 15235600 NR Description: peroxidase, putative; protein id: At4g37530.1, by cDNA: gi_18874553 [Arabidopsis thaliana] Peroxidase 51 precursor (Atperox P51) (ATP37)
  misc_feature (1)..(251): Homolog of NCBI NO: 1546708 NR Description: peroxidase ATP9a [Arabidopsis thaliana]
  misc_feature (1)..(251): Homolog of NCBI NO: 17979440 NR Description: putative peroxidase [Arabidopsis thaliana]
  misc_feature (1)..(251): Homolog of NCBI NO: 28629828 NR Description: peroxidase 1 [Artemisia annua]
  misc_feature (1)..(251): Homolog of NCBI NO: 14485511 NR Description: putative peroxidase [Solanum tuberosum]
  misc_feature (1)..(247): Homolog of NCBI NO: 4138647 NR Description: peroxidase [Trifolium repens]
MIQSTPTNKAEKDHPDNISLAGDGFDVVIKAKKALDAIPSCKNKVSCADILALATRDVVVAAKGPSYAVELGRFDGLVSTAASVNGNLPGPNNKVTELNKLFAKNKLTQEDMIALSAAHTLGFAHCGKVFNRIYNFNLTHAVDPTLNKAYAKELQLACPKTVDPRIAINMDPTTPRQFDNIYFKNLQQGKGLFTSDQVLFTDGRSKPTVNDWAKNSVAFNKAFVTAMTKLGRVGVKTRRNGNIRRDCGAFN

SEQ ID NO: 91433 - DNA, 1356 bp, Arabidopsis thaliana
  misc_feature (1)..(1356): Ceres Seq. ID no. 12727622
  misc_feature: MA Experiment ID: 20000171 Result: Up-regulated in Transcription
  misc_feature: MA Experiment 20000171 PARAMETER Experiment Name: At_42deg_Heat_P Parameter: Age (day) Value: 14
  misc_feature: MA Experiment 20000171 PARAMETER Experiment Name: At_42deg_Heat_P Parameter: Organism Value: A. thaliana
  misc_feature: MA Experiment 20000171 PARAMETER Experiment Name: At_42deg_Heat_P Parameter: Plant Line Value: WS
  misc_feature: MA Experiment 20000171 PARAMETER Experiment Name: At_42deg_Heat_P Parameter: Temperature (deg C) Value: 42 vs. 22
  misc_feature: MA Experiment 20000171 PARAMETER Experiment Name: At_42deg_Heat_P Parameter: Timepoint (hr) Value: 1
  misc_feature: MA Experiment 20000171 PARAMETER Experiment Name: At_42deg_Heat_P Parameter: Tissue Value: Aerial
  misc_feature: MA Experiment ID: 20000184 Result: Down-regulated in Transcription
  misc_feature: MA Experiment 20000184 PARAMETER Experiment Name: At_Shoots__P Parameter: Age (day) Value: 7
  misc_feature: MA Experiment 20000184 PARAMETER Experiment Name: At_Shoots__P Parameter: Tissue Value: Shoots vs. Whole Plant
  misc_feature: MA Experiment ID: 20000185 Result: Down-regulated in Transcription
  misc_feature: MA Experiment 20000185 PARAMETER Experiment Name: At_Roots__P Parameter: Age (day) Value: 7 vs. 21
  misc_feature: MA Experiment 20000185 PARAMETER Experiment Name: At_Roots__P Parameter: Organism Value: A. thaliana
  misc_feature: MA Experiment 20000185 PARAMETER Experiment Name: At_Roots__P Parameter: Tissue Value: Roots vs. Whole Plant
  misc_feature: MA Experiment ID: 20000227 Result: Up-regulated in Transcription
  misc_feature: MA Experiment 20000227 PARAMETER Experiment Name: At_Root-Tips-vs-Tops_P Parameter: Tissue Value: Root Tips vs. Root Tops
  misc_feature: MA Experiment ID: 20000438 Result: Down-regulated in Transcription
  misc_feature: MA Experiment 20000438 PARAMETER Experiment Name: At_Shoots__P Parameter: Age (day) Value: 14
  misc_feature: MA Experiment 20000438 PARAMETER Experiment Name: At_Shoots__P Parameter: Tissue Value: Shoots vs. Whole Plant
  misc_feature: MA Experiment ID: 20000439 Result: Down-regulated in Transcription
  misc_feature: MA Experiment 20000439 PARAMETER Experiment Name: At_Roots__P Parameter: Age (day) Value: 14 vs. 21
  misc_feature: MA Experiment 20000439 PARAMETER Experiment Name: At_Roots__P Parameter: Organism Value: A. thaliana
  misc_feature: MA Experiment 20000439 PARAMETER Experiment Name: At_Roots__P Parameter: Tissue Value: Roots vs. Whole Plant
  misc_feature: MA Experiment ID: 20000451 Result: Down-regulated in Transcription
  misc_feature: MA Experiment 20000451 PARAMETER Experiment Name: At_CS6879_Shoots-Roots_P Parameter: Age (day) Value: 14
  misc_feature: MA Experiment 20000451 PARAMETER Experiment Name: At_CS6879_Shoots-Roots_P Parameter: Organism Value: A. thaliana
  misc_feature: MA Experiment 20000451 PARAMETER Experiment Name: At_CS6879_Shoots-Roots_P Parameter: Plant Line Value: CS6879 vs. WS
  misc_feature: MA Experiment 20000451 PARAMETER Experiment Name: At_CS6879_Shoots-Roots_P Parameter: Tissue Value: Roots
  misc_feature: MA Experiment ID: 20000495 Result: Down-regulated in Transcription
  misc_feature: MA Experiment 20000495 PARAMETER Experiment Name: At_Guard_Cells_P Parameter: Harvest Date Value: 8/2/2002
  misc_feature: MA Experiment 20000495 PARAMETER Experiment Name: At_Guard_Cells_P Parameter: Organism Value: A. thaliana
  misc_feature: MA Experiment 20000495 PARAMETER Experiment Name: At_Guard_Cells_P Parameter: Tissue Value: Guard Cells vs. Leaves
  misc_feature: MA Experiment ID: 20001451 Result: Down-regulated in Transcription
  misc_feature: MA Experiment 20001451 PARAMETER Experiment Name: At_Far-red-induction_P Parameter: Age (day) Value: 7
  misc_feature: MA Experiment 20001451 PARAMETER Experiment Name: At_Far-red-induction_P Parameter: Light Value: Far-red vs. White
  misc_feature: MA Experiment 20001451 PARAMETER Experiment Name: At_Far-red-induction_P Parameter: Organism Value: A. thaliana
  misc_feature: MA Experiment 20001451 PARAMETER Experiment Name: At_Far-red-induction_P Parameter: Plant Line Value: Columbia
  misc_feature: MA Experiment 20001451 PARAMETER Experiment Name: At_Far-red-induction_P Parameter: Timepoint (hr) Value: 24
  misc_feature: MA Experiment 20001451 PARAMETER Experiment Name: At_Far-red-induction_P Parameter: Tissue Value: Whole Plant
atgagtggaagcagaaggaaggcgacgccggcgagtaggacgcgagtagggaattacgagatgggacgaactctcggagaaggaagcttcgctaaggtgaaatacgccaagaacaccgtcaccggagatcaagccgctatcaaaatcctcgaccgagaaaaggtcttccgtcacaaaatggtcgaacagcttaaaagagaaatatctacaatgaaactgattaaacatccaaatgtggttgaaatcattgaggttatggcgagcaaaacgaagatctatatcgttcttgagcttgtcaatggaggtgaactctttgataaaatcgcgcaacaagggaggcttaaggaggatgaagctcggagatattttcagcagctcatcaatgctgtggattactgccacagtcgaggtgtctaccacagagatctcaagcctgaaaatctgatccttgacgcaaatggggttttgaaagtctctgattttgggttaagcgccttctcacgacaagttcgggaagatggtttgcttcatacagcttgtggaacgccaaactacgttgcccctgaggttttgtcggacaaaggctatgacggtgcagcagcagatgtctggtcttgtggtgtcattctctttgtgcttatggctggttacttgccttttgatgagccgaatctcatgacattatacaaacgtatatgcaaggctgagtttagctgcccaccatggttctcgcaaggtgccaagagagtcatcaagcgtattctcgaacccaaccctattaccagaataagtattgcagagttgctcgaagatgaatggttcaagaaagggtacaagccgccatcatttgaccaagatgacgaggacataaccatagatgatgttgatgctgcttttagtaactccaaggaatgtcttgtaactgagaagaaggagaaacctgtatccatgaacgctttcgaacttatctctagctcaagcgagttcagtcttgaaaacttgttcgagaagcaagcgcaacttgtgaagaaagaaacgcggtttacttctcaacgatctgcgagtgaaataatgtcgaaaatggaagaaaccgcaaagccattaggctttaatgtccgtaaagacaactacaagataaaaatgaaaggagacaaaagtggtcgtaaaggtcagctctccgtagctacagaggtgtttgaagtggcgccatcattgcatgtggtagagcttaggaaaaccggtggtgataccctcgagtttcacaaggtatgtgattcgttctacaaaaacttctcatctggattaaaggatgtagtctggaatactgatgcagccgctgaagaacaaaagcaataa

SEQ ID NO: 91434 - protein, 451 aa, Arabidopsis thaliana
  peptide (1)..(451): Ceres Seq. ID no. 12727623
  misc_feature (19)..(274): Pfam Name: Protein kinase domain Pfam Description: Protein kinase domain
  misc_feature (1)..(451): Homolog of NCBI NO: 30677901 NR Description: CBL-interacting protein kinase 9 [Arabidopsis
  misc_feature (1)..(451): Homolog of NCBI NO: 25387057 NR Description: protein T25K16.13 [imported] - Arabidopsis >gi|6715641|gb|AAF26468.1|AC007323_9 T25K16.13 [Arabidopsis
  misc_feature (1)..(451): Homolog of NCBI NO: 15223317 NR Description: serine threonine kinase, putative; protein id: supported by cDNA: gi_14423523, supported by cDNA: gi_20259787
  misc_feature (1)..(451): Homolog of NCBI NO: 14423524 NR Description: similar to wpk4 protein kinase [Arabidopsis >gi|20259788|gb|AAM13241.1| similar to wpk4 protein kinase
  misc_feature (1)..(451): Homolog of NCBI NO: 30677898 NR Description: CBL-interacting protein kinase 9 [Arabidopsis
  misc_feature (2)..(451): Homolog of NCBI NO: 34902248 NR Description: Putative serine/threonine kinase [Oryza sativa
  misc_feature (8)..(448): Homolog of NCBI NO: 18397430 NR Description: serine/threonine kinase, putative; protein id: supported by cDNA: gi_14486385, supported by cDNA: gi_15912282,
  misc_feature (8)..(448): Homolog of NCBI NO: 25387051 NR Description: probable serine/threonine kinase [imported] - thaliana >gi|12320856|gb|AAG50566.1|AC073506_8 serine/threonine
  misc_feature (8)..(443): Homolog of NCBI NO: 7446371 NR Description: probable serine/threonine kinase (EC 2.7.1.-) - sorghum >gi|2632252|emb|CAA73067.1| serine/threonine kinase
  misc_feature (8)..(443): Homolog of NCBI NO: 7446372 NR Description: probable serine/threonine kinase (EC 2.7.1.-) - sorghum >gi|2632254|emb|CAA73068.1| serine/threonine kinase
MSGSRRKATPASRTRVGNYEMGRTLGEGSFAKVKYAKNTVTGDQAAIKILDREKVFRHKMVEQLKREISTMKLIKHPNVVEIIEVMASKTKIYIVLELVNGGELFDKIAQQGRLKEDEARRYFQQLINAVDYCHSRGVYHRDLKPENLILDANGVLKVSDFGLSAFSRQVREDGLLHTACGTPNYVAPEVLSDKGYDGAAADVWSCGVILFVLMAGYLPFDEPNLMTLYKRICKAEFSCPPWFSQGAKRVIKRILEPNPITRISIAELLEDEWFKKGYKPPSFDQDDEDITIDDVDAAFSNSKECLVTEKKEKPVSMNAFELISSSSEFSLENLFEKQAQLVKKETRFTSQRSASEIMSKMEETAKPLGFNVRKDNYKIKMKGDKSGRKGQLSVATEVFEVAPSLHVVELRKTGGDTLEFHKVCDSFYKNFSSGLKDVVWNTDAAAEEQKQ

SEQ ID NO: 91435 - protein, 431 aa, Arabidopsis thaliana
  peptide (1)..(431): Ceres Seq. ID no. 12727624
  misc_feature (1)..(254): Pfam Name: Protein kinase domain Pfam Description: Protein kinase domain
  misc_feature (1)..(431): Homolog of NCBI NO: 30677901 NR Description: CBL-interacting protein kinase 9 [Arabidopsis
  misc_feature (1)..(431): Homolog of NCBI NO: 25387057 NR Description: protein T25K16.13 [imported] - Arabidopsis >gi|6715641|gb|AAF26468.1|AC007323_9 T25K16.13 [Arabidopsis
  misc_feature (1)..(431): Homolog of NCBI NO: 15223317 NR Description: serine threonine kinase, putative; protein id: supported by cDNA: gi_14423523, supported by cDNA: gi_20259787
  misc_feature (1)..(431): Homolog of NCBI NO: 14423524 NR Description: similar to wpk4 protein kinase [Arabidopsis >gi|20259788|gb|AAM13241.1| similar to wpk4 protein kinase
  misc_feature (1)..(431): Homolog of NCBI NO: 30677898 NR Description: CBL-interacting protein kinase 9 [Arabidopsis
  misc_feature (1)..(431): Homolog of NCBI NO: 34902248 NR Description: Putative serine/threonine kinase [Oryza sativa
  misc_feature (1)..(428): Homolog of NCBI NO: 18397430 NR Description: serine/threonine kinase, putative; protein id: supported by cDNA: gi_14486385, supported by cDNA: gi_15912282,
  misc_feature (1)..(428): Homolog of NCBI NO: 25387051 NR Description: probable serine/threonine kinase [imported] - thaliana >gi|12320856|gb|AAG50566.1|AC073506_8 serine/threonine
  misc_feature (1)..(423): Homolog of NCBI NO: 7446371 NR Description: probable serine/threonine kinase (EC 2.7.1.-) - sorghum >gi|2632252|emb|CAA73067.1| serine/threonine kinase
  misc_feature (1)..(423): Homolog of NCBI NO: 7446372 NR Description: probable serine/threonine kinase (EC 2.7.1.-) - sorghum >gi|2632254|emb|CAA73068.1| serine/threonine kinase
MGRTLGEGSFAKVKYAKNTVTGDQAAIKILDREKVFRHKMVEQLKREISTMKLIKHPNVVEIIEVMASKTKIYIVLELVNGGELFDKIAQQGRLKEDEARRYFQQLINAVDYCHSRGVYHRDLKPENLILDANGVLKVSDFGLSAFSRQVREDGLLHTACGTPNYVAPEVLSDKGYDGAAADVWSCGVILFVLMAGYLPFDEPNLMTLYKRICKAEFSCPPWFSQGAKRVIKRILEPNPITRISIAELLEDEWFKKGYKPPSFDQDDEDITIDDVDAAFSNSKECLVTEKKEKPVSMNAFELISSSSEFSLENLFEKQAQLVKKETRFTSQRSASEIMSKMEETAKPLGFNVRKDNYKIKMKGDKSGRKGQLSVATEVFEVAPSLHVVELRKTGGDTLEFHKVCDSFYKNFSSGLKDVVWNTDAAAEEQKQ

SEQ ID NO: 91436 - protein, 392 aa, Arabidopsis thaliana
  peptide (1)..(392): Ceres Seq. ID no. 12727625
  misc_feature (1)..(215): Pfam Name: Protein kinase domain Pfam Description: Protein kinase domain
  misc_feature (1)..(392): Homolog of NCBI NO: 30677901 NR Description: CBL-interacting protein kinase 9 [Arabidopsis
  misc_feature (1)..(392): Homolog of NCBI NO: 25387057 NR Description: protein T25K16.13 [imported] - Arabidopsis >gi|6715641|gb|AAF26468.1|AC007323_9 T25K16.13 [Arabidopsis
  misc_feature (1)..(392): Homolog of NCBI NO: 15223317 NR Description: serine threonine kinase, putative; protein id: supported by cDNA: gi_14423523, supported by cDNA: gi_20259787
  misc_feature (1)..(392): Homolog of NCBI NO: 14423524 NR Description: similar to wpk4 protein kinase [Arabidopsis >gi|20259788|gb|AAM13241.1| similar to wpk4 protein kinase
  misc_feature (1)..(392): Homolog of NCBI NO: 30677898 NR Description: CBL-interacting protein kinase 9 [Arabidopsis
  misc_feature (1)..(392): Homolog of NCBI NO: 34902248 NR Description: Putative serine/threonine kinase [Oryza sativa
  misc_feature (1)..(389): Homolog of NCBI NO: 18397430 NR Description: serine/threonine kinase, putative; protein id: supported by cDNA: gi_14486385, supported by cDNA: gi_15912282,
  misc_feature (1)..(389): Homolog of NCBI NO: 25387051 NR Description: probable serine/threonine kinase [imported] - thaliana >gi|12320856|gb|AAG50566.1|AC073506_8 serine/threonine
  misc_feature (1)..(384): Homolog of NCBI NO: 7446371 NR Description: probable serine/threonine kinase (EC 2.7.1.-) - sorghum >gi|2632252|emb|CAA73067.1| serine/threonine kinase
  misc_feature (1)..(384): Homolog of NCBI NO: 7446372 NR Description: probable serine/threonine kinase (EC 2.7.1.-) - sorghum >gi|2632254|emb|CAA73068.1| serine/threonine kinase
MVEQLKREISTMKLIKHPNVVEIIEVMASKTKIYIVLELVNGGELFDKIAQQGRLKEDEARRYFQQLINAVDYCHSRGVYHRDLKPENLILDANGVLKVSDFGLSAFSRQVREDGLLHTACGTPNYVAPEVLSDKGYDGAAADVWSCGVILFVLMAGYLPFDEPNLMTLYKRICKAEFSCPPWFSQGAKRVIKRILEPNPITRISIAELLEDEWFKKGYKPPSFDQDDEDITIDDVDAAFSNSKECLVTEKKEKPVSMNAFELISSSSEFSLENLFEKQAQLVKKETRFTSQRSASEIMSKMEETAKPLGFNVRKDNYKIKMKGDKSGRKGQLSVATEVFEVAPSLHVVELRKTGGDTLEFHKVCDSFYKNFSSGLKDVVWNTDAAAEEQKQ

SEQ ID NO: 91437 - DNA, 780 bp, Arabidopsis thaliana
  misc_feature (1)..(780): Ceres Seq. ID no. 12727654
  misc_feature: MA Experiment ID: 20000439 Result: Up-regulated in Transcription
  misc_feature: MA Experiment 20000439 PARAMETER Experiment Name: At_Roots__P Parameter: Age (day) Value: 14 vs. 21
  misc_feature: MA Experiment 20000439 PARAMETER Experiment Name: At_Roots__P Parameter: Organism Value: A. thaliana
  misc_feature: MA Experiment 20000439 PARAMETER Experiment Name: At_Roots__P Parameter: Tissue Value: Roots vs. Whole Plant
atgggagatcatttcgtgctgctggtggatcggttgataacagaatccacgattgaggctgcgattcagagcaggaaccagatgttgcaagctaatatacccgttgaggaatgtacaatcttggacgataaaacacttgagatgctgcgtaacggagatttgtcaatggctgagtgcaggatctgtcacgacgaggacttggattccaacatggagactccttgttcttgcagcggcagcgtcaagtatgcgcataggaggtgcgtacagagatggtgtaacgagaaaggtgataccacctgcgagatttgccatcaggaattcaagccggattatacagcgccgcctccgttgctagagttaggccatgttcctctccatttcaggggaaactggggaatctctcaacgggagcatcgtttcatcacagttgtacctgctgattccacttttattgaccaaccatatcctctttcttccaccacaagcttcatctgttgccgttcccttgttctcattttcatggctcttctcattctccgacataccctccctttagtcctcaccggatcaaaccttcatgtcttccctttgttcacgttgttatttctgagaatactcggaatcatgctacccatctacgttgtcaccaaagcagtcgccacctgccgccgccattctcggaccttagacacctctccctccgatgattcatctgatgaagaaacagattcatggcgcttgcctcaaacgcaatcttacattataggcgtacgatga

SEQ ID NO: 91438 - protein, 259 aa, Arabidopsis thaliana
  peptide (1)..(259): Ceres Seq. ID no. 12727655
  misc_feature (59)..(104): Pfam Name: Zinc finger, C3HC4 type (RING finger) Pfam Description: Zinc finger, C3HC4 type (RING finger)
  misc_feature (1)..(259): Homolog of NCBI NO: 22325409 NR Description: similar to nucleoside triphosphatase, putative;
  misc_feature (1)..(243): Homolog of NCBI NO: 15240828 NR Description: putative protein; protein id: At5g38070.1 thaliana] >gi|8885610|dbj|BAA97540.1| contains similarity to
  misc_feature (37)..(225): Homolog of NCBI NO: 15227065 NR Description: unknown protein; protein id: At2g02960.1, by cDNA: gi_17529099, supported by cDNA: gi_20259116 [Arabidopsis >gi|25365876|pir||F84442 hypothetical protein At2g02960
  misc_feature (54)..(225): Homolog of NCBI NO: 18424590 NR Description: expressed protein; protein id: At5g62460.1, by cDNA: gi_16974606 [Arabidopsis thaliana] gene_id:K19B1.7~unknown protein [Arabidopsis thaliana]
  misc_feature (1)..(225): Homolog of NCBI NO: 15232824 NR Description: putative protein; protein id: At3g47550.1
  misc_feature (1)..(225): Homolog of NCBI NO: 30692888 NR Description: expressed protein [Arabidopsis thaliana]
  misc_feature (4)..(228): Homolog of NCBI NO: 15223693 NR Description: nucleoside triphosphatase, putative; protein id:
  misc_feature (4)..(228): Homolog of NCBI NO: 26451292 NR Description: unknown protein [Arabidopsis thaliana]
  misc_feature (4)..(228): Homolog of NCBI NO: 21537046 NR Description: nucleoside triphosphatase, putative [Arabidopsis
  misc_feature (55)..(228): Homolog of NCBI NO: 34905532 NR Description: B1146F03.23 [Oryza sativa (japonica
MGDHFVLLVDRLITESTIEAAIQSRNQMLQANIPVEECTILDDKTLEMLRNGDLSMAECRICHDEDLDSNMETPCSCSGSVKYAHRRCVQRWCNEKGDTTCEICHQEFKPDYTAPPPLLELGHVPLHFRGNWGISQREHRFITVVPADSTFIDQPYPLSSTTSFICCRSLVLIFMALLILRHTLPLVLTGSNLHVFPLFTLLFLRILGIMLPIYVVTKAVATCRRHSRTLDTSPSDDSSDEETDSWRLPQTQSYIIGVR

SEQ ID NO: 91439 - protein, 232 aa, Arabidopsis thaliana
  peptide (1)..(232): Ceres Seq. ID no. 12727656
  misc_feature (32)..(77): Pfam Name: Zinc finger, C3HC4 type (RING finger) Pfam Description: Zinc finger, C3HC4 type (RING finger)
  misc_feature (1)..(232): Homolog of NCBI NO: 22325409 NR Description: similar to nucleoside triphosphatase, putative;
  misc_feature (1)..(216): Homolog of NCBI NO: 15240828 NR Description: putative protein; protein id: At5g38070.1 thaliana] >gi|8885610|dbj|BAA97540.1| contains similarity to
  misc_feature (10)..(198): Homolog of NCBI NO: 15227065 NR Description: unknown protein; protein id: At2g02960.1, by cDNA: gi_17529099, supported by cDNA: gi_20259116 [Arabidopsis >gi|25365876|pir||F84442 hypothetical protein At2g02960
  misc_feature (27)..(198): Homolog of NCBI NO: 18424590 NR Description: expressed protein; protein id: At5g62460.1, by cDNA: gi_16974606 [Arabidopsis thaliana] gene_id:K19B1.7~unknown protein [Arabidopsis thaliana]
  misc_feature (1)..(198): Homolog of NCBI NO: 15232824 NR Description: putative protein; protein id: At3g47550.1
  misc_feature (1)..(198): Homolog of NCBI NO: 30692888 NR Description: expressed protein [Arabidopsis thaliana]
  misc_feature (1)..(201): Homolog of NCBI NO: 15223693 NR Description: nucleoside triphosphatase, putative; protein id:
  misc_feature (1)..(201): Homolog of NCBI NO: 26451292 NR Description: unknown protein [Arabidopsis thaliana]
  misc_feature (1)..(201): Homolog of NCBI NO: 21537046 NR Description: nucleoside triphosphatase, putative [Arabidopsis
  misc_feature (28)..(201): Homolog of NCBI NO: 34905532 NR Description: B1146F03.23 [Oryza sativa (japonica
MLQANIPVEECTILDDKTLEMLRNGDLSMAECRICHDEDLDSNMETPCSCSGSVKYAHRRCVQRWCNEKGDTTCEICHQEFKPDYTAPPPLLELGHVPLHFRGNWGISQREHRFITVVPADSTFIDQPYPLSSTTSFICCRSLVLIFMALLILRHTLPLVLTGSNLHVFPLFTLLFLRILGIMLPIYVVTKAVATCRRHSRTLDTSPSDDSSDEETDSWRLPQTQSYIIGVR

SEQ ID NO: 91440 - protein, 212 aa, Arabidopsis thaliana
  peptide (1)..(212): Ceres Seq. ID no. 12727657
  misc_feature (12)..(57): Pfam Name: Zinc finger, C3HC4 type (RING finger) Pfam Description: Zinc finger, C3HC4 type (RING finger)
  misc_feature (1)..(212): Homolog of NCBI NO: 22325409 NR Description: similar to nucleoside triphosphatase, putative;
  misc_feature (1)..(196): Homolog of NCBI NO: 15240828 NR Description: putative protein; protein id: At5g38070.1 thaliana] >gi|8885610|dbj|BAA97540.1| contains similarity to
  misc_feature (1)..(178): Homolog of NCBI NO: 15227065 NR Description: unknown protein; protein id: At2g02960.1, by cDNA: gi_17529099, supported by cDNA: gi_20259116 [Arabidopsis >gi|25365876|pir||F84442 hypothetical protein At2g02960
  misc_feature (7)..(178): Homolog of NCBI NO: 18424590 NR Description: expressed protein; protein id: At5g62460.1, by cDNA: gi_16974606 [Arabidopsis thaliana] gene_id:K19B1.7~unknown protein [Arabidopsis thaliana]
  misc_feature (1)..(178): Homolog of NCBI NO: 15232824 NR Description: putative protein; protein id: At3g47550.1
  misc_feature (1)..(178): Homolog of NCBI NO: 30692888 NR Description: expressed protein [Arabidopsis thaliana]
  misc_feature (1)..(181): Homolog of NCBI NO: 15223693 NR Description: nucleoside triphosphatase, putative; protein id:
  misc_feature (1)..(181): Homolog of NCBI NO: 26451292 NR Description: unknown protein [Arabidopsis thaliana]
  misc_feature (1)..(181): Homolog of NCBI NO: 21537046 NR Description: nucleoside triphosphatase, putative [Arabidopsis
  misc_feature (8)..(181): Homolog of NCBI NO: 34905532 NR Description: B1146F03.23 [Oryza sativa (japonica
MLRNGDLSMAECRICHDEDLDSNMETPCSCSGSVKYAHRRCVQRWCNEKGDTTCEICHQEFKPDYTAPPPLLELGHVPLHFRGNWGISQREHRFITVVPADSTFIDQPYPLSSTTSFICCRSLVLIFMALLILRHTLPLVLTGSNLHVFPLFTLLFLRILGIMLPIYVVTKAVATCRRHSRTLDTSPSDDSSDEETDSWRLPQTQSYIIGVR

SEQ ID NO: 91441 - DNA, 1755 bp, Arabidopsis thaliana
  misc_feature (1)..(1755): Ceres Seq. ID no. 12727681
  misc_feature: MA Experiment ID: 20000307 Result: Down-regulated in Transcription
  misc_feature: MA Experiment 20000307 PARAMETER Experiment Name: At_Germinating_Seeds_Sub_P Parameter: Age (hr) Value: 24 vs. 0
  misc_feature: MA Experiment 20000307 PARAMETER Experiment Name: At_Germinating_Seeds_Sub_P Parameter: Organism Value: A. thaliana
  misc_feature: MA Experiment 20000307 PARAMETER Experiment Name: At_Germinating_Seeds_Sub_P Parameter: Plant Line Value: WS
  misc_feature: MA Experiment 20000307 PARAMETER Experiment Name: At_Germinating_Seeds_Sub_P Parameter: Tissue Value: Germinating Seeds
atgcttgcgaaacaaacgccattaacaaaacaaatgctctccgagctcttacgagcaagttcttcaaagccgaagcagcttaagaagatccatgcgattgtactaaggacaggtttctctgaaaagaacagtcttttaactcagctgttagagaatcttgtagttattggtgacatgtgttacgcacgccaggtgttcgacgaaatgcacaagccgaggatcttcctttggaacactcttttcaaagggtacgttagaaaccagctcccttttgaaagtctcctactttataagaaaatgcgtgatcttggtgtccgtcctgatgaatttacttacccgtttgtggtgaaagcgatctctcagcttggggatttttcctgtgggtttgctcttcatgcccatgtggtgaaatatggttttgggtgtcttgggattgttgcaactgagttggtaatgatgtacatgaagtttggtgaattgagttcggctgagtttttgtttgagtcaatgcaagtcaaagatttagtggcttggaatgcgtttcttgcggtttgtgttcaaacggggaactccgctatagctcttgagtatttcaacaaaatgtgcgcggatgcagttcagtttgattcgtttactgtcgtgagtatgctttctgcttgtggtcagctaggctctttggagattggagaagaaatttatgatcgtgcgaggaaagaagagattgattgtaacataatagtcgaaaatgcaaggcttgatatgcacttaaagtgtggtaacactgaagctgccagggtattattcgaggaaatgaaacagaggaatgtggtttcatggagcacaatgattgtaggatatgcaatgaatggagatagcagagaagctttgacattgttcactacgatgcagaatgagggacttagacctaactacgtgacatttctcggggtattatctgcttgtagccacgctggactagtgaatgaaggaaaaaggtatttcagtctcatggttcagtcgaatgataagaatctggagcctagaaaagagcattatgcatgtatggttgatctattgggacgctctggtcttctagaggaggcttatgaatttatcaaaaagatgccagtggaaccagataccggtatctggggagctttgttgggtgcttgtgcagttcatcgtgatatgatattagggcagaaagtggcagacgttcttgttgaaacagctcctgatattggttcataccacgtactactgtctaatatctacgcagctgctggtaaatgggattgtgttgacaaagtaaggagtaaaatgaggaagctgggcactaaaaaggttgcagcctatagttctgttgaattcgagggcaaaatccattttttcaatagaggagacaaatcacatccgcaatcaaaggcgatatatgagaaattggatgaaatcttgaagaagataaggaaaatggggtatgttccagatacgtgttcagtatttcatgatgtggaaatggaggaaaaagaatgttctctgagtcatcacagtgagaagctcgctattgcatttggactcattaaagggagaccgggacatcctatacgggttatgaagaacttgagaacctgtgatgattgccacgctttctccaagtttgtttccagtcttacttcgacagaaatcatcatgcgagacaagaacaggtttcaccacttcaggaatggtgtctgctcttgcaaagagttctggtga

SEQ ID NO: 91442 - protein, 584 aa, Arabidopsis thaliana
  peptide (1)..(584): Ceres Seq. ID no. 12727682
  misc_feature (350)..(384): Pfam Name: PPR repeat Pfam Description: PPR repeat
  misc_feature (1)..(584): Homolog of NCBI NO: 15226299 NR Description: hypothetical protein; protein id: At2g01510.1
  misc_feature (7)..(569): Homolog of NCBI NO: 7486979 NR Description: hypothetical protein T13K14.230 - Arabidopsis
  misc_feature (28)..(584): Homolog of NCBI NO: 15220337 NR Description: hypothetical protein; protein id: At1g11290.1
  misc_feature (28)..(584): Homolog of NCBI NO: 34897884 NR Description: Similar to Arabidopsis thaliana DNA chromosome 4,
  misc_feature (28)..(584): Homolog of NCBI NO: 34394298 NR Description: putative pentatricopeptide (PPR)
  misc_feature (2)..(584): Homolog of NCBI NO: 11994419 NR Description: selenium-binding protein-like [Arabidopsis
  misc_feature (2)..(583): Homolog of NCBI NO: 15230593 NR Description: unknown protein; protein id: At3g12770.1
  misc_feature (16)..(584): Homolog of NCBI NO: 15226158 NR Description: hypothetical protein; protein id: At2g33760.1
  misc_feature (29)..(584): Homolog of NCBI NO: 15234831 NR Description: putative protein; protein id: At4g30700.1
  misc_feature (2)..(584): Homolog of NCBI NO: 34393394 NR Description: putative pentatricopeptide (PPR)
MLAKQTPLTKQMLSELLRASSSKPKQLKKIHAIVLRTGFSEKNSLLTQLLENLVVIGDMCYARQVFDEMHKPRIFLWNTLFKGYVRNQLPFESLLLYKKMRDLGVRPDEFTYPFVVKAISQLGDFSCGFALHAHVVKYGFGCLGIVATELVMMYMKFGELSSAEFLFESMQVKDLVAWNAFLAVCVQTGNSAIALEYFNKMCADAVQFDSFTVVSMLSACGQLGSLEIGEEIYDRARKEEIDCNIIVENARLDMHLKCGNTEAARVLFEEMKQRNVVSWSTMIVGYAMNGDSREALTLFTTMQNEGLRPNYVTFLGVLSACSHAGLVNEGKRYFSLMVQSNDKNLEPRKEHYACMVDLLGRSGLLEEAYEFIKKMPVEPDTGIWGALLGACAVHRDMILGQKVADVLVETAPDIGSYHVLLSNIYAAAGKWDCVDKVRSKMRKLGTKKVAAYSSVEFEGKIHFFNRGDKSHPQSKAIYEKLDEILKKIRKMGYVPDTCSVFHDVEMEEKECSLSHHSEKLAIAFGLIKGRPGHPIRVMKNLRTCDDCHAFSKFVSSLTSTEIIMRDKNRFHHFRNGVCSCKEFW

SEQ ID NO: 91443 - protein, 573 aa, Arabidopsis thaliana
  peptide (1)..(573): Ceres Seq. ID no. 12727683
  misc_feature (339)..(373): Pfam Name: PPR repeat Pfam Description: PPR repeat
  misc_feature (1)..(573): Homolog of NCBI NO: 15226299 NR Description: hypothetical protein; protein id: At2g01510.1
  misc_feature (1)..(558): Homolog of NCBI NO: 7486979 NR Description: hypothetical protein T13K14.230 - Arabidopsis
  misc_feature (17)..(573): Homolog of NCBI NO: 15220337 NR Description: hypothetical protein; protein id: At1g11290.1
  misc_feature (17)..(573): Homolog of NCBI NO: 34897884 NR Description: Similar to Arabidopsis thaliana DNA chromosome 4,
  misc_feature (17)..(573): Homolog of NCBI NO: 34394298 NR Description: putative pentatricopeptide (PPR)
  misc_feature (1)..(573): Homolog of NCBI NO: 11994419 NR Description: selenium-binding protein-like [Arabidopsis
  misc_feature (1)..(572): Homolog of NCBI NO: 15230593 NR Description: unknown protein; protein id: At3g12770.1
  misc_feature (5)..(573): Homolog of NCBI NO: 15226158 NR Description: hypothetical protein; protein id: At2g33760.1
  misc_feature (18)..(573): Homolog of NCBI NO: 15234831 NR Description: putative protein; protein id: At4g30700.1
  misc_feature (1)..(573): Homolog of NCBI NO: 34393394 NR Description: putative pentatricopeptide (PPR)
MLSELLRASSSKPKQLKKIHAIVLRTGFSEKNSLLTQLLENLVVIGDMCYARQVFDEMHKPRIFLWNTLFKGYVRNQLPFESLLLYKKMRDLGVRPDEFTYPFVVKAISQLGDFSCGFALHAHVVKYGFGCLGIVATELVMMYMKFGELSSAEFLFESMQVKDLVAWNAFLAVCVQTGNSAIALEYFNKMCADAVQFDSFTVVSMLSACGQLGSLEIGEEIYDRARKEEIDCNIIVENARLDMHLKCGNTEAARVLFEEMKQRNVVSWSTMIVGYAMNGDSREALTLFTTMQNEGLRPNYVTFLGVLSACSHAGLVNEGKRYFSLMVQSNDKNLEPRKEHYACMVDLLGRSGLLEEAYEFIKKMPVEPDTGIWGALLGACAVHRDMILGQKVADVLVETAPDIGSYHVLLSNIYAAAGKWDCVDKVRSKMRKLGTKKVAAYSSVEFEGKIHFFNRGDKSHPQSKAIYEKLDEILKKIRKMGYVPDTCSVFHDVEMEEKECSLSHHSEKLAIAFGLIKGRPGHPIRVMKNLRTCDDCHAFSKFVSSLTSTEIIMRDKNRFHHFRNGVCSCKEFW

SEQ ID NO: 91444 - protein, 526 aa, Arabidopsis thaliana
  peptide (1)..(526): Ceres Seq. ID no. 12727684
  misc_feature (292)..(326): Pfam Name: PPR repeat Pfam Description: PPR repeat
  misc_feature (1)..(526): Homolog of NCBI NO: 15226299 NR Description: hypothetical protein; protein id: At2g01510.1
  misc_feature (1)..(511): Homolog of NCBI NO: 7486979 NR Description: hypothetical protein T13K14.230 - Arabidopsis
  misc_feature (1)..(526): Homolog of NCBI NO: 15220337 NR Description: hypothetical protein; protein id: At1g11290.1
  misc_feature (1)..(526): Homolog of NCBI NO: 34897884 NR Description: Similar to Arabidopsis thaliana DNA chromosome 4,
  misc_feature (1)..(526): Homolog of NCBI NO: 34394298 NR Description: putative pentatricopeptide (PPR)
  misc_feature (1)..(526): Homolog of NCBI NO: 11994419 NR Description: selenium-binding protein-like [Arabidopsis
  misc_feature (1)..(525): Homolog of NCBI NO: 15230593 NR Description: unknown protein; protein id: At3g12770.1
  misc_feature (1)..(526): Homolog of NCBI NO: 15226158 NR Description: hypothetical protein; protein id: At2g33760.1
  misc_feature (1)..(526): Homolog of NCBI NO: 15234831 NR Description: putative protein; protein id: At4g30700.1
  misc_feature (1)..(526): Homolog of NCBI NO: 34393394 NR Description: putative pentatricopeptide (PPR)
MCYARQVFDEMHKPRIFLWNTLFKGYVRNQLPFESLLLYKKMRDLGVRPDEFTYPFVVKAISQLGDFSCGFALHAHVVKYGFGCLGIVATELVMMYMKFGELSSAEFLFESMQVKDLVAWNAFLAVCVQTGNSAIALEYFNKMCADAVQFDSFTVVSMLSACGQLGSLEIGEEIYDRARKEEIDCNIIVENARLDMHLKCGNTEAARVLFEEMKQRNVVSWSTMIVGYAMNGDSREALTLFTTMQNEGLRPNYVTFLGVLSACSHAGLVNEGKRYFSLMVQSNDKNLEPRKEHYACMVDLLGRSGLLEEAYEFIKKMPVEPDTGIWGALLGACAVHRDMILGQKVADVLVETAPDIGSYHVLLSNIYAAAGKWDCVDKVRSKMRKLGTKKVAAYSSVEFEGKIHFFNRGDKSHPQSKAIYEKLDEILKKIRKMGYVPDTCSVFHDVEMEEKECSLSHHSEKLAIAFGLIKGRPGHPIRVMKNLRTCDDCHAFSKFVSSLTSTEIIMRDKNRFHHFRNGVCSCKEFW

SEQ ID NO: 91445 - DNA, 576 bp, Arabidopsis thaliana
  misc_feature (1)..(576): Ceres Seq. ID no. 12727685
atggcagattccgacatagagacgagcagcaaccaaaatagcaatagcaacaccagccattcaactacttcaaccacgagtgttcatgttacggctctcgatgggattgtaagtgctaattctctcttcacggttgcagtctttgtcggaatctccttcgaccagccaagtgacctcaccctcacggacagaacagagtgcagtgcaggacgagacgtggaacgtgacctggttgtgtttgaagtcatctcatttgccttctttctcttctcctcccttgtggctcaagggatgaagctagccatcaaccttttgaacagcaaagaaacggacgaagtgtttaaagcgaatatcaacagagatgtgcttcgtttcggtgtggttggtgcagctggtggatctatcttgggttgtgtatttcttctgttgtcaattgttgatgttatacaactccgtctggggcttctctcttgcggcaatgctttggcgattcataccgtgctggtgcttgtggtattggtctcttctgctctcagtgtttatatcttcacagtgttctactctttcaggaaatga

SEQ ID NO: 91446 - protein, 191 aa, Arabidopsis thaliana
  peptide (1)..(191): Ceres Seq. ID no. 12727686
  misc_feature (1)..(191): Homolog of NCBI NO: 15226312 NR Description: hypothetical protein; protein id: At2g01580.1
  misc_feature (7)..(189): Homolog of NCBI NO: 18397969 NR Description: expressed protein; protein id: At3g07510.1, by cDNA: gi_13877548, supported by cDNA: gi_20148734 [Arabidopsis >gi|13877549|gb|AAK43852.1|AF370475_1 Unknown protein
  misc_feature (18)..(189): Homolog of NCBI NO: 6041846 NR Description: unknown protein [Arabidopsis thaliana]
  misc_feature (22)..(189): Homolog of NCBI NO: 37531676 NR Description: hypothetical protein [Oryza sativa (japonica group)] >gi|21671930|gb|AAM74292.1| Hypothetical protein [Oryza
  misc_feature (25)..(191): Homolog of NCBI NO: 15239293 NR Description: putative protein; protein id: At5g05950.1, by cDNA: 252000. [Arabidopsis thaliana] gene_id:K18J17.12~pir||T12959~similar to unknown protein
  misc_feature (28)..(114): Homolog of NCBI NO: 38345578 NR Description: OSJNBa0027H06.14 [Oryza sativa (japonica
  misc_feature (120)..(188): Homolog of NCBI NO: 38345578 NR Description: OSJNBa0027H06.14 [Oryza sativa (japonica
  misc_feature (26)..(191): Homolog of NCBI NO: 34395171 NR Description: unknown protein [Oryza sativa (japonica
  misc_feature (26)..(191): Homolog of NCBI NO: 34900646 NR Description: hypothetical protein~similar to Arabidopsis
  misc_feature (74)..(189): Homolog of NCBI NO: 15232676 NR Description: putative protein; protein id: At3g46890.1
MADSDIETSSNQNSNSNTSHSTTSTTSVHVTALDGIVSANSLFTVAVFVGISFDQPSDLTLTDRTECSAGRDVERDLVVFEVISFAFFLFSSLVAQGMKLAINLLNSKETDEVFKANINRDVLRFGVVGAAGGSILGCVFLLLSIVDVIQLRLGLLSCGNALAIHTVLVLVVLVSSALSVYIFTVFYSFRK

SEQ ID NO: 91447 - DNA, 1680 bp, Arabidopsis thaliana
  misc_feature (1)..(1680): Ceres Seq. ID no. 12727701
  misc_feature: MA Experiment ID: 20000180 Result: Down-regulated in Transcription
  misc_feature: MA Experiment 20000180 PARAMETER Experiment Name: At_Germinating_Seeds_P Parameter: Age (hr) Value: 24 vs. 0
  misc_feature: MA Experiment 20000180 PARAMETER Experiment Name: At_Germinating_Seeds_P Parameter: Tissue Value: Germinating Seeds
  misc_feature: MA Experiment ID: 20001558 Result: Up-regulated in Transcription
  misc_feature: MA Experiment 20001558 PARAMETER Experiment Name: At_Drought_Soil_Dry_P Parameter: Age (day) Value: 27
  misc_feature: MA Experiment 20001558 PARAMETER Experiment Name: At_Drought_Soil_Dry_P Parameter: Organism Value: A. thaliana
  misc_feature: MA Experiment 20001558 PARAMETER Experiment Name: At_Drought_Soil_Dry_P Parameter: Plant Line Value: WS
  misc_feature: MA Experiment 20001558 PARAMETER Experiment Name: At_Drought_Soil_Dry_P Parameter: Post Timepoint (hr) Value: 6
  misc_feature: MA Experiment 20001558 PARAMETER Experiment Name: At_Drought_Soil_Dry_P Parameter: Post-Treatment Value: Re-Water vs. No Drought
  misc_feature: MA Experiment 20001558 PARAMETER Experiment Name: At_Drought_Soil_Dry_P Parameter: Timepoint (day) Value: 13
  misc_feature: MA Experiment 20001558 PARAMETER Experiment Name: At_Drought_Soil_Dry_P Parameter: Treatment Value: Drought vs. No Drought
atggtcagagaagctcttcaatttctttctcgcctgagaaaatcctcgaatctcccagacccattcacctgcaacaagcatattcatcagctaatcaattccaattgcggcattctatctctcaaattcttagcttacttagtctccagaggttacactcctcatcgttcttcattcaattcggtcgtatcgtttgtttgtaaactagggcaagttaaattcgctgaagatatcgttcactcgatgcctagattcgggtgtgaaccagatgttatatcttataactctctcattgatgggcattgtagaaatggagatatcagaagtgctagtttggttttagagagtttaagagcctctcatgggtttatctgcaagcctgacatagttagttttaattctctgtttaatgggtttagcaagatgaagatgttagatgaggtttttgtgtatatgggtgttatgttgaagtgttgttcgccgaatgttgttacttatagtacttggatcgacacgttctgcaaatccggggagttgcagttggcgttgaagagttttcactctatgaagagagatgctttatctccaaatgtggttactttcacttgtttgattgatgggtactgtaaagctggtgacttggaggttgcggtttcgttatacaaagaaatgagacgcgttcggatgtctttgaatgttgttacttatactgctttgatagatggtttctgcaagaagggggaaatgcagagagctgaggaaatgtattcaaggatggtcgaggatagagttgagccaaactctcttgtatacactacgattatcgatggtttttttcagagaggagattcggataatgccatgaagtttctggccaaaatgctcaatcaagggatgagacttgatataacagcttacggcgtaatcatatcaggcctttgtggtaatggtaaactaaaggaggcaactgagattgtagaagatatggagaaaagtgatttagttcctgatatggtgatttttactacaatgatgaatgcatattttaaatccggacgcatgaaggctgcggttaacatgtaccacaaattaattgagagaggctttgagcccgatgttgtagctctttcgactatgatcgatgggattgcgaagaatggacaactacatgaagctatagtttatttctgtatagagaaagctaatgatgttatgtacactgtgcttattgatgctttgtgcaaagaaggagactttatagaagttgagagattgtttagtaaaatctcagaggctggacttgttccagataagttcatgtacacttcttggatagctggtttgtgtaagcaagggaatttggtggatgcgtttaagttaaaaaccagaatggttcaggaaggtcttttgcttgatttgttagcctatactacattgatttacgggctagctagcaagggtttgatggttgaggcaagacaagttttcgatgaaatgttgaatagcggaataagtcctgattcggctgtttttgatctcttgattagagcttatgaaaaggagggaaacatggccgctgcttcggatttgcttcttgatatgcagagaagggggcttgtaacagcagtaagtgatgcggattgcagcaaacagtgtggcaatgaagtgaactgttcgtga

SEQ ID NO: 91448 - protein, 559 aa, Arabidopsis thaliana
  peptide (1)..(559): Ceres Seq. ID no. 12727702
  misc_feature (57)..(91): Pfam Name: PPR repeat Pfam Description: PPR repeat
  misc_feature (1)..(559): Homolog of NCBI NO: 15226343 NR Description: hypothetical protein; protein id: At2g01740.1
  misc_feature (1)..(545): Homolog of NCBI NO: 25410964 NR Description: hypothetical protein At2g02150 [imported] - thaliana >gi|4038037|gb|AAC97219.1| hypothetical protein
  misc_feature (1)..(545): Homolog of NCBI NO: 30677982 NR Description: pentatricopeptide (PPR) repeat-containing protein
  misc_feature (1)..(512): Homolog of NCBI NO: 15221232 NR Description: putative indole-3-acetate protein id: At1g05670.1 [Arabidopsis thaliana]
  misc_feature (2)..(540): Homolog of NCBI NO: 18407744 NR Description: expressed protein; protein id: At1g63150.1, by cDNA: gi_15810426 [Arabidopsis thaliana]
  misc_feature (31)..(539): Homolog of NCBI NO: 32527604 NR Description: pentatricopeptide repeat-containing protein
  misc_feature (58)..(535): Homolog of NCBI NO: 22531122 NR Description: putative membrane-associated salt-inducible
  misc_feature (58)..(535): Homolog of NCBI NO: 15221515 NR Description: putative membrane-associated salt-inducible (AL021637); similar to EST gb|AA728420; protein id: At1g62590.1
  misc_feature (4)..(556): Homolog of NCBI NO: 15221635 NR Description: unknown protein; protein id: At1g62930.1
  misc_feature (4)..(540): Homolog of NCBI NO: 25404380 NR Description: hypothetical protein F16P17.7 [imported] - thaliana >gi|8493580|gb|AAF75803.1|AC011000_6 Contains weak to leaf protein from Ipomea nil gb|D85101 and contains a RepB
MVREALQFLSRLRKSSNLPDPFTCNKHIHQLINSNCGILSLKFLAYLVSRGYTPHRSSFNSVVSFVCKLGQVKFAEDIVHSMPRFGCEPDVISYNSLIDGHCRNGDIRSASLVLESLRASHGFICKPDIVSFNSLFNGFSKMKMLDEVFVYMGVMLKCCSPNVVTYSTWIDTFCKSGELQLALKSFHSMKRDALSPNVVTFTCLIDGYCKAGDLEVAVSLYKEMRRVRMSLNVVTYTALIDGFCKKGEMQRAEEMYSRMVEDRVEPNSLVYTTIIDGFFQRGDSDNAMKFLAKMLNQGMRLDITAYGVIISGLCGNGKLKEATEIVEDMEKSDLVPDMVIFTTMMNAYFKSGRMKAAVNMYHKLIERGFEPDVVALSTMIDGIAKNGQLHEAIVYFCIEKANDVMYTVLIDALCKEGDFIEVERLFSKISEAGLVPDKFMYTSWIAGLCKQGNLVDAFKLKTRMVQEGLLLDLLAYTTLIYGLASKGLMVEARQVFDEMLNSGISPDSAVFDLLIRAYEKEGNMAAASDLLLDMQRRGLVTAVSDADCSKQCGNEVNCS

SEQ ID NO: 91449 - protein, 478 aa, Arabidopsis thaliana
  peptide (1)..(478): Ceres Seq. ID no. 12727703
  misc_feature (1)..(478): Homolog of NCBI NO: 15226343 NR Description: hypothetical protein; protein id: At2g01740.1
  misc_feature (1)..(464): Homolog of NCBI NO: 25410964 NR Description: hypothetical protein At2g02150 [imported] - thaliana >gi|4038037|gb|AAC97219.1| hypothetical protein
  misc_feature (1)..(464): Homolog of NCBI NO: 30677982 NR Description: pentatricopeptide (PPR) repeat-containing protein
  misc_feature (1)..(431): Homolog of NCBI NO: 15221232 NR Description: putative indole-3-acetate protein id: At1g05670.1 [Arabidopsis thaliana]
  misc_feature (1)..(459): Homolog of NCBI NO: 18407744 NR Description: expressed protein; protein id: At1g63150.1, by cDNA: gi_15810426 [Arabidopsis thaliana]
  misc_feature (1)..(458): Homolog of NCBI NO: 32527604 NR Description: pentatricopeptide repeat-containing protein
  misc_feature (1)..(454): Homolog of NCBI NO: 22531122 NR Description: putative membrane-associated salt-inducible
  misc_feature (1)..(454): Homolog of NCBI NO: 15221515 NR Description: putative membrane-associated salt-inducible (AL021637); similar to EST gb|AA728420; protein id: At1g62590.1
  misc_feature (1)..(475): Homolog of NCBI NO: 15221635 NR Description: unknown protein; protein id: At1g62930.1
  misc_feature (1)..(459): Homolog of NCBI NO: 25404380 NR Description: hypothetical protein F16P17.7 [imported] - thaliana >gi|8493580|gb|AAF75803.1|AC011000_6 Contains weak to leaf protein from Ipomea nil gb|D85101 and contains a RepB
MPRFGCEPDVISYNSLIDGHCRNGDIRSASLVLESLRASHGFICKPDIVSFNSLFNGFSKMKMLDEVFVYMGVMLKCCSPNVVTYSTWIDTFCKSGELQLALKSFHSMKRDALSPNVVTFTCLIDGYCKAGDLEVAVSLYKEMRRVRMSLNVVTYTALIDGFCKKGEMQRAEEMYSRMVEDRVEPNSLVYTTIIDGFFQRGDSDNAMKFLAKMLNQGMRLDITAYGVIISGLCGNGKLKEATEIVEDMEKSDLVPDMVIFTTMMNAYFKSGRMKAAVNMYHKLIERGFEPDVVALSTMIDGIAKNGQLHEAIVYFCIEKANDVMYTVLIDALCKEGDFIEVERLFSKISEAGLVPDKFMYTSWIAGLCKQGNLVDAFKLKTRMVQEGLLLDLLAYTTLIYGLASKGLMVEARQVFDEMLNSGISPDSAVFDLLIRAYEKEGNMAAASDLLLDMQRRGLVTAVSDADCSKQCGNEVNCS

SEQ ID NO: 91450 - protein, 418 aa, Arabidopsis thaliana
  peptide (1)..(418): Ceres Seq. ID no. 12727704
  misc_feature (1)..(418): Homolog of NCBI NO: 15226343 NR Description: hypothetical protein; protein id: At2g01740.1
  misc_feature (1)..(404): Homolog of NCBI NO: 25410964 NR Description: hypothetical protein At2g02150 [imported] - thaliana >gi|4038037|gb|AAC97219.1| hypothetical protein
  misc_feature (1)..(404): Homolog of NCBI NO: 30677982 NR Description: pentatricopeptide (PPR) repeat-containing protein
  misc_feature (1)..(371): Homolog of NCBI NO: 15221232 NR Description: putative indole-3-acetate protein id: At1g05670.1 [Arabidopsis thaliana]
  misc_feature (1)..(399): Homolog of NCBI NO: 18407744 NR Description: expressed protein; protein id: At1g63150.1, by cDNA: gi_15810426 [Arabidopsis thaliana]
  misc_feature (1)..(398): Homolog of NCBI NO: 32527604 NR Description: pentatricopeptide repeat-containing protein
  misc_feature (1)..(394): Homolog of NCBI NO: 22531122 NR Description: putative membrane-associated salt-inducible
  misc_feature (1)..(394): Homolog of NCBI NO: 15221515 NR Description: putative membrane-associated salt-inducible (AL021637); similar to EST gb|AA728420; protein id: At1g62590.1
  misc_feature (1)..(415): Homolog of NCBI NO: 15221635 NR Description: unknown protein; protein id: At1g62930.1
  misc_feature (1)..(399): Homolog of NCBI NO: 25404380 NR Description: hypothetical protein F16P17.7 [imported] - thaliana >gi|8493580|gb|AAF75803.1|AC011000_6 Contains weak to leaf protein from Ipomea nil gb|D85101 and contains a RepB
MKMLDEVFVYMGVMLKCCSPNVVTYSTWIDTFCKSGELQLALKSFHSMKRDALSPNVVTFTCLIDGYCKAGDLEVAVSLYKEMRRVRMSLNVVTYTALIDGFCKKGEMQRAEEMYSRMVEDRVEPNSLVYTTIIDGFFQRGDSDNAMKFLAKMLNQGMRLDITAYGVIISGLCGNGKLKEATEIVEDMEKSDLVPDMVIFTTMMNAYFKSGRMKAAVNMYHKLIERGFEPDVVALSTMIDGIAKNGQLHEAIVYFCIEKANDVMYTVLIDALCKEGDFIEVERLFSKISEAGLVPDKFMYTSWIAGLCKQGNLVDAFKLKTRMVQEGLLLDLLAYTTLIYGLASKGLMVEARQVFDEMLNSGISPDSAVFDLLIRAYEKEGNMAAASDLLLDMQRRGLVTAVSDADCSKQCGNEVNCS

SEQ ID NO: 91451 - DNA, 1214 bp, Arabidopsis thaliana
  misc_feature (1)..(1214): Ceres Seq. ID no. 12727733
  misc_feature: MA Experiment ID: 20000307 Result: Up-regulated in Transcription
  misc_feature: MA Experiment 20000307 PARAMETER Experiment Name: At_Germinating_Seeds_Sub_P Parameter: Age (hr) Value: 24 vs. 0
  misc_feature: MA Experiment 20000307 PARAMETER Experiment Name: At_Germinating_Seeds_Sub_P Parameter: Organism Value: A. thaliana
  misc_feature: MA Experiment 20000307 PARAMETER Experiment Name: At_Germinating_Seeds_Sub_P Parameter: Plant Line Value: WS
  misc_feature: MA Experiment 20000307 PARAMETER Experiment Name: At_Germinating_Seeds_Sub_P Parameter: Tissue Value: Germinating Seeds
  misc_feature: MA Experiment ID: 20000314 Result: Up-regulated in Transcription
  misc_feature: MA Experiment 20000314 PARAMETER Experiment Name: At_14day_Shoots-Roots_Sub_P Parameter: Age (day) Value: 14
  misc_feature: MA Experiment 20000314 PARAMETER Experiment Name: At_14day_Shoots-Roots_Sub_P Parameter: Organism Value: A. thaliana
  misc_feature: MA Experiment 20000314 PARAMETER Experiment Name: At_14day_Shoots-Roots_Sub_P Parameter: Plant Line Value: WS
  misc_feature: MA Experiment 20000314 PARAMETER Experiment Name: At_14day_Shoots-Roots_Sub_P Parameter: Tissue Value: Roots vs. Whole Plant
  misc_feature: MA Experiment ID: 20000315 Result: Up-regulated in Transcription
  misc_feature: MA Experiment 20000315 PARAMETER Experiment Name: At_14day_Shoots-Roots_Sub_P Parameter: Age (day) Value: 14
  misc_feature: MA Experiment 20000315 PARAMETER Experiment Name: At_14day_Shoots-Roots_Sub_P Parameter: Organism Value: A. thaliana
  misc_feature: MA Experiment 20000315 PARAMETER Experiment Name: At_14day_Shoots-Roots_Sub_P Parameter: Plant Line Value: WS
  misc_feature: MA Experiment 20000315 PARAMETER Experiment Name: At_14day_Shoots-Roots_Sub_P Parameter: Tissue Value: Shoots vs. Whole Plant
  misc_feature: MA Experiment ID: 20000327 Result: Down-regulated in Transcription
  misc_feature: MA Experiment 20000327 PARAMETER Experiment Name: At_42deg_Heat_Sub_P Parameter: Age (day) Value: 14
  misc_feature: MA Experiment 20000327 PARAMETER Experiment Name: At_42deg_Heat_Sub_P Parameter: Organism Value: A. thaliana
  misc_feature: MA Experiment 20000327 PARAMETER Experiment Name: At_42deg_Heat_Sub_P Parameter: Plant Line Value: WS
  misc_feature: MA Experiment 20000327 PARAMETER Experiment Name: At_42deg_Heat_Sub_P Parameter: Temperature (deg C) Value: 42 vs. 22
  misc_feature: MA Experiment 20000327 PARAMETER Experiment Name: At_42deg_Heat_Sub_P Parameter: Timepoint (hr) Value: 1
  misc_feature: MA Experiment 20000327 PARAMETER Experiment Name: At_42deg_Heat_Sub_P Parameter: Tissue Value: Aerial
  misc_feature: MA Experiment ID: 20000328 Result: Down-regulated in Transcription
  misc_feature: MA Experiment 20000328 PARAMETER Experiment Name: At_42deg_Heat_Sub_P Parameter: Age (day) Value: 14
  misc_feature: MA Experiment 20000328 PARAMETER Experiment Name: At_42deg_Heat_Sub_P Parameter: Organism Value: A. thaliana
  misc_feature: MA Experiment 20000328 PARAMETER Experiment Name: At_42deg_Heat_Sub_P Parameter: Plant Line Value: WS
  misc_feature: MA Experiment 20000328 PARAMETER Experiment Name: At_42deg_Heat_Sub_P Parameter: Temperature (deg C) Value: 42 vs. 22
  misc_feature: MA Experiment 20000328 PARAMETER Experiment Name: At_42deg_Heat_Sub_P Parameter: Timepoint (hr) Value: 6
  misc_feature: MA Experiment 20000328 PARAMETER Experiment Name: At_42deg_Heat_Sub_P Parameter: Tissue Value: Aerial
  misc_feature: MA Experiment ID: 20000355 Result: Down-regulated in Transcription
  misc_feature: MA Experiment 20000355 PARAMETER Experiment Name: At_Siliques_Sub_P Parameter: Age (day) Value: 21
  misc_feature: MA Experiment 20000355 PARAMETER Experiment Name: At_Siliques_Sub_P Parameter: Organism Value: A. thaliana
  misc_feature: MA Experiment 20000355 PARAMETER Experiment Name: At_Siliques_Sub_P Parameter: Plant Line Value: WS
  misc_feature: MA Experiment 20000355 PARAMETER Experiment Name: At_Siliques_Sub_P Parameter: Tissue Value: Less Than 5mm Siliques vs. Whole Plant
  misc_feature: MA Experiment ID: 20000440 Result: Down-regulated in Transcription
  misc_feature: MA Experiment 20000440 PARAMETER Experiment Name: At_Closed-Flower__Sub_P Parameter: Tissue Value: Closed Flower vs. Whole Plant
aggtccatcacctcttacattttttctccaaagtctctcaatggatagcttgagagatgttaagcctatcaaactcatattttctattttctgtctagttattatactatccgcctgtaattcaacggcagagctaccgcggttcgtccaaccaccagaacccgatggttcactcagttttctcgttgtcggcgactggggaagaagaggttcttataatcagtcccaagtagctcttcagatgggaaaaatagggaaggacttaaatattgatttcctcatttcgactggagataacttttatgatgatggaataatcagtccatatgattctcaatttcaagattcgtttaccaatatttacacagcaactagcttacaaaaaccatggtacaatgtattaggaaatcatgattatagaggtaacgtctatgcgcaactcagccccatactcagggatttggactgccgttggatttgtttaagatcttatgttgttaacgccgagattgtcgatattttcttcgtggatacaacaccgttcgtagatagatattttgatgaaccaaaggaccatgtatatgattggagaggcgtattaccgagaaataaataccttaacagtctcttaacggatgtggatgtggcattgcaagaatcaatggctaaatggaaaatagtggtaggccatcacacgatcaaaagtgcaggtcaccacggaaataccatagagcttgagaaacaacttttacctatcctcgaggctaatgaagtggatctctatataaacgggcatgatcattgcttggagcacataagcagcatcaacagtggaatacaatttatgacaagtggaggtggctccaaggcgtggaaaggagatgtgaatgattggaacccacaagagatgaggttttactatgatggacaaggattcatgtcggtttacacatccgaagctgaactacgcgtcgttttctatgatggtcttggtcacgttttgcatcgatggagcactcttaagaatggggtttattccgatatctaatcgatggtcagacaaaaaagtagttaagagttacgacataattatttatattaattagtccattgtttattatgttgatatttcatgtgagttaaacattttttaatgttgtgtgattattttcgaattcttaatggtatcttaatacatggagacatatcttctc

SEQ ID NO: 91452 - protein, 348 aa, Arabidopsis thaliana
  peptide (1)..(348): Ceres Seq. ID no. 12727734
  misc_feature (58)..(269): Pfam Name: Calcineurin-like phosphoesterase Pfam Description: Calcineurin-like phosphoesterase
  misc_feature (14)..(348): Homolog of NCBI NO: 22325419 NR Description: putative purple acid phosphatase; protein id: supported by cDNA: gi_17529295, supported by cDNA: gi_20257478 thaliana] >gi|17529296|gb|AAL38875.1| putative purple acid
  misc_feature (14)..(348): Homolog of NCBI NO: 25752251 NR Description: probable acid phosphatase (EC 3.1.3.2) At2g01890
  misc_feature (14)..(322): Homolog of NCBI NO: 6635445 NR Description: putative purple acid phosphatase precursor
  misc_feature (5)..(345): Homolog of NCBI NO: 30683951 NR Description: calcineurin-like phosphoesterase family thaliana] >gi|24030193|gb|AAN41277.1| putative purple acid
  misc_feature (5)..(345): Homolog of NCBI NO: 30911094 NR Description: putative purple acid phosphatase [Arabidopsis
  misc_feature (5)..(345): Homolog of NCBI NO: 25752249 NR Description: probable acid phosphatase (EC 3.1.3.2) F10B6.10
  misc_feature (14)..(341): Homolog of NCBI NO: 22329781 NR Description: hypothetical protein; protein id: At1g25230.1, by cDNA: gi_17978996 [Arabidopsis thaliana] At1g25230/F4F7_8 [Arabidopsis thaliana]
GPSPLTFFLQSLSMDSLRDVKPIKLIFSIFCLVIILSACNSTAELPRFVQPPEPDGSLSFLVVGDWGRRGSYNQSQVALQMGKIGKDLNIDFLISTGDNFYDDGIISPYDSQFQDSFTNIYTATSLQKPWYNVLGNHDYRGNVYAQLSPILRDLDCRWICLRSYVVNAEIVDIFFVDTTPFVDRYFDEPKDHVYDWRGVLPRNKYLNSLLTDVDVALQESMAKWKIVVGHHTIKSAGHHGNTIELEKQLLPILEANEVDLYINGHDHCLEHISSINSGIQFMTSGGGSKAWKGDVNDWNPQEMRFYYDGQGFMSVYTSEAELRVVFYDGLGHVLHRWSTLKNGVYSDI

SEQ ID NO: 91453 - protein, 335 aa, Arabidopsis thaliana
  peptide (1)..(335): Ceres Seq. ID no. 12727735
  misc_feature (45)..(256): Pfam Name: Calcineurin-like phosphoesterase Pfam Description: Calcineurin-like phosphoesterase
  misc_feature (1)..(335): Homolog of NCBI NO: 22325419 NR Description: putative purple acid phosphatase; protein id: supported by cDNA: gi_17529295, supported by cDNA: gi_20257478 thaliana] >gi|17529296|gb|AAL38875.1| putative purple acid
  misc_feature (1)..(335): Homolog of NCBI NO: 25752251 NR Description: probable acid phosphatase (EC 3.1.3.2) At2g01890
  misc_feature (1)..(309): Homolog of NCBI NO: 6635445 NR Description: putative purple acid phosphatase precursor
  misc_feature (1)..(332): Homolog of NCBI NO: 30683951 NR Description: calcineurin-like phosphoesterase family thaliana] >gi|24030193|gb|AAN41277.1| putative purple acid
  misc_feature (1)..(332): Homolog of NCBI NO: 30911094 NR Description: putative purple acid phosphatase [Arabidopsis
  misc_feature (1)..(332): Homolog of NCBI NO: 25752249 NR Description: probable acid phosphatase (EC 3.1.3.2) F10B6.10
  misc_feature (1)..(328): Homolog of NCBI NO: 22329781 NR Description: hypothetical protein; protein id: At1g25230.1, by cDNA: gi_17978996 [Arabidopsis thaliana] At1g25230/F4F7_8 [Arabidopsis thaliana]
MDSLRDVKPIKLIFSIFCLVIILSACNSTAELPRFVQPPEPDGSLSFLVVGDWGRRGSYNQSQVALQMGKIGKDLNIDFLISTGDNFYDDGIISPYDSQFQDSFTNIYTATSLQKPWYNVLGNHDYRGNVYAQLSPILRDLDCRWICLRSYVVNAEIVDIFFVDTTPFVDRYFDEPKDHVYDWRGVLPRNKYLNSLLTDVDVALQESMAKWKIVVGHHTIKSAGHHGNTIELEKQLLPILEANEVDLYINGHDHCLEHISSINSGIQFMTSGGGSKAWKGDVNDWNPQEMRFYYDGQGFMSVYTSEAELRVVFYDGLGHVLHRWSTLKNGVYSDI

SEQ ID NO: 91454 - protein, 268 aa, Arabidopsis thaliana
  peptide (1)..(268): Ceres Seq. ID no. 12727736
  misc_feature (1)..(189): Pfam Name: Calcineurin-like phosphoesterase Pfam Description: Calcineurin-like phosphoesterase
  misc_feature (1)..(268): Homolog of NCBI NO: 22325419 NR Description: putative purple acid phosphatase; protein id: supported by cDNA: gi_17529295, supported by cDNA: gi_20257478 thaliana] >gi|17529296|gb|AAL38875.1| putative purple acid
  misc_feature (1)..(268): Homolog of NCBI NO: 25752251 NR Description: probable acid phosphatase (EC 3.1.3.2) At2g01890
  misc_feature (1)..(242): Homolog of NCBI NO: 6635445 NR Description: putative purple acid phosphatase precursor
  misc_feature (1)..(265): Homolog of NCBI NO: 30683951 NR Description: calcineurin-like phosphoesterase family thaliana] >gi|24030193|gb|AAN41277.1| putative purple acid
  misc_feature (1)..(265): Homolog of NCBI NO: 30911094 NR Description: putative purple acid phosphatase [Arabidopsis
  misc_feature (1)..(265): Homolog of NCBI NO: 25752249 NR Description: probable acid phosphatase (EC 3.1.3.2) F10B6.10
  misc_feature (1)..(261): Homolog of NCBI NO: 22329781 NR Description: hypothetical protein; protein id: At1g25230.1, by cDNA: gi_17978996 [Arabidopsis thaliana] At1g25230/F4F7_8 [Arabidopsis thaliana]
MGKIGKDLNIDFLISTGDNFYDDGIISPYDSQFQDSFTNIYTATSLQKPWYNVLGNHDYRGNVYAQLSPILRDLDCRWICLRSYVVNAEIVDIFFVDTTPFVDRYFDEPKDHVYDWRGVLPRNKYLNSLLTDVDVALQESMAKWKIVVGHHTIKSAGHHGNTIELEKQLLPILEANEVDLYINGHDHCLEHISSINSGIQFMTSGGGSKAWKGDVNDWNPQEMRFYYDGQGFMSVYTSEAELRVVFYDGLGHVLHRWSTLKNGVYSDI

SEQ ID NO: 91455 - DNA, 1827 bp, Arabidopsis thaliana
  misc_feature (1)..(1827): Ceres Seq. ID no. 12727741
  misc_feature: MA Experiment ID: 20000180 Result: Up-regulated in Transcription
  misc_feature: MA Experiment 20000180 PARAMETER Experiment Name: At_Germinating_Seeds_P Parameter: Age (hr) Value: 24 vs. 0
  misc_feature: MA Experiment 20000180 PARAMETER Experiment Name: At_Germinating_Seeds_P Parameter: Tissue Value: Germinating Seeds
  misc_feature: MA Experiment ID: 20000437 Result: Down-regulated in Transcription
  misc_feature: MA Experiment 20000437 PARAMETER Experiment Name: At_Drought_P Parameter: Age (day) Value: 8
  misc_feature: MA Experiment 20000437 PARAMETER Experiment Name: At_Drought_P Parameter: Organism Value: A. thaliana
  misc_feature: MA Experiment 20000437 PARAMETER Experiment Name: At_Drought_P Parameter: Plant Line Value: WS
  misc_feature: MA Experiment 20000437 PARAMETER Experiment Name: At_Drought_P Parameter: Timepoint (hr) Value: 24
  misc_feature: MA Experiment 20000437 PARAMETER Experiment Name: At_Drought_P Parameter: Tissue Value: Whole Plant
  misc_feature: MA Experiment 20000437 PARAMETER Experiment Name: At_Drought_P Parameter: Treatment Value: Drought vs. No Drought
  misc_feature: MA Experiment ID: 20001904 Result: Down-regulated in Transcription
  misc_feature: MA Experiment 20001904 PARAMETER Experiment Name: At_Drought_Reproduction_P Parameter: Age (day) Value: 37
  misc_feature: MA Experiment 20001904 PARAMETER Experiment Name: At_Drought_Reproduction_P Parameter: Organism Value: A. thaliana
  misc_feature: MA Experiment 20001904 PARAMETER Experiment Name: At_Drought_Reproduction_P Parameter: Plant Line Value: WS
  misc_feature: MA Experiment 20001904 PARAMETER Experiment Name: At_Drought_Reproduction_P Parameter: Timepoint (day) Value: 7
  misc_feature: MA Experiment 20001904 PARAMETER Experiment Name: At_Drought_Reproduction_P Parameter: Tissue Value: Rosettes
  misc_feature: MA Experiment 20001904 PARAMETER Experiment Name: At_Drought_Reproduction_P Parameter: Treatment Value: Drought vs. No Drought
  misc_feature: MA Experiment ID: 20001905 Result: Down-regulated in Transcription
  misc_feature: MA Experiment 20001905 PARAMETER Experiment Name: At_Drought_Reproduction_P Parameter: Age (day) Value: 40
  misc_feature: MA Experiment 20001905 PARAMETER Experiment Name: At_Drought_Reproduction_P Parameter: Organism Value: A. thaliana
  misc_feature: MA Experiment 20001905 PARAMETER Experiment Name: At_Drought_Reproduction_P Parameter: Plant Line Value: WS
  misc_feature: MA Experiment 20001905 PARAMETER Experiment Name: At_Drought_Reproduction_P Parameter: Timepoint (day) Value: 10
  misc_feature: MA Experiment 20001905 PARAMETER Experiment Name: At_Drought_Reproduction_P Parameter: Tissue Value: Rosettes
  misc_feature: MA Experiment 20001905 PARAMETER Experiment Name: At_Drought_Reproduction_P Parameter: Treatment Value: Drought vs. No Drought
  misc_feature: MA Experiment ID: 20001906 Result: Down-regulated in Transcription
  misc_feature: MA Experiment 20001906 PARAMETER Experiment Name: At_Drought_Reproduction_P Parameter: Age (day) Value: 35
  misc_feature: MA Experiment 20001906 PARAMETER Experiment Name: At_Drought_Reproduction_P Parameter: Organism Value: A. thaliana
  misc_feature: MA Experiment 20001906 PARAMETER Experiment Name: At_Drought_Reproduction_P Parameter: Plant Line Value: WS
  misc_feature: MA Experiment 20001906 PARAMETER Experiment Name: At_Drought_Reproduction_P Parameter: Timepoint (day) Value: 5
  misc_feature: MA Experiment 20001906 PARAMETER Experiment Name: At_Drought_Reproduction_P Parameter: Tissue Value: Siliques
  misc_feature: MA Experiment 20001906 PARAMETER Experiment Name: At_Drought_Reproduction_P Parameter: Treatment Value: Drought vs. No Drought
atgctggaaattggaagtcccaatgctctgtttttccgtacgaatactacttgtaataatcttctccgtgagcttcagaaaatatgggttgaaattggtgagactgagactgagaaagatagaatgcttatggaattagagagagaatgtcttcaaatctatcaaagaaaagttgatgaggctgcaaattctaaggcaaagcttcatcagtctgttgcatcaatagaagctgaagttgcttctttaatggctgcccttggtgtgttaaacatcaactcaccgattaaactggataaaggttcaaaatcattgaaagaaaagcttgcagctgtgacacctctagttgaggaattgagaattcaaaaagaggagagaatgaagcagttttccgatataaaggcgcaaattgagaagattagtggggaaatctcaggatacagtgaccatctcaacaaggccatgaacatttcattgactcttgaagaacaagacttgactttgaggaaccttaacgagtatcaaacacatctccgcacacttcaaaaggaaaagtctgatcgtctcaacaaagtgttgggttatgtcaacgaagtccacgcactatgcggtgttcttggagttgactttagtcaaacagttagtgcagttcatccaagcttgcatagaacagaccaagagcaatctacaaacattagtgatagcacattagagggtcttgagcacatgattcaaaagcttaaaactgaaagaaaatcccgatttcaaaagctaaaggatgtagtggcttcactcttcgagctatggaatctaatggacacaccacaggaagacagaactaaatttgggaaagttacttatgttgtaagatcatctgaagctaatatcactgagccgggaatcctttcgaccgaaacaattgaacaggtatctacggaagtggacagtctcagtaaactgaaagcaagcagaatgaaggagcttgtaatgaaacgaagatccgagttagaggatctttgcagactaactcacattcaacctgacacaagcacttccgctgagaaatcaacggcattaatagattctggattagtggacccttcagagcttcttgcaaatattgaaatgcaaataaacaaaattaaagacgaagcacagagtcgaaaagatatcatggacagaattgaccgttggctctctgcatgtgaagaagaaaattggctggaagagtataatctggatgagaaccggtatagtgctggaagagggggacatgtaaacctcaagcgtgcagagcgagctcgggttacaatcaataagatccccggaatggttgacactcttatcaagaaaacacttgtgtgggaagaagacatgcagaagtcatttctatacgacggtgttcgattggttaacatactagaagactataaactgacaaggaaacaacaggaagaggaaaagaaaagatacagggatcaaaagaagaggcaggatctcctactaacccaaagggaatccatttacggatcaaaaccgagtccaagaagaagcagcagcttcagaaagcccaatggtttcaacattagcaatgggaatggttcagtgcctcccacgcctcgtagaggctcggtagggacaacaactcctgacgttcttctaaccccaagatcttactctggtcatcatcgccaaaacgggtatttcaaagaagttagaagactctctactactcccttaaactatgtggccatgcaaaaggaagatactgtttctactacctacacatcgatttatagctctgagccagactcgcctctccaaggctga

SEQ ID NO: 91456 - protein, 608 aa, Arabidopsis thaliana
  peptide (1)..(608): Ceres Seq. ID no. 12727742
  misc_feature (38)..(605): Pfam Name: Microtubule associated protein (MAP65/ASE1 family) Pfam Description: Microtubule associated protein (MAP65/ASE1
  misc_feature (42)..(608): Homolog of NCBI NO: 30677965 NR Description: microtubule associated protein (MAP65/ASE1)
  misc_feature (1)..(606): Homolog of NCBI NO: 21539547 NR Description: unknown protein [Arabidopsis thaliana]
  misc_feature (16)..(606): Homolog of NCBI NO: 27357984 NR Description: Unknown protein [Oryza sativa (japonica
  misc_feature (19)..(606): Homolog of NCBI NO: 8778239 NR Description: F10B6.9 [Arabidopsis thaliana]
  misc_feature (18)..(586): Homolog of NCBI NO: 28301942 NR Description: unknown protein [Oryza sativa (japonica
  misc_feature (26)..(257): Homolog of NCBI NO: 15223872 NR Description: hypothetical protein; protein id: At1g14690.1
  misc_feature (475)..(605): Homolog of NCBI NO: 15223872 NR Description: hypothetical protein; protein id: At1g14690.1
  misc_feature (17)..(605): Homolog of NCBI NO: 15240485 NR Description: putative protein; protein id: At5g55230.1 thaliana] >gi|9758120|dbj|BAB08592.1| similarity to unknown protein [Arabidopsis thaliana]
  misc_feature (16)..(605): Homolog of NCBI NO: 11558252 NR Description: microtubule-associated protein MAP65-1a
  misc_feature (1)..(591): Homolog of NCBI NO: 11558254 NR Description: microtubule-associated protein MAP65-1b
MLEIGSPNALFFRTNTTCNNLLRELQKIWVEIGETETEKDRMLMELERECLQIYQRKVDEAANSKAKLHQSVASIEAEVASLMAALGVLNINSPIKLDKGSKSLKEKLAAVTPLVEELRIQKEERMKQFSDIKAQIEKISGEISGYSDHLNKAMNISLTLEEQDLTLRNLNEYQTHLRTLQKEKSDRLNKVLGYVNEVHALCGVLGVDFSQTVSAVHPSLHRTDQEQSTNISDSTLEGLEHMIQKLKTERKSRFQKLKDVVASLFELWNLMDTPQEDRTKFGKVTYVVRSSEANITEPGILSTETIEQVSTEVDSLSKLKASRMKELVMKRRSELEDLCRLTHIQPDTSTSAEKSTALIDSGLVDPSELLANIEMQINKIKDEAQSRKDIMDRIDRWLSACEEENWLEEYNLDENRYSAGRGGHVNLKRAERARVTINKIPGMVDTLIKKTLVWEEDMQKSFLYDGVRLVNILEDYKLTRKQQEEEKKRYRDQKKRQDLLLTQRESIYGSKPSPRRSSSFRKPNGFNISNGNGSVPPTPRRGSVGTTTPDVLLTPRSYSGHHRQNGYFKEVRRLSTTPLNYVAMQKEDTVSTTYTSIYSSEPDSPLQG

SEQ ID NO: 91457 - protein, 567 aa, Arabidopsis thaliana
  peptide (1)..(567): Ceres Seq. ID no. 12727743
  misc_feature (1)..(564): Pfam Name: Microtubule associated protein (MAP65/ASE1 family) Pfam Description: Microtubule associated protein (MAP65/ASE1
  misc_feature (1)..(567): Homolog of NCBI NO: 30677965 NR Description: microtubule associated protein (MAP65/ASE1)
  misc_feature (1)..(565): Homolog of NCBI NO: 21539547 NR Description: unknown protein [Arabidopsis thaliana]
  misc_feature (1)..(565): Homolog of NCBI NO: 27357984 NR Description: Unknown protein [Oryza sativa (japonica
  misc_feature (1)..(565): Homolog of NCBI NO: 8778239 NR Description: F10B6.9 [Arabidopsis thaliana]
  misc_feature (1)..(545): Homolog of NCBI NO: 28301942 NR Description: unknown protein [Oryza sativa (japonica
  misc_feature (1)..(216): Homolog of NCBI NO: 15223872 NR Description: hypothetical protein; protein id: At1g14690.1
  misc_feature (434)..(564): Homolog of NCBI NO: 15223872 NR Description: hypothetical protein; protein id: At1g14690.1
  misc_feature (1)..(564): Homolog of NCBI NO: 15240485 NR Description: putative protein; protein id: At5g55230.1 thaliana] >gi|9758120|dbj|BAB08592.1| similarity to unknown protein [Arabidopsis thaliana]
  misc_feature (1)..(564): Homolog of NCBI NO: 11558252 NR Description: microtubule-associated protein MAP65-1a
  misc_feature (1)..(550): Homolog of NCBI NO: 11558254 NR Description: microtubule-associated protein MAP65-1b
MLMELERECLQIYQRKVDEAANSKAKLHQSVASIEAEVASLMAALGVLNINSPIKLDKGSKSLKEKLAAVTPLVEELRIQKEERMKQFSDIKAQIEKISGEISGYSDHLNKAMNISLTLEEQDLTLRNLNEYQTHLRTLQKEKSDRLNKVLGYVNEVHALCGVLGVDFSQTVSAVHPSLHRTDQEQSTNISDSTLEGLEHMIQKLKTERKSRFQKLKDVVASLFELWNLMDTPQEDRTKFGKVTYVVRSSEANITEPGILSTETIEQVSTEVDSLSKLKASRMKELVMKRRSELEDLCRLTHIQPDTSTSAEKSTALIDSGLVDPSELLANIEMQINKIKDEAQSRKDIMDRIDRWLSACEEENWLEEYNLDENRYSAGRGGHVNLKRAERARVTINKIPGMVDTLIKKTLVWEEDMQKSFLYDGVRLVNILEDYKLTRKQQEEEKKRYRDQKKRQDLLLTQRESIYGSKPSPRRSSSFRKPNGFNISNGNGSVPPTPRRGSVGTTTPDVLLTPRSYSGHHRQNGYFKEVRRLSTTPLNYVAMQKEDTVSTTYTSIYSSEPDSPLQG

SEQ ID NO: 91458 - protein, 565 aa, Arabidopsis thaliana
  peptide (1)..(565): Ceres Seq. ID no. 12727744
  misc_feature (1)..(562): Pfam Name: Microtubule associated protein (MAP65/ASE1 family) Pfam Description: Microtubule associated protein (MAP65/ASE1
  misc_feature (1)..(565): Homolog of NCBI NO: 30677965 NR Description: microtubule associated protein (MAP65/ASE1)
  misc_feature (1)..(563): Homolog of NCBI NO: 21539547 NR Description: unknown protein [Arabidopsis thaliana]
  misc_feature (1)..(563): Homolog of NCBI NO: 27357984 NR Description: Unknown protein [Oryza sativa (japonica
  misc_feature (1)..(563): Homolog of NCBI NO: 8778239 NR Description: F10B6.9 [Arabidopsis thaliana]
  misc_feature (1)..(543): Homolog of NCBI NO: 28301942 NR Description: unknown protein [Oryza sativa (japonica
  misc_feature (1)..(214): Homolog of NCBI NO: 15223872 NR Description: hypothetical protein; protein id: At1g14690.1
  misc_feature (432)..(562): Homolog of NCBI NO: 15223872 NR Description: hypothetical protein; protein id: At1g14690.1
  misc_feature (1)..(562): Homolog of NCBI NO: 15240485 NR Description: putative protein; protein id: At5g55230.1 thaliana] >gi|9758120|dbj|BAB08592.1| similarity to unknown protein [Arabidopsis thaliana]
  misc_feature (1)..(562): Homolog of NCBI NO: 11558252 NR Description: microtubule-associated protein MAP65-1a
  misc_feature (1)..(548): Homolog of NCBI NO: 11558254 NR Description: microtubule-associated protein MAP65-1b
MELERECLQIYQRKVDEAANSKAKLHQSVASIEAEVASLMAALGVLNINSPIKLDKGSKSLKEKLAAVTPLVEELRIQKEERMKQFSDIKAQIEKISGEISGYSDHLNKAMNISLTLEEQDLTLRNLNEYQTHLRTLQKEKSDRLNKVLGYVNEVHALCGVLGVDFSQTVSAVHPSLHRTDQEQSTNISDSTLEGLEHMIQKLKTERKSRFQKLKDVVASLFELWNLMDTPQEDRTKFGKVTYVVRSSEANITEPGILSTETIEQVSTEVDSLSKLKASRMKELVMKRRSELEDLCRLTHIQPDTSTSAEKSTALIDSGLVDPSELLANIEMQINKIKDEAQSRKDIMDRIDRWLSACEEENWLEEYNLDENRYSAGRGGHVNLKRAERARVTINKIPGMVDTLIKKTLVWEEDMQKSFLYDGVRLVNILEDYKLTRKQQEEEKKRYRDQKKRQDLLLTQRESIYGSKPSPRRSSSFRKPNGFNISNGNGSVPPTPRRGSVGTTTPDVLLTPRSYSGHHRQNGYFKEVRRLSTTPLNYVAMQKEDTVSTTYTSIYSSEPDSPLQG

SEQ ID NO: 91459 - DNA, 1881 bp, Arabidopsis thaliana
  misc_feature (1)..(1881): Ceres Seq. ID no. 12727775
  misc_feature: MA Experiment ID: 20000328 Result: Up-regulated in Transcription
  misc_feature: MA Experiment 20000328 PARAMETER Experiment Name: At_42deg_Heat_Sub_P Parameter: Age (day) Value: 14
  misc_feature: MA Experiment 20000328 PARAMETER Experiment Name: At_42deg_Heat_Sub_P Parameter: Organism Value: A. thaliana
  misc_feature: MA Experiment 20000328 PARAMETER Experiment Name: At_42deg_Heat_Sub_P Parameter: Plant Line Value: WS
  misc_feature: MA Experiment 20000328 PARAMETER Experiment Name: At_42deg_Heat_Sub_P Parameter: Temperature (deg C) Value: 42 vs. 22
  misc_feature: MA Experiment 20000328 PARAMETER Experiment Name: At_42deg_Heat_Sub_P Parameter: Timepoint (hr) Value: 6
  misc_feature: MA Experiment 20000328 PARAMETER Experiment Name: At_42deg_Heat_Sub_P Parameter: Tissue Value: Aerial
  misc_feature: MA Experiment ID: 20000347 Result: Up-regulated in Transcription
  misc_feature: MA Experiment 20000347 PARAMETER Experiment Name: At_2mM_SA_Sub_P Parameter: Age (day) Value: 14
  misc_feature: MA Experiment 20000347 PARAMETER Experiment Name: At_2mM_SA_Sub_P Parameter: Organism Value: A. thaliana
  misc_feature: MA Experiment 20000347 PARAMETER Experiment Name: At_2mM_SA_Sub_P Parameter: Plant Line Value: WS
  misc_feature: MA Experiment 20000347 PARAMETER Experiment Name: At_2mM_SA_Sub_P Parameter: Timepoint (hr) Value: 6
  misc_feature: MA Experiment 20000347 PARAMETER Experiment Name: At_2mM_SA_Sub_P Parameter: Tissue Value: Aerial
  misc_feature: MA Experiment 20000347 PARAMETER Experiment Name: At_2mM_SA_Sub_P Parameter: Treatment Value: 2mM SA vs. No Treatment
atgggtaagtctagtggtagaaatggtaacggaagctttaacggcaataaatttcacggagttagaccttacgtacggtctccagttccacggcttagatggacgccggatcttcaccgttgtttcgttcacgccgtcgagattctcggtggtcaacaccgagcaacaccaaaacttgttcttaagatgatggatgtgaagggacttaccatttcacatgtcaaaagccaccttcagatgtatagaggaggttcaaagctcactttggagaaaccagaagaaagctcatcatcttcaataagaagaagacaagacagtgaagaagattattatcttcatgacaacttgtctttacacacaaggaatgattgtcttttgggttttcactcttttcctctttcttcacattcttcatttagaggaggaggaggaggaagaacaaaagagcagcagacttcagagtctggtggttatgatgatgatgctgactttcttcacatcaagaagatgaacgatacgacgacgtttttgtcacatcatttccccaagggaacagaggagtggcgggaacaagaacacgaagaagaagaagaagatttgtcgttgtctctgtcgttaaatcatcatcattggagaagcaatggatcatcggtgatgaatctatcgaaccgttttggctccaattccaagacggcgatactcaacgattcttactccgacgagaatcattcttcctccgccgccgccgccgtaacttccgtcgtaatcccaccgtgctccggcaatgtactccgagccgttctcttgctcttcttcatctgcttctgcttctccctctacagaacttctggttatctccgaatcgtctctgactcttcctccaccctctctcgcattttcccctctgtcaacgattcttcttcgtctccgtctccatctccgtctctgtctccggaggaaattgaggaacctaagctagaagaagtattgcgtagagcagcaactaaagatggtacagtgattttgacaactttgaatgaagcttgggcggctccaggatctgtgattgatcttttctttgagagttttagaattggtaaaggaacaagaaggctattgaaacacttggtgatcattgctttggatgctaaagcttattcacgttgtcaagaactgcataagcattgcttcagacttgaaacagaaggtgttgatttctctggtggtgaagcttatttcatgactccttcttacttgacaatgatgtggagacgaatctctttccttcgctctgttcttgaaaagggttacaactttgttttcacggatgctgatgtgatgtggttcaggaacccttttcgacggttttacgaagacggtgatttccagattgcttgtgaccattacataggaaggccgaatgattttaggaatagaccaaatggaggatttacctttgtgagagccaataaccgaagtataggcttctacaagttctggtatgattcaaggaccaagtaccccaaaaaccacgaccaggatgttctaaacttcatcaagacagatcctttcctttggaaactaaggattaggattaggttcttgaacacagtgtattttggtggattctgtgaaccaagcaaagatttgaatcttgtttgtacaatgcatgcgaattgctgctttggtttggatagtaagcttcatgatcttagaatcatgcttcaagactggagagatttcaagtctttaccacttcatagtaaccaatcctctggtttcacctggagcgtcccacagaattgcagtcttgattcacttaggcctgttgattctaaggatgaagaagagagtgaaccaccaggagaatctacacagtga

SEQ ID NO: 91460 - protein, 626 aa, Arabidopsis thaliana
  peptide (1)..(626): Ceres Seq. ID no. 12727776
  misc_feature (31)..(82): Pfam Name: Myb-like DNA-binding domain Pfam Description: Myb-like DNA-binding domain
  misc_feature (279)..(624): Homolog of NCBI NO: 15223826 NR Description: hypothetical protein common family; protein id:
  misc_feature (1)..(220): Homolog of NCBI NO: 30793861 NR Description: unknown protein [Arabidopsis thaliana]
  misc_feature (235)..(605): Homolog of NCBI NO: 21536907 NR Description: regulatory protein [Arabidopsis thaliana]
  misc_feature (266)..(604): Homolog of NCBI NO: 38344278 NR Description: OSJNBa0013K16.10 [Oryza sativa (japonica
  misc_feature (263)..(603): Homolog of NCBI NO: 15235236 NR Description: hypothetical protein common family; protein id:
  misc_feature (285)..(607): Homolog of NCBI NO: 23306127 NR Description: Putataive InsB from Escherichia coli [Oryza
  misc_feature (337)..(602): Homolog of NCBI NO: 6063544 NR Description: similar to Arabidopsis thaliana chromosome 2, BAC
  misc_feature (262)..(599): Homolog of NCBI NO: 15235236 NR Description: hypothetical protein common family; protein id:
  misc_feature (291)..(602): Homolog of NCBI NO: 34897442 NR Description: putative regulatory protein [Oryza sativa
  misc_feature (325)..(602): Homolog of NCBI NO: 18414558 NR Description: hypothetical protein common family; protein id:
MGKSSGRNGNGSFNGNKFHGVRPYVRSPVPRLRWTPDLHRCFVHAVEILGGQHRATPKLVLKMMDVKGLTISHVKSHLQMYRGGSKLTLEKPEESSSSSIRRRQDSEEDYYLHDNLSLHTRNDCLLGFHSFPLSSHSSFRGGGGGRTKEQQTSESGGYDDDADFLHIKKMNDTTTFLSHHFPKGTEEWREQEHEEEEEDLSLSLSLNHHHWRSNGSSVMNLSNRFGSNSKTAILNDSYSDENHSSSAAAAVTSVVIPPCSGNVLRAVLLLFFICFCFSLYRTSGYLRIVSDSSSTLSRIFPSVNDSSSSPSPSPSLSPEEIEEPKLEEVLRRAATKDGTVILTTLNEAWAAPGSVIDLFFESFRIGKGTRRLLKHLVIIALDAKAYSRCQELHKHCFRLETEGVDFSGGEAYFMTPSYLTMMWRRISFLRSVLEKGYNFVFTDADVMWFRNPFRRFYEDGDFQIACDHYIGRPNDFRNRPNGGFTFVRANNRSIGFYKFWYDSRTKYPKNHDQDVLNFIKTDPFLWKLRIRIRFLNTVYFGGFCEPSKDLNLVCTMHANCCFGLDSKLHDLRIMLQDWRDFKSLPLHSNQSSGFTWSVPQNCSLDSLRPVDSKDEEESEPPGESTQ

SEQ ID NO: 91461 - protein, 564 aa, Arabidopsis thaliana
  peptide (1)..(564): Ceres Seq. ID no. 12727777
  misc_feature (217)..(562): Homolog of NCBI NO: 15223826 NR Description: hypothetical protein common family; protein id:
  misc_feature (1)..(158): Homolog of NCBI NO: 30793861 NR Description: unknown protein [Arabidopsis thaliana]
  misc_feature (173)..(543): Homolog of NCBI NO: 21536907 NR Description: regulatory protein [Arabidopsis thaliana]
  misc_feature (204)..(542): Homolog of NCBI NO: 38344278 NR Description: OSJNBa0013K16.10 [Oryza sativa (japonica
  misc_feature (201)..(541): Homolog of NCBI NO: 15235236 NR Description: hypothetical protein common family; protein id:
  misc_feature (223)..(545): Homolog of NCBI NO: 23306127 NR Description: Putataive InsB from Escherichia coli [Oryza
  misc_feature (275)..(540): Homolog of NCBI NO: 6063544 NR Description: similar to Arabidopsis thaliana chromosome 2, BAC
  misc_feature (200)..(537): Homolog of NCBI NO: 15235236 NR Description: hypothetical protein common family; protein id:
  misc_feature (229)..(540): Homolog of NCBI NO: 34897442 NR Description: putative regulatory protein [Oryza sativa
  misc_feature (263)..(540): Homolog of NCBI NO: 18414558 NR Description: hypothetical protein common family; protein id:
MMDVKGLTISHVKSHLQMYRGGSKLTLEKPEESSSSSIRRRQDSEEDYYLHDNLSLHTRNDCLLGFHSFPLSSHSSFRGGGGGRTKEQQTSESGGYDDDADFLHIKKMNDTTTFLSHHFPKGTEEWREQEHEEEEEDLSLSLSLNHHHWRSNGSSVMNLSNRFGSNSKTAILNDSYSDENHSSSAAAAVTSVVIPPCSGNVLRAVLLLFFICFCFSLYRTSGYLRIVSDSSSTLSRIFPSVNDSSSSPSPSPSLSPEEIEEPKLEEVLRRAATKDGTVILTTLNEAWAAPGSVIDLFFESFRIGKGTRRLLKHLVIIALDAKAYSRCQELHKHCFRLETEGVDFSGGEAYFMTPSYLTMMWRRISFLRSVLEKGYNFVFTDADVMWFRNPFRRFYEDGDFQIACDHYIGRPNDFRNRPNGGFTFVRANNRSIGFYKFWYDSRTKYPKNHDQDVLNFIKTDPFLWKLRIRIRFLNTVYFGGFCEPSKDLNLVCTMHANCCFGLDSKLHDLRIMLQDWRDFKSLPLHSNQSSGFTWSVPQNCSLDSLRPVDSKDEEESEPPGESTQ

SEQ ID NO: 91462 - protein, 563 aa, Arabidopsis thaliana
  peptide (1)..(563): Ceres Seq. ID no. 12727778
  misc_feature (216)..(561): Homolog of NCBI NO: 15223826 NR Description: hypothetical protein common family; protein id:
  misc_feature (1)..(157): Homolog of NCBI NO: 30793861 NR Description: unknown protein [Arabidopsis thaliana]
  misc_feature (172)..(542): Homolog of NCBI NO: 21536907 NR Description: regulatory protein [Arabidopsis thaliana]
  misc_feature (203)..(541): Homolog of NCBI NO: 38344278 NR Description: OSJNBa0013K16.10 [Oryza sativa (japonica
  misc_feature (200)..(540): Homolog of NCBI NO: 15235236 NR Description: hypothetical protein common family; protein id:
  misc_feature (222)..(544): Homolog of NCBI NO: 23306127 NR Description: Putataive InsB from Escherichia coli [Oryza
  misc_feature (274)..(539): Homolog of NCBI NO: 6063544 NR Description: similar to Arabidopsis thaliana chromosome 2, BAC
  misc_feature (199)..(536): Homolog of NCBI NO: 15235236 NR Description: hypothetical protein common family; protein id:
  misc_feature (228)..(539): Homolog of NCBI NO: 34897442 NR Description: putative regulatory protein [Oryza sativa
  misc_feature (262)..(539): Homolog of NCBI NO: 18414558 NR Description: hypothetical protein common family; protein id:
MDVKGLTISHVKSHLQMYRGGSKLTLEKPEESSSSSIRRRQDSEEDYYLHDNLSLHTRNDCLLGFHSFPLSSHSSFRGGGGGRTKEQQTSESGGYDDDADFLHIKKMNDTTTFLSHHFPKGTEEWREQEHEEEEEDLSLSLSLNHHHWRSNGSSVMNLSNRFGSNSKTAILNDSYSDENHSSSAAAAVTSVVIPPCSGNVLRAVLLLFFICFCFSLYRTSGYLRIVSDSSSTLSRIFPSVNDSSSSPSPSPSLSPEEIEEPKLEEVLRRAATKDGTVILTTLNEAWAAPGSVIDLFFESFRIGKGTRRLLKHLVIIALDAKAYSRCQELHKHCFRLETEGVDFSGGEAYFMTPSYLTMMWRRISFLRSVLEKGYNFVFTDADVMWFRNPFRRFYEDGDFQIACDHYIGRPNDFRNRPNGGFTFVRANNRSIGFYKFWYDSRTKYPKNHDQDVLNFIKTDPFLWKLRIRIRFLNTVYFGGFCEPSKDLNLVCTMHANCCFGLDSKLHDLRIMLQDWRDFKSLPLHSNQSSGFTWSVPQNCSLDSLRPVDSKDEEESEPPGESTQ

SEQ ID NO: 91463 - DNA, 1647 bp, Arabidopsis thaliana
  misc_feature (1)..(1647): Ceres Seq. ID no. 12727851
  misc_feature: MA Experiment ID: 20000185 Result: Up-regulated in Transcription
  misc_feature: MA Experiment 20000185 PARAMETER Experiment Name: At_Roots__P Parameter: Age (day) Value: 7 vs. 21
  misc_feature: MA Experiment 20000185 PARAMETER Experiment Name: At_Roots__P Parameter: Organism Value: A. thaliana
  misc_feature: MA Experiment 20000185 PARAMETER Experiment Name: At_Roots__P Parameter: Tissue Value: Roots vs. Whole Plant
  misc_feature: MA Experiment ID: 20000268 Result: Up-regulated in Transcription
  misc_feature: MA Experiment 20000268 PARAMETER Experiment Name: At_100mM_NaCl__P Parameter: Age (day) Value: 14
  misc_feature: MA Experiment 20000268 PARAMETER Experiment Name: At_100mM_NaCl__P Parameter: Organism Value: A. thaliana
  misc_feature: MA Experiment 20000268 PARAMETER Experiment Name: At_100mM_NaCl__P Parameter: Plant Line Value: WS
  misc_feature: MA Experiment 20000268 PARAMETER Experiment Name: At_100mM_NaCl__P Parameter: Timepoint (hr) Value: 6
  misc_feature: MA Experiment 20000268 PARAMETER Experiment Name: At_100mM_NaCl__P Parameter: Tissue Value: Whole Plant
  misc_feature: MA Experiment 20000268 PARAMETER Experiment Name: At_100mM_NaCl__P Parameter: Treatment Value: 100mM NaCl vs. No Treatment
  misc_feature: MA Experiment ID: 20000286 Result: Down-regulated in Transcription
  misc_feature: MA Experiment 20000286 PARAMETER Experiment Name: At_Open_Flower_P Parameter: Age (day) Value: 21
  misc_feature: MA Experiment 20000286 PARAMETER Experiment Name: At_Open_Flower_P Parameter: Plant Line Value: WS
  misc_feature: MA Experiment 20000286 PARAMETER Experiment Name: At_Open_Flower_P Parameter: Tissue Value: Half Open vs. Whole Plant
  misc_feature: MA Experiment ID: 20000436 Result: Up-regulated in Transcription
  misc_feature: MA Experiment 20000436 PARAMETER Experiment Name: At_Drought_P Parameter: Age (day) Value: 7
  misc_feature: MA Experiment 20000436 PARAMETER Experiment Name: At_Drought_P Parameter: Organism Value: A. thaliana
  misc_feature: MA Experiment 20000436 PARAMETER Experiment Name: At_Drought_P Parameter: Plant Line Value: WS
  misc_feature: MA Experiment 20000436 PARAMETER Experiment Name: At_Drought_P Parameter: Timepoint (hr) Value: 12
  misc_feature: MA Experiment 20000436 PARAMETER Experiment Name: At_Drought_P Parameter: Tissue Value: Whole Plant
  misc_feature: MA Experiment 20000436 PARAMETER Experiment Name: At_Drought_P Parameter: Treatment Value: Drought vs. No Drought
  misc_feature: MA Experiment ID: 20000437 Result: Up-regulated in Transcription
  misc_feature: MA Experiment 20000437 PARAMETER Experiment Name: At_Drought_P Parameter: Age (day) Value: 8
  misc_feature: MA Experiment 20000437 PARAMETER Experiment Name: At_Drought_P Parameter: Organism Value: A. thaliana
  misc_feature: MA Experiment 20000437 PARAMETER Experiment Name: At_Drought_P Parameter: Plant Line Value: WS
  misc_feature: MA Experiment 20000437 PARAMETER Experiment Name: At_Drought_P Parameter: Timepoint (hr) Value: 24
  misc_feature: MA Experiment 20000437 PARAMETER Experiment Name: At_Drought_P Parameter: Tissue Value: Whole Plant
  misc_feature: MA Experiment 20000437 PARAMETER Experiment Name: At_Drought_P Parameter: Treatment Value: Drought vs. No Drought
  misc_feature: MA Experiment ID: 20000438 Result: Up-regulated in Transcription
  misc_feature: MA Experiment 20000438 PARAMETER Experiment Name: At_Shoots__P Parameter: Age (day) Value: 14
  misc_feature: MA Experiment 20000438 PARAMETER Experiment Name: At_Shoots__P Parameter: Tissue Value: Shoots vs. Whole Plant
  misc_feature: MA Experiment ID: 20000439 Result: Up-regulated in Transcription
  misc_feature: MA Experiment 20000439 PARAMETER Experiment Name: At_Roots__P Parameter: Age (day) Value: 14 vs. 21
  misc_feature: MA Experiment 20000439 PARAMETER Experiment Name: At_Roots__P Parameter: Organism Value: A. thaliana
  misc_feature: MA Experiment 20000439 PARAMETER Experiment Name: At_Roots__P Parameter: Tissue Value: Roots vs. Whole Plant
  misc_feature: MA Experiment ID: 20000460 Result: Down-regulated in Transcription
  misc_feature: MA Experiment 20000460 PARAMETER Experiment Name: At_10percent_PEG_P Parameter: Age (day) Value: 12
  misc_feature: MA Experiment 20000460 PARAMETER Experiment Name: At_10percent_PEG_P Parameter: Organism Value: A. thaliana
  misc_feature: MA Experiment 20000460 PARAMETER Experiment Name: At_10percent_PEG_P Parameter: Plant Line Value: WS
  misc_feature: MA Experiment 20000460 PARAMETER Experiment Name: At_10percent_PEG_P Parameter: Timepoint (day) Value: 12
  misc_feature: MA Experiment 20000460 PARAMETER Experiment Name: At_10percent_PEG_P Parameter: Tissue Value: Whole Plant
  misc_feature: MA Experiment 20000460 PARAMETER Experiment Name: At_10percent_PEG_P Parameter: Treatment Value: 10percent PEG vs. No Treatment
  misc_feature: MA Experiment ID: 20000573 Result: Down-regulated in Transcription
  misc_feature: MA Experiment 20000573 PARAMETER Experiment Name: At_100uM_ABA_Mutants__P Parameter: Organism Value: A. thaliana
  misc_feature: MA Experiment 20000573 PARAMETER Experiment Name: At_100uM_ABA_Mutants__P Parameter: Plant Line Value: CS22 vs. Ler wt
  misc_feature: MA Experiment 20000573 PARAMETER Experiment Name: At_100uM_ABA_Mutants__P Parameter: Timepoint (hr) Value: N/A
  misc_feature: MA Experiment 20000573 PARAMETER Experiment Name: At_100uM_ABA_Mutants__P Parameter: Tissue Value: Whole Plant
  misc_feature: MA Experiment 20000573 PARAMETER Experiment Name: At_100uM_ABA_Mutants__P Parameter: Treatment Value: None
  misc_feature: MA Experiment ID: 20001247 Result: Down-regulated in Transcription
  misc_feature: MA Experiment 20001247 PARAMETER Experiment Name: At_Far-red-induction_P Parameter: Age (day) Value: 7
  misc_feature: MA Experiment 20001247 PARAMETER Experiment Name: At_Far-red-induction_P Parameter: Light Value: Far-red vs. White
  misc_feature: MA Experiment 20001247 PARAMETER Experiment Name: At_Far-red-induction_P Parameter: Organism Value: A. thaliana
  misc_feature: MA Experiment 20001247 PARAMETER Experiment Name: At_Far-red-induction_P Parameter: Plant Line Value: Columbia
  misc_feature: MA Experiment 20001247 PARAMETER Experiment Name: At_Far-red-induction_P Parameter: Timepoint (hr) Value: 1
  misc_feature: MA Experiment 20001247 PARAMETER Experiment Name: At_Far-red-induction_P Parameter: Tissue Value: Whole Plant
  misc_feature: MA Experiment ID: 20001248 Result: Down-regulated in Transcription
  misc_feature: MA Experiment 20001248 PARAMETER Experiment Name: At_Far-red-induction_P Parameter: Age (day) Value: 7
  misc_feature: MA Experiment 20001248 PARAMETER Experiment Name: At_Far-red-induction_P Parameter: Light Value: Far-red vs. White
  misc_feature: MA Experiment 20001248 PARAMETER Experiment Name: At_Far-red-induction_P Parameter: Organism Value: A. thaliana
  misc_feature: MA Experiment 20001248 PARAMETER Experiment Name: At_Far-red-induction_P Parameter: Plant Line Value: Columbia
  misc_feature: MA Experiment 20001248 PARAMETER Experiment Name: At_Far-red-induction_P Parameter: Timepoint (hr) Value: 4
  misc_feature: MA Experiment 20001248 PARAMETER Experiment Name: At_Far-red-induction_P Parameter: Tissue Value: Whole Plant
  misc_feature: MA Experiment ID: 20001451 Result: Down-regulated in Transcription
  misc_feature: MA Experiment 20001451 PARAMETER Experiment Name: At_Far-red-induction_P Parameter: Age (day) Value: 7
  misc_feature: MA Experiment 20001451 PARAMETER Experiment Name: At_Far-red-induction_P Parameter: Light Value: Far-red vs. White
  misc_feature: MA Experiment 20001451 PARAMETER Experiment Name: At_Far-red-induction_P Parameter: Organism Value: A. thaliana
  misc_feature: MA Experiment 20001451 PARAMETER Experiment Name: At_Far-red-induction_P Parameter: Plant Line Value: Columbia
  misc_feature: MA Experiment 20001451 PARAMETER Experiment Name: At_Far-red-induction_P Parameter: Timepoint (hr) Value: 24
  misc_feature: MA Experiment 20001451 PARAMETER Experiment Name: At_Far-red-induction_P Parameter: Tissue Value: Whole Plant
  misc_feature: MA Experiment ID: 20001554 Result: Up-regulated in Transcription
  misc_feature: MA Experiment 20001554 PARAMETER Experiment Name: At_Drought_Soil_Dry_P Parameter: Age (day) Value: 21
  misc_feature: MA Experiment 20001554 PARAMETER Experiment Name: At_Drought_Soil_Dry_P Parameter: Organism Value: A. thaliana
  misc_feature: MA Experiment 20001554 PARAMETER Experiment Name: At_Drought_Soil_Dry_P Parameter: Plant Line Value: WS
  misc_feature: MA Experiment 20001554 PARAMETER Experiment Name: At_Drought_Soil_Dry_P Parameter: Post Timepoint (hr) Value: None
  misc_feature: MA Experiment 20001554 PARAMETER Experiment Name: At_Drought_Soil_Dry_P Parameter: Post-Treatment Value: None
  misc_feature: MA Experiment 20001554 PARAMETER Experiment Name: At_Drought_Soil_Dry_P Parameter: Timepoint (day) Value: 7
  misc_feature: MA Experiment 20001554 PARAMETER Experiment Name: At_Drought_Soil_Dry_P Parameter: Treatment Value: Drought vs. No Drought
  misc_feature: MA Experiment ID: 20001555 Result: Up-regulated in Transcription
  misc_feature: MA Experiment 20001555 PARAMETER Experiment Name: At_Drought_Soil_Dry_P Parameter: Age (day) Value: 24
  misc_feature: MA Experiment 20001555 PARAMETER Experiment Name: At_Drought_Soil_Dry_P Parameter: Organism Value: A. thaliana
  misc_feature: MA Experiment 20001555 PARAMETER Experiment Name: At_Drought_Soil_Dry_P Parameter: Plant Line Value: WS
  misc_feature: MA Experiment 20001555 PARAMETER Experiment Name: At_Drought_Soil_Dry_P Parameter: Post Timepoint (hr) Value: None
  misc_feature: MA Experiment 20001555 PARAMETER Experiment Name: At_Drought_Soil_Dry_P Parameter: Post-Treatment Value: None
  misc_feature: MA Experiment 20001555 PARAMETER Experiment Name: At_Drought_Soil_Dry_P Parameter: Timepoint (day) Value: 10
  misc_feature: MA Experiment 20001555 PARAMETER Experiment Name: At_Drought_Soil_Dry_P Parameter: Treatment Value: Drought vs. No Drought
  misc_feature: MA Experiment ID: 20001559 Result: Up-regulated in Transcription
  misc_feature: MA Experiment 20001559 PARAMETER Experiment Name: At_Drought_Soil_Dry_P Parameter: Age (day) Value: 28
  misc_feature: MA Experiment 20001559 PARAMETER Experiment Name: At_Drought_Soil_Dry_P Parameter: Organism Value: A. thaliana
  misc_feature: MA Experiment 20001559 PARAMETER Experiment Name: At_Drought_Soil_Dry_P Parameter: Plant Line Value: WS
  misc_feature: MA Experiment 20001559 PARAMETER Experiment Name: At_Drought_Soil_Dry_P Parameter: Post Timepoint (hr) Value: 29
  misc_feature: MA Experiment 20001559 PARAMETER Experiment Name: At_Drought_Soil_Dry_P Parameter: Post-Treatment Value: Re-Water vs. No Drought
  misc_feature: MA Experiment 20001559 PARAMETER Experiment Name: At_Drought_Soil_Dry_P Parameter: Timepoint (day) Value: 14
  misc_feature: MA Experiment 20001559 PARAMETER Experiment Name: At_Drought_Soil_Dry_P Parameter: Treatment Value: Drought vs. No Drought
atcacaaagaaaacttgagacgtacgttaatacggaaaaatggctacgatttggtttctttcacttctctttctctgttgtattctcctcgccgcctttaaacacaagaagcgtcggacaaatcagcagcaaccaccgtcccctcctggctttccgatcatcggaaacttgcatcagcttggagaattaccacatcaatctctatggagtctttccaaaacgtatggtccggtgatgcttttgaagcttggaagtgtcccaacggtcgtagtttcttcttctgagacggcaaaacaagttctgaaaatcaatgatctacattgttgtagccgtcctagcttagcaggggcaaaagagctctcttacaattacttggacattgctttctctccttttgatgattattggaaagaattaaggaggatttgtgtccaagaactctttagtgctaagcgagttcactctattcaacccatcaaggaagaagaagtgaggaaactgatcgtttcagccacggaatcagcctctcagaaatcaccagttaacttgagcgagaagtttcttgatttaactgtaagcgtgatatgcaaggcagcattcagtctagacttccatacttcagttctcaataatgatggatttgacaagttaatccacgatgcgtttttgtttttggggagcttctcggcctcaaacttcttcccaaatggtggctggatcatcgactggctcacgggtctacaaaggcggagagaaaaaagcgtcaaggatcttgatgtgttctatcaacaaatgtttgatctgcataaacaagaaaacaaacaaggagtcgaagatttcgtggacttgctcttgaagttagagaaagaagaaactgttcttggatatggcaagctcacaagaaaccatgtcaaagccatcttaatgaacgttcttcttggggccatcaatacttctgcaatgacaatgacatgggccatggcagaactaataagaaacccgcgagtgatgaagaaagtacaatccgaaatcagaaaccaaatgataaacaaatcagtgatcaccttagatgatatagatcatctaccttacttgaagatggtgatcaaagaaacatggaggctacatcctccagtacctcttctacttccaagagaagttatgtctgaatttgagatcaatggctacaagatacaacccaagacattgctttacgtgaatgtttgggctatagggcgtgatcctgattcctggaaagatgcagatatgttttatccagaaaggtttatggataataacattgatgctaaaggacagaactttgagctgttaccgtttggaagtggccggagaatctgtcctggaatgtacatggggacaacaatggtggagtttggtctagcgaatatgttgtatcagtttgattgggaagtaccagatggtatggtggtcgaagatattgacatggaagaatctcctggactcgccgtgggcaaaaaaaatgagcttctacttgttcctgtcaagtatttaggtcattgatgatcacttaaagtactaattttcttcctttgagtacaaaactaaatgtgttccctaaataaaactaaatcttgtattccattgtctctcggagtggatcaatcc

SEQ ID NO: 91464 - protein, 500 aa, Arabidopsis thaliana
  peptide (1)..(500): Ceres Seq. ID no. 12727852
  misc_feature (32)..(493): Pfam Name: Cytochrome P450 Pfam Description: Cytochrome P450
  misc_feature (1)..(500): Homolog of NCBI NO: 15227003 NR Description: cytochrome p450 family; protein id: At2g02580.1, by cDNA: gi_18175890 [Arabidopsis thaliana] Cytochrome P450 71B9 >gi|20197089|gb|AAC18928.2| putative
  misc_feature (1)..(500): Homolog of NCBI NO: 18175891 NR Description: putative cytochrome P450 protein [Arabidopsis
  misc_feature (1)..(500): Homolog of NCBI NO: 7430672 NR Description: probable cytochrome P450 At2g02580 [imported] -
  misc_feature (1)..(498): Homolog of NCBI NO: 15231542 NR Description: cytochrome p450 family; protein id: At3g26330.1
  misc_feature (1)..(498): Homolog of NCBI NO: 9294291 NR Description: cytochrome p450 [Arabidopsis thaliana]
  misc_feature (1)..(500): Homolog of NCBI NO: 15231541 NR Description: cytochrome p450 family; protein id: At3g26320.1 thaliana] >gi|13878377|sp|Q9LIP4|C72X_ARATH Cytochrome P450 71B36
  misc_feature (1)..(498): Homolog of NCBI NO: 15231538 NR Description: cytochrome p450 family; protein id: At3g26300.1 thaliana] >gi|13878379|sp|Q9LIP6|C72V_ARATH Cytochrome P450 71B34
  misc_feature (1)..(494): Homolog of NCBI NO: 15231539 NR Description: cytochrome p450 family; protein id: At3g26310.1 thaliana] >gi|13878378|sp|Q9LIP5|C72W_ARATH Cytochrome P450 71B35
  misc_feature (1)..(500): Homolog of NCBI NO: 15231537 NR Description: cytochrome p450 family; protein id: At3g26290.1 thaliana] >gi|13878380|sp|Q9LTL0|C72Q_ARATH Cytochrome P450 71B26
  misc_feature (1)..(498): Homolog of NCBI NO: 30696845 NR Description: cytochrome P450 71B10 [Arabidopsis thaliana]
MATIWFLSLLFLCCILLAAFKHKKRRTNQQQPPSPPGFPIIGNLHQLGELPHQSLWSLSKTYGPVMLLKLGSVPTVVVSSSETAKQVLKINDLHCCSRPSLAGAKELSYNYLDIAFSPFDDYWKELRRICVQELFSAKRVHSIQPIKEEEVRKLIVSATESASQKSPVNLSEKFLDLTVSVICKAAFSLDFHTSVLNNDGFDKLIHDAFLFLGSFSASNFFPNGGWIIDWLTGLQRRREKSVKDLDVFYQQMFDLHKQENKQGVEDFVDLLLKLEKEETVLGYGKLTRNHVKAILMNVLLGAINTSAMTMTWAMAELIRNPRVMKKVQSEIRNQMINKSVITLDDIDHLPYLKMVIKETWRLHPPVPLLLPREVMSEFEINGYKIQPKTLLYVNVWAIGRDPDSWKDADMFYPERFMDNNIDAKGQNFELLPFGSGRRICPGMYMGTTMVEFGLANMLYQFDWEVPDGMVVEDIDMEESPGLAVGKKNELLLVPVKYLGH

SEQ ID NO: 91465 - protein, 435 aa, Arabidopsis thaliana
  peptide (1)..(435): Ceres Seq. ID no. 12727853
  misc_feature (1)..(428): Pfam Name: Cytochrome P450 Pfam Description: Cytochrome P450
  misc_feature (1)..(435): Homolog of NCBI NO: 15227003 NR Description: cytochrome p450 family; protein id: At2g02580.1, by cDNA: gi_18175890 [Arabidopsis thaliana] Cytochrome P450 71B9 >gi|20197089|gb|AAC18928.2| putative
  misc_feature (1)..(435): Homolog of NCBI NO: 18175891 NR Description: putative cytochrome P450 protein [Arabidopsis
  misc_feature (1)..(435): Homolog of NCBI NO: 7430672 NR Description: probable cytochrome P450 At2g02580 [imported] -
  misc_feature (1)..(433): Homolog of NCBI NO: 15231542 NR Description: cytochrome p450 family; protein id: At3g26330.1
  misc_feature (1)..(433): Homolog of NCBI NO: 9294291 NR Description: cytochrome p450 [Arabidopsis thaliana]
  misc_feature (1)..(435): Homolog of NCBI NO: 15231541 NR Description: cytochrome p450 family; protein id: At3g26320.1 thaliana] >gi|13878377|sp|Q9LIP4|C72X_ARATH Cytochrome P450 71B36
  misc_feature (1)..(433): Homolog of NCBI NO: 15231538 NR Description: cytochrome p450 family; protein id: At3g26300.1 thaliana] >gi|13878379|sp|Q9LIP6|C72V_ARATH Cytochrome P450 71B34
  misc_feature (1)..(429): Homolog of NCBI NO: 15231539 NR Description: cytochrome p450 family; protein id: At3g26310.1 thaliana] >gi|13878378|sp|Q9LIP5|C72W_ARATH Cytochrome P450 71B35
  misc_feature (1)..(435): Homolog of NCBI NO: 15231537 NR Description: cytochrome p450 family; protein id: At3g26290.1 thaliana] >gi|13878380|sp|Q9LTL0|C72Q_ARATH Cytochrome P450 71B26
  misc_feature (1)..(433): Homolog of NCBI NO: 30696845 NR Description: cytochrome P450 71B10 [Arabidopsis thaliana]
MLLKLGSVPTVVVSSSETAKQVLKINDLHCCSRPSLAGAKELSYNYLDIAFSPFDDYWKELRRICVQELFSAKRVHSIQPIKEEEVRKLIVSATESASQKSPVNLSEKFLDLTVSVICKAAFSLDFHTSVLNNDGFDKLIHDAFLFLGSFSASNFFPNGGWIIDWLTGLQRRREKSVKDLDVFYQQMFDLHKQENKQGVEDFVDLLLKLEKEETVLGYGKLTRNHVKAILMNVLLGAINTSAMTMTWAMAELIRNPRVMKKVQSEIRNQMINKSVITLDDIDHLPYLKMVIKETWRLHPPVPLLLPREVMSEFEINGYKIQPKTLLYVNVWAIGRDPDSWKDADMFYPERFMDNNIDAKGQNFELLPFGSGRRICPGMYMGTTMVEFGLANMLYQFDWEVPDGMVVEDIDMEESPGLAVGKKNELLLVPVKYLGH

SEQ ID NO: 91466 - DNA, 768 bp, Arabidopsis thaliana
  misc_feature (1)..(768): Ceres Seq. ID no. 12727892
  misc_feature: MA Experiment ID: 20000437 Result: Up-regulated in Transcription
  misc_feature: MA Experiment 20000437 PARAMETER Experiment Name: At_Drought_P Parameter: Age (day) Value: 8
  misc_feature: MA Experiment 20000437 PARAMETER Experiment Name: At_Drought_P Parameter: Organism Value: A. thaliana
  misc_feature: MA Experiment 20000437 PARAMETER Experiment Name: At_Drought_P Parameter: Plant Line Value: WS
  misc_feature: MA Experiment 20000437 PARAMETER Experiment Name: At_Drought_P Parameter: Timepoint (hr) Value: 24
  misc_feature: MA Experiment 20000437 PARAMETER Experiment Name: At_Drought_P Parameter: Tissue Value: Whole Plant
  misc_feature: MA Experiment 20000437 PARAMETER Experiment Name: At_Drought_P Parameter: Treatment Value: Drought vs. No Drought
  misc_feature: MA Experiment ID: 20000451 Result: Up-regulated in Transcription
  misc_feature: MA Experiment 20000451 PARAMETER Experiment Name: At_CS6879_Shoots-Roots_P Parameter: Age (day) Value: 14
  misc_feature: MA Experiment 20000451 PARAMETER Experiment Name: At_CS6879_Shoots-Roots_P Parameter: Organism Value: A. thaliana
  misc_feature: MA Experiment 20000451 PARAMETER Experiment Name: At_CS6879_Shoots-Roots_P Parameter: Plant Line Value: CS6879 vs. WS
  misc_feature: MA Experiment 20000451 PARAMETER Experiment Name: At_CS6879_Shoots-Roots_P Parameter: Tissue Value: Roots
  misc_feature: MA Experiment ID: 20000453 Result: Up-regulated in Transcription
  misc_feature: MA Experiment 20000453 PARAMETER Experiment Name: At_100uM_ABA_P Parameter: Age (day) Value: 15
  misc_feature: MA Experiment 20000453 PARAMETER Experiment Name: At_100uM_ABA_P Parameter: Organism Value: A. thaliana
  misc_feature: MA Experiment 20000453 PARAMETER Experiment Name: At_100uM_ABA_P Parameter: Plant Line Value: WS
  misc_feature: MA Experiment 20000453 PARAMETER Experiment Name: At_100uM_ABA_P Parameter: Timepoint (hr) Value: 24
  misc_feature: MA Experiment 20000453 PARAMETER Experiment Name: At_100uM_ABA_P Parameter: Tissue Value: Aerial
  misc_feature: MA Experiment 20000453 PARAMETER Experiment Name: At_100uM_ABA_P Parameter: Treatment Value: 100uM ABA vs. No Treatment
  misc_feature: MA Experiment ID: 20001248 Result: Down-regulated in Transcription
  misc_feature: MA Experiment 20001248 PARAMETER Experiment Name: At_Far-red-induction_P Parameter: Age (day) Value: 7
  misc_feature: MA Experiment 20001248 PARAMETER Experiment Name: At_Far-red-induction_P Parameter: Light Value: Far-red vs. White
  misc_feature: MA Experiment 20001248 PARAMETER Experiment Name: At_Far-red-induction_P Parameter: Organism Value: A. thaliana
  misc_feature: MA Experiment 20001248 PARAMETER Experiment Name: At_Far-red-induction_P Parameter: Plant Line Value: Columbia
  misc_feature: MA Experiment 20001248 PARAMETER Experiment Name: At_Far-red-induction_P Parameter: Timepoint (hr) Value: 4
  misc_feature: MA Experiment 20001248 PARAMETER Experiment Name: At_Far-red-induction_P Parameter: Tissue Value: Whole Plant
  misc_feature: MA Experiment ID: 20001459 Result: Up-regulated in Transcription
  misc_feature: MA Experiment 20001459 PARAMETER Experiment Name: At_50mM_NH4NO3_L-to-H_P Parameter: Age (day) Value: Undefined
  misc_feature: MA Experiment 20001459 PARAMETER Experiment Name: At_50mM_NH4NO3_L-to-H_P Parameter: Organism Value: Undefined
  misc_feature: MA Experiment 20001459 PARAMETER Experiment Name: At_50mM_NH4NO3_L-to-H_P Parameter: Plant Line Value: Undefined
  misc_feature: MA Experiment 20001459 PARAMETER Experiment Name: At_50mM_NH4NO3_L-to-H_P Parameter: Timepoint (hr) Value: 4
  misc_feature: MA Experiment 20001459 PARAMETER Experiment Name: At_50mM_NH4NO3_L-to-H_P Parameter: Tissue Value: Siliques
  misc_feature: MA Experiment 20001459 PARAMETER Experiment Name: At_50mM_NH4NO3_L-to-H_P Parameter: Treatment Value: 50mM NH4NO3 vs. 100mM Manitol
  misc_feature: MA Experiment ID: 20001557 Result: Up-regulated in Transcription
  misc_feature: MA Experiment 20001557 PARAMETER Experiment Name: At_Drought_Soil_Dry_P Parameter: Age (day) Value: 27
  misc_feature: MA Experiment 20001557 PARAMETER Experiment Name: At_Drought_Soil_Dry_P Parameter: Organism Value: A. thaliana
  misc_feature: MA Experiment 20001557 PARAMETER Experiment Name: At_Drought_Soil_Dry_P Parameter: Plant Line Value: WS
  misc_feature: MA Experiment 20001557 PARAMETER Experiment Name: At_Drought_Soil_Dry_P Parameter: Post Timepoint (hr) Value: 3
  misc_feature: MA Experiment 20001557 PARAMETER Experiment Name: At_Drought_Soil_Dry_P Parameter: Post-Treatment Value: Re-Water vs. No Drought
  misc_feature: MA Experiment 20001557 PARAMETER Experiment Name: At_Drought_Soil_Dry_P Parameter: Timepoint (day) Value: 13
  misc_feature: MA Experiment 20001557 PARAMETER Experiment Name: At_Drought_Soil_Dry_P Parameter: Treatment Value: Drought vs. No Drought
  misc_feature: MA Experiment ID: 20001558 Result: Up-regulated in Transcription
  misc_feature: MA Experiment 20001558 PARAMETER Experiment Name: At_Drought_Soil_Dry_P Parameter: Age (day) Value: 27
  misc_feature: MA Experiment 20001558 PARAMETER Experiment Name: At_Drought_Soil_Dry_P Parameter: Organism Value: A. thaliana
  misc_feature: MA Experiment 20001558 PARAMETER Experiment Name: At_Drought_Soil_Dry_P Parameter: Plant Line Value: WS
  misc_feature: MA Experiment 20001558 PARAMETER Experiment Name: At_Drought_Soil_Dry_P Parameter: Post Timepoint (hr) Value: 6
  misc_feature: MA Experiment 20001558 PARAMETER Experiment Name: At_Drought_Soil_Dry_P Parameter: Post-Treatment Value: Re-Water vs. No Drought
  misc_feature: MA Experiment 20001558 PARAMETER Experiment Name: At_Drought_Soil_Dry_P Parameter: Timepoint (day) Value: 13
  misc_feature: MA Experiment 20001558 PARAMETER Experiment Name: At_Drought_Soil_Dry_P Parameter: Treatment Value: Drought vs. No Drought
atgagctattctcgtcaaagcatgggttctggtagtagaagtacaaggggctatgagtttggaaggacttatgttgtgaggcctaaaggaaagcaccaagctactattgtttggttgcacggtcttggagacaatggctccagctcgtctcagctattggaaagcctacctcttccaaacatcaaatggatttgtccaactgctccttcgcgtcctgtttcgcttctcggtggatttccttgcactgcctggtttgacgtgggagaaatttctgaggatcttcatgatgatatagaaggcttagatgcttcagctgcacatattgctaacctattatctgctgagccaacagatgtcaaagttgggataggaggtttcagtatgggtgcagcaatagctctctactccacgacgtgctacgctcttggacgttatggaaccggacatgcttatactataaacctacgagctactgtaggacttagcggttggcttcctggttggaggagcttaaggagcaaaatagaaagttcgaatgaggttgcaaggcgcgctgcatcgataccgatcttacttgcacatggaacttcggacgatgtagttccttatagatttggagaaaaatctgctcattcacttgccatggctggattccgacaaactatgttcaaaccatatgaagggcttggtcactatacggttcctaaagaaatggatgaggtggttcactggctcgtctcaaggcttggtctcgagggttcgcgttaa

SEQ ID NO: 91467 - protein, 255 aa, Arabidopsis thaliana
  peptide (1)..(255): Ceres Seq. ID no. 12727893
  misc_feature (20)..(249): Pfam Name: Phospholipase/Carboxylesterase Pfam Description: Phospholipase/Carboxylesterase
  misc_feature (1)..(255): Homolog of NCBI NO: 15232645 NR Description: putative lysophospholipase; protein id:
  misc_feature (1)..(166): Homolog of NCBI NO: 15219072 NR Description: unknown protein; protein id: At1g52700.1
  misc_feature (197)..(255): Homolog of NCBI NO: 15219072 NR Description: unknown protein; protein id: At1g52700.1
  misc_feature (1)..(253): Homolog of NCBI NO: 15241251 NR Description: putative protein; protein id: At5g20060.1, by cDNA: 42475. [Arabidopsis thaliana] putative lysophospholipase [Arabidopsis thaliana]
  misc_feature (4)..(254): Homolog of NCBI NO: 34910274 NR Description: OSJNBa0089K24.24 [Oryza sativa (japonica
  misc_feature (1)..(166): Homolog of NCBI NO: 5903036 NR Description: F6D8.5 [Arabidopsis thaliana]
  misc_feature (197)..(228): Homolog of NCBI NO: 5903036 NR Description: F6D8.5 [Arabidopsis thaliana]
  misc_feature (1)..(254): Homolog of NCBI NO: 29409364 NR Description: biostress-resistance-related protein [Triticum
  misc_feature (65)..(255): Homolog of NCBI NO: 34912598 NR Description: P0046B10.16 [Oryza sativa (japonica
  misc_feature (102)..(253): Homolog of NCBI NO: 28932772 NR Description: FPh1 [Gossypium hirsutum]
MSYSRQSMGSGSRSTRGYEFGRTYVVRPKGKHQATIVWLHGLGDNGSSSSQLLESLPLPNIKWICPTAPSRPVSLLGGFPCTAWFDVGEISEDLHDDIEGLDASAAHIANLLSAEPTDVKVGIGGFSMGAAIALYSTTCYALGRYGTGHAYTINLRATVGLSGWLPGWRSLRSKIESSNEVARRAASIPILLAHGTSDDVVPYRFGEKSAHSLAMAGFRQTMFKPYEGLGHYTVPKEMDEVVHWLVSRLGLEGSR

SEQ ID NO: 91468 - protein, 248 aa, Arabidopsis thaliana
  peptide (1)..(248): Ceres Seq. ID no. 12727894
  misc_feature (13)..(242): Pfam Name: Phospholipase/Carboxylesterase Pfam Description: Phospholipase/Carboxylesterase
  misc_feature (1)..(248): Homolog of NCBI NO: 15232645 NR Description: putative lysophospholipase; protein id:
  misc_feature (1)..(159): Homolog of NCBI NO: 15219072 NR Description: unknown protein; protein id: At1g52700.1
  misc_feature (190)..(248): Homolog of NCBI NO: 15219072 NR Description: unknown protein; protein id: At1g52700.1
  misc_feature (1)..(246): Homolog of NCBI NO: 15241251 NR Description: putative protein; protein id: At5g20060.1, by cDNA: 42475. [Arabidopsis thaliana] putative lysophospholipase [Arabidopsis thaliana]
  misc_feature (1)..(247): Homolog of NCBI NO: 34910274 NR Description: OSJNBa0089K24.24 [Oryza sativa (japonica
  misc_feature (1)..(159): Homolog of NCBI NO: 5903036 NR Description: F6D8.5 [Arabidopsis thaliana]
  misc_feature (190)..(221): Homolog of NCBI NO: 5903036 NR Description: F6D8.5 [Arabidopsis thaliana]
  misc_feature (1)..(247): Homolog of NCBI NO: 29409364 NR Description: biostress-resistance-related protein [Triticum
  misc_feature (58)..(248): Homolog of NCBI NO: 34912598 NR Description: P0046B10.16 [Oryza sativa (japonica
  misc_feature (95)..(246): Homolog of NCBI NO: 28932772 NR Description: FPh1 [Gossypium hirsutum]
MGSGSRSTRGYEFGRTYVVRPKGKHQATIVWLHGLGDNGSSSSQLLESLPLPNIKWICPTAPSRPVSLLGGFPCTAWFDVGEISEDLHDDIEGLDASAAHIANLLSAEPTDVKVGIGGFSMGAAIALYSTTCYALGRYGTGHAYTINLRATVGLSGWLPGWRSLRSKIESSNEVARRAASIPILLAHGTSDDVVPYRFGEKSAHSLAMAGFRQTMFKPYEGLGHYTVPKEMDEVVHWLVSRLGLEGSR

SEQ ID NO: 91469 - protein, 128 aa, Arabidopsis thaliana
  peptide (1)..(128): Ceres Seq. ID no. 12727895
  misc_feature (1)..(122): Pfam Name: Phospholipase/Carboxylesterase Pfam Description: Phospholipase/Carboxylesterase
  misc_feature (1)..(128): Homolog of NCBI NO: 15232645 NR Description: putative lysophospholipase; protein id:
  misc_feature (1)..(39): Homolog of NCBI NO: 15219072 NR Description: unknown protein; protein id: At1g52700.1
  misc_feature (70)..(128): Homolog of NCBI NO: 15219072 NR Description: unknown protein; protein id: At1g52700.1
  misc_feature (1)..(126): Homolog of NCBI NO: 15241251 NR Description: putative protein; protein id: At5g20060.1, by cDNA: 42475. [Arabidopsis thaliana] putative lysophospholipase [Arabidopsis thaliana]
  misc_feature (1)..(127): Homolog of NCBI NO: 34910274 NR Description: OSJNBa0089K24.24 [Oryza sativa (japonica
  misc_feature (1)..(39): Homolog of NCBI NO: 5903036 NR Description: F6D8.5 [Arabidopsis thaliana]
  misc_feature (70)..(101): Homolog of NCBI NO: 5903036 NR Description: F6D8.5 [Arabidopsis thaliana]
  misc_feature (1)..(127): Homolog of NCBI NO: 29409364 NR Description: biostress-resistance-related protein [Triticum
  misc_feature (1)..(128): Homolog of NCBI NO: 34912598 NR Description: P0046B10.16 [Oryza sativa (japonica
  misc_feature (1)..(126): Homolog of NCBI NO: 28932772 NR Description: FPh1 [Gossypium hirsutum]
MGAAIALYSTTCYALGRYGTGHAYTINLRATVGLSGWLPGWRSLRSKIESSNEVARRAASIPILLAHGTSDDVVPYRFGEKSAHSLAMAGFRQTMFKPYEGLGHYTVPKEMDEVVHWLVSRLGLEGSR

SEQ ID NO: 91470 - DNA, 1200 bp, Arabidopsis thaliana
  misc_feature (1)..(1200): Ceres Seq. ID no. 12727909
  misc_feature: MA Experiment ID: 20000437 Result: Up-regulated in Transcription
  misc_feature: MA Experiment 20000437 PARAMETER Experiment Name: At_Drought_P Parameter: Age (day) Value: 8
  misc_feature: MA Experiment 20000437 PARAMETER Experiment Name: At_Drought_P Parameter: Organism Value: A. thaliana
  misc_feature: MA Experiment 20000437 PARAMETER Experiment Name: At_Drought_P Parameter: Plant Line Value: WS
  misc_feature: MA Experiment 20000437 PARAMETER Experiment Name: At_Drought_P Parameter: Timepoint (hr) Value: 24
  misc_feature: MA Experiment 20000437 PARAMETER Experiment Name: At_Drought_P Parameter: Tissue Value: Whole Plant
  misc_feature: MA Experiment 20000437 PARAMETER Experiment Name: At_Drought_P Parameter: Treatment Value: Drought vs. No Drought
  misc_feature: MA Experiment ID: 20000439 Result: Up-regulated in Transcription
  misc_feature: MA Experiment 20000439 PARAMETER Experiment Name: At_Roots__P Parameter: Age (day) Value: 14 vs. 21
  misc_feature: MA Experiment 20000439 PARAMETER Experiment Name: At_Roots__P Parameter: Organism Value: A. thaliana
  misc_feature: MA Experiment 20000439 PARAMETER Experiment Name: At_Roots__P Parameter: Tissue Value: Roots vs. Whole Plant
atgggttattgtgttcctcttcgaaagtctccaacttcacatatggttttctcttctttcttcctttcgtttctcttagtcttctctatactctcttcacaaacggccgtagcattcatcggaacatatggtgtaaactacggtcgcatagcggataatcttccgtctcctgacgcggtagcaactctccttaaatcagcaaagattagaaacacccgtatctacgatgctgaccactctgtactcacggcgttccgcgggaccgggattgaaatcatcgttggcttaggcaacgagtttctcaaagacattagtgtaggagaagaccgagccatgaactggattaaagaaaacgtcgagcctttcatacgaggcggtactaaaattagcggtatcgcggtgggtaacgagattttaggtggcaccgatatcgggctttgggaagctctcttacccgcagccaagaacgtttactccgctcttcgccgtctcggtcttcacaatgtcgtcgaggtgtcgagtccacattcagaggcagtgtttgcgaactcgtatccaccgtcttcgtgtacgttcagggacgatgtggcgccgtttatgaagccgttgttagcgtttttttggcaaattcagtcgccgttctacattaacgcctacccttttcttgcatataaatccgacccgattacaattgacatcaattacgcccttttcgagcacaacaaaggcatcttggaccctaaaaccaagcttcattacgataacatgttcgacgccatggtcgatgcttcttatgctgctctcgaaaaagctggctacacaaaagtcccggtgattgtttcggagacgggatgggcatcaaaaggcgatgcagacgagcctggagcgtcggtaaagaacgcgagaacatataatcggaatcttaggaagcggctgcagaagaggaaaggaacaccgtacagaccagacatggtggtgagagcttacgtgtttgctcttttcaacgagaactcgaaaccaggtcccacttccgagagaaactttggcctttttaaacccgatggtactattgcctacgatattggcttaaccggactcaagtcctcttctgccacacggtatcgttttaagtcgtctcttgtttccgcttctgctttcacgtgtcttcttcttctttttcaccggttgttccacttgtga

SEQ ID NO: 91471 - protein, 399 aa, Arabidopsis thaliana
  peptide (1)..(399): Ceres Seq. ID no. 12727910
  misc_feature (43)..(363): Pfam Name: Glycosyl hydrolases family 17 Pfam Description: Glycosyl hydrolases family 17
  misc_feature (1)..(399): Homolog of NCBI NO: 15232696 NR Description: glycosyl hydrolase family 17; protein id:
  misc_feature (27)..(399): Homolog of NCBI NO: 11994352 NR Description: beta-1,3-glucanase-like protein [Arabidopsis
  misc_feature (12)..(390): Homolog of NCBI NO: 18401187 NR Description: glycosyl hydrolase family 17; protein id: supported by cDNA: 95083. [Arabidopsis thaliana]
  misc_feature (12)..(390): Homolog of NCBI NO: 21618052 NR Description: putative beta-1,3-glucanase [Arabidopsis thaliana]
  misc_feature (41)..(373): Homolog of NCBI NO: 15209173 NR Description: putative elicitor inducible chitinase [Solanum
  misc_feature (37)..(370): Homolog of NCBI NO: 7447981 NR Description: probable beta-1,3-glucanase At2g26600 [imported]
  misc_feature (104)..(390): Homolog of NCBI NO: 26452328 NR Description: putative beta-1,3-glucanase [Arabidopsis
  misc_feature (104)..(390): Homolog of NCBI NO: 30683187 NR Description: glycosyl hydrolase family 17 [Arabidopsis
  misc_feature (18)..(379): Homolog of NCBI NO: 25316425 NR Description: probable beta-1,3-glucanase [imported] -
  misc_feature (18)..(365): Homolog of NCBI NO: 18401444 NR Description: glycosyl hydrolase family 17; protein id: supported by cDNA: 1126., supported by cDNA: gi_17473571,
MGYCVPLRKSPTSHMVFSSFFLSFLLVFSILSSQTAVAFIGTYGVNYGRIADNLPSPDAVATLLKSAKIRNTRIYDADHSVLTAFRGTGIEIIVGLGNEFLKDISVGEDRAMNWIKENVEPFIRGGTKISGIAVGNEILGGTDIGLWEALLPAAKNVYSALRRLGLHNVVEVSSPHSEAVFANSYPPSSCTFRDDVAPFMKPLLAFFWQIQSPFYINAYPFLAYKSDPITIDINYALFEHNKGILDPKTKLHYDNMFDAMVDASYAALEKAGYTKVPVIVSETGWASKGDADEPGASVKNARTYNRNLRKRLQKRKGTPYRPDMVVRAYVFALFNENSKPGPTSERNFGLFKPDGTIAYDIGLTGLKSSSATRYRFKSSLVSASAFTCLLLLFHRLFHL

SEQ ID NO: 91472 - protein, 385 aa, Arabidopsis thaliana
  peptide (1)..(385): Ceres Seq. ID no. 12727911
  misc_feature (29)..(349): Pfam Name: Glycosyl hydrolases family 17 Pfam Description: Glycosyl hydrolases family 17
  misc_feature (1)..(385): Homolog of NCBI NO: 15232696 NR Description: glycosyl hydrolase family 17; protein id:
  misc_feature (13)..(385): Homolog of NCBI NO: 11994352 NR Description: beta-1,3-glucanase-like protein [Arabidopsis
  misc_feature (1)..(376): Homolog of NCBI NO: 18401187 NR Description: glycosyl hydrolase family 17; protein id: supported by cDNA: 95083. [Arabidopsis thaliana]
  misc_feature (1)..(376): Homolog of NCBI NO: 21618052 NR Description: putative beta-1,3-glucanase [Arabidopsis thaliana]
  misc_feature (27)..(359): Homolog of NCBI NO: 15209173 NR Description: putative elicitor inducible chitinase [Solanum
  misc_feature (23)..(356): Homolog of NCBI NO: 7447981 NR Description: probable beta-1,3-glucanase At2g26600 [imported]
  misc_feature (90)..(376): Homolog of NCBI NO: 26452328 NR Description: putative beta-1,3-glucanase [Arabidopsis
  misc_feature (90)..(376): Homolog of NCBI NO: 30683187 NR Description: glycosyl hydrolase family 17 [Arabidopsis
  misc_feature (4)..(365): Homolog of NCBI NO: 25316425 NR Description: probable beta-1,3-glucanase [imported] -
  misc_feature (4)..(351): Homolog of NCBI NO: 18401444 NR Description: glycosyl hydrolase family 17; protein id: supported by cDNA: 1126., supported by cDNA: gi_17473571,
MVFSSFFLSFLLVFSILSSQTAVAFIGTYGVNYGRIADNLPSPDAVATLLKSAKIRNTRIYDADHSVLTAFRGTGIEIIVGLGNEFLKDISVGEDRAMNWIKENVEPFIRGGTKISGIAVGNEILGGTDIGLWEALLPAAKNVYSALRRLGLHNVVEVSSPHSEAVFANSYPPSSCTFRDDVAPFMKPLLAFFWQIQSPFYINAYPFLAYKSDPITIDINYALFEHNKGILDPKTKLHYDNMFDAMVDASYAALEKAGYTKVPVIVSETGWASKGDADEPGASVKNARTYNRNLRKRLQKRKGTPYRPDMVVRAYVFALFNENSKPGPTSERNFGLFKPDGTIAYDIGLTGLKSSSATRYRFKSSLVSASAFTCLLLLFHRLFHL

SEQ ID NO: 91473 - protein, 288 aa, Arabidopsis thaliana
  peptide (1)..(288): Ceres Seq. ID no. 12727912
  misc_feature (1)..(252): Pfam Name: Glycosyl hydrolases family 17 Pfam Description: Glycosyl hydrolases family 17
  misc_feature (1)..(288): Homolog of NCBI NO: 15232696 NR Description: glycosyl hydrolase family 17; protein id:
  misc_feature (1)..(288): Homolog of NCBI NO: 11994352 NR Description: beta-1,3-glucanase-like protein [Arabidopsis
  misc_feature (1)..(279): Homolog of NCBI NO: 18401187 NR Description: glycosyl hydrolase family 17; protein id: supported by cDNA: 95083. [Arabidopsis thaliana]
  misc_feature (1)..(279): Homolog of NCBI NO: 21618052 NR Description: putative beta-1,3-glucanase [Arabidopsis thaliana]
  misc_feature (1)..(262): Homolog of NCBI NO: 15209173 NR Description: putative elicitor inducible chitinase [Solanum
  misc_feature (1)..(259): Homolog of NCBI NO: 7447981 NR Description: probable beta-1,3-glucanase At2g26600 [imported]
  misc_feature (1)..(279): Homolog of NCBI NO: 26452328 NR Description: putative beta-1,3-glucanase [Arabidopsis
  misc_feature (1)..(279): Homolog of NCBI NO: 30683187 NR Description: glycosyl hydrolase family 17 [Arabidopsis
  misc_feature (1)..(268): Homolog of NCBI NO: 25316425 NR Description: probable beta-1,3-glucanase [imported] -
  misc_feature (1)..(254): Homolog of NCBI NO: 18401444 NR Description: glycosyl hydrolase family 17; protein id: supported by cDNA: 1126., supported by cDNA: gi_17473571,
MNWIKENVEPFIRGGTKISGIAVGNEILGGTDIGLWEALLPAAKNVYSALRRLGLHNVVEVSSPHSEAVFANSYPPSSCTFRDDVAPFMKPLLAFFWQIQSPFYINAYPFLAYKSDPITIDINYALFEHNKGILDPKTKLHYDNMFDAMVDASYAALEKAGYTKVPVIVSETGWASKGDADEPGASVKNARTYNRNLRKRLQKRKGTPYRPDMVVRAYVFALFNENSKPGPTSERNFGLFKPDGTIAYDIGLTGLKSSSATRYRFKSSLVSASAFTCLLLLFHRLFHL

SEQ ID NO: 91474 - DNA, 2256 bp, Arabidopsis thaliana
  misc_feature (1)..(2256): Ceres Seq. ID no. 12727913
  misc_feature: MA Experiment ID: 20000182 Result: Up-regulated in Transcription
  misc_feature: MA Experiment 20000182 PARAMETER Experiment Name: At_2mM_SA_P Parameter: Age (day) Value: 14
  misc_feature: MA Experiment 20000182 PARAMETER Experiment Name: At_2mM_SA_P Parameter: Organism Value: A. thaliana
  misc_feature: MA Experiment 20000182 PARAMETER Experiment Name: At_2mM_SA_P Parameter: Plant Line Value: WS
  misc_feature: MA Experiment 20000182 PARAMETER Experiment Name: At_2mM_SA_P Parameter: Timepoint (hr) Value: 6
  misc_feature: MA Experiment 20000182 PARAMETER Experiment Name: At_2mM_SA_P Parameter: Tissue Value: Aerial
  misc_feature: MA Experiment 20000182 PARAMETER Experiment Name: At_2mM_SA_P Parameter: Treatment Value: 2mM SA vs. No Treatment
  misc_feature: MA Experiment ID: 20000185 Result: Up-regulated in Transcription
  misc_feature: MA Experiment 20000185 PARAMETER Experiment Name: At_Roots__P Parameter: Age (day) Value: 7 vs. 21
  misc_feature: MA Experiment 20000185 PARAMETER Experiment Name: At_Roots__P Parameter: Organism Value: A. thaliana
  misc_feature: MA Experiment 20000185 PARAMETER Experiment Name: At_Roots__P Parameter: Tissue Value: Roots vs. Whole Plant
  misc_feature: MA Experiment ID: 20000227 Result: Down-regulated in Transcription
  misc_feature: MA Experiment 20000227 PARAMETER Experiment Name: At_Root-Tips-vs-Tops_P Parameter: Tissue Value: Root Tips vs. Root Tops
  misc_feature: MA Experiment ID: 20000234 Result: Up-regulated in Transcription
  misc_feature: MA Experiment 20000234 PARAMETER Experiment Name: At_Siliques_P Parameter: Age (day) Value: 21
  misc_feature: MA Experiment 20000234 PARAMETER Experiment Name: At_Siliques_P Parameter: Organism Value: A. thaliana
  misc_feature: MA Experiment 20000234 PARAMETER Experiment Name: At_Siliques_P Parameter: Plant Line Value: WS
  misc_feature: MA Experiment 20000234 PARAMETER Experiment Name: At_Siliques_P Parameter: Tissue Value: Less Than 5mm Siliques vs. Whole Plant
  misc_feature: MA Experiment ID: 20000437 Result: Up-regulated in Transcription
  misc_feature: MA Experiment 20000437 PARAMETER Experiment Name: At_Drought_P Parameter: Age (day) Value: 8
  misc_feature: MA Experiment 20000437 PARAMETER Experiment Name: At_Drought_P Parameter: Organism Value: A. thaliana
  misc_feature: MA Experiment 20000437 PARAMETER Experiment Name: At_Drought_P Parameter: Plant Line Value: WS
  misc_feature: MA Experiment 20000437 PARAMETER Experiment Name: At_Drought_P Parameter: Timepoint (hr) Value: 24
  misc_feature: MA Experiment 20000437 PARAMETER Experiment Name: At_Drought_P Parameter: Tissue Value: Whole Plant
  misc_feature: MA Experiment 20000437 PARAMETER Experiment Name: At_Drought_P Parameter: Treatment Value: Drought vs. No Drought
  misc_feature: MA Experiment ID: 20000439 Result: Up-regulated in Transcription
  misc_feature: MA Experiment 20000439 PARAMETER Experiment Name: At_Roots__P Parameter: Age (day) Value: 14 vs. 21
  misc_feature: MA Experiment 20000439 PARAMETER Experiment Name: At_Roots__P Parameter: Organism Value: A. thaliana
  misc_feature: MA Experiment 20000439 PARAMETER Experiment Name: At_Roots__P Parameter: Tissue Value: Roots vs. Whole Plant
  misc_feature: MA Experiment ID: 20000441 Result: Down-regulated in Transcription
  misc_feature: MA Experiment 20000441 PARAMETER Experiment Name: At_1uM_BR-BRZ__P Parameter: Tissue Value: Shoot Apices
  misc_feature: MA Experiment 20000441 PARAMETER Experiment Name: At_1uM_BR-BRZ__P Parameter: Treatment Value: 1uM BR vs. No Treatment
  misc_feature: MA Experiment ID: 20000495 Result: Up-regulated in Transcription
  misc_feature: MA Experiment 20000495 PARAMETER Experiment Name: At_Guard_Cells_P Parameter: Harvest Date Value: 8/2/2002
  misc_feature: MA Experiment 20000495 PARAMETER Experiment Name: At_Guard_Cells_P Parameter: Organism Value: A. thaliana
  misc_feature: MA Experiment 20000495 PARAMETER Experiment Name: At_Guard_Cells_P Parameter: Tissue Value: Guard Cells vs. Leaves
  misc_feature: MA Experiment ID: 20001248 Result: Down-regulated in Transcription
  misc_feature: MA Experiment 20001248 PARAMETER Experiment Name: At_Far-red-induction_P Parameter: Age (day) Value: 7
  misc_feature: MA Experiment 20001248 PARAMETER Experiment Name: At_Far-red-induction_P Parameter: Light Value: Far-red vs. White
  misc_feature: MA Experiment 20001248 PARAMETER Experiment Name: At_Far-red-induction_P Parameter: Organism Value: A. thaliana
  misc_feature: MA Experiment 20001248 PARAMETER Experiment Name: At_Far-red-induction_P Parameter: Plant Line Value: Columbia
  misc_feature: MA Experiment 20001248 PARAMETER Experiment Name: At_Far-red-induction_P Parameter: Timepoint (hr) Value: 4
  misc_feature: MA Experiment 20001248 PARAMETER Experiment Name: At_Far-red-induction_P Parameter: Tissue Value: Whole Plant
  misc_feature: MA Experiment ID: 20001555 Result: Up-regulated in Transcription
  misc_feature: MA Experiment 20001555 PARAMETER Experiment Name: At_Drought_Soil_Dry_P Parameter: Age (day) Value: 24
  misc_feature: MA Experiment 20001555 PARAMETER Experiment Name: At_Drought_Soil_Dry_P Parameter: Organism Value: A. thaliana
  misc_feature: MA Experiment 20001555 PARAMETER Experiment Name: At_Drought_Soil_Dry_P Parameter: Plant Line Value: WS
  misc_feature: MA Experiment 20001555 PARAMETER Experiment Name: At_Drought_Soil_Dry_P Parameter: Post Timepoint (hr) Value: None
  misc_feature: MA Experiment 20001555 PARAMETER Experiment Name: At_Drought_Soil_Dry_P Parameter: Post-Treatment Value: None
  misc_feature: MA Experiment 20001555 PARAMETER Experiment Name: At_Drought_Soil_Dry_P Parameter: Timepoint (day) Value: 10
  misc_feature: MA Experiment 20001555 PARAMETER Experiment Name: At_Drought_Soil_Dry_P Parameter: Treatment Value: Drought vs. No Drought
  misc_feature: MA Experiment ID: 20001906 Result: Up-regulated in Transcription
  misc_feature: MA Experiment 20001906 PARAMETER Experiment Name: At_Drought_Reproduction_P Parameter: Age (day) Value: 35
  misc_feature: MA Experiment 20001906 PARAMETER Experiment Name: At_Drought_Reproduction_P Parameter: Organism Value: A. thaliana
  misc_feature: MA Experiment 20001906 PARAMETER Experiment Name: At_Drought_Reproduction_P Parameter: Plant Line Value: WS
  misc_feature: MA Experiment 20001906 PARAMETER Experiment Name: At_Drought_Reproduction_P Parameter: Timepoint (day) Value: 5
  misc_feature: MA Experiment 20001906 PARAMETER Experiment Name: At_Drought_Reproduction_P Parameter: Tissue Value: Siliques
  misc_feature: MA Experiment 20001906 PARAMETER Experiment Name: At_Drought_Reproduction_P Parameter: Treatment Value: Drought vs. No Drought
  misc_feature: MA Experiment ID: 20001911 Result: Up-regulated in Transcription
  misc_feature: MA Experiment 20001911 PARAMETER Experiment Name: At_Drought_Reproduction_P Parameter: Age (day) Value: 40
  misc_feature: MA Experiment 20001911 PARAMETER Experiment Name: At_Drought_Reproduction_P Parameter: Organism Value: A. thaliana
  misc_feature: MA Experiment 20001911 PARAMETER Experiment Name: At_Drought_Reproduction_P Parameter: Plant Line Value: WS
  misc_feature: MA Experiment 20001911 PARAMETER Experiment Name: At_Drought_Reproduction_P Parameter: Timepoint (day) Value: 10
  misc_feature: MA Experiment 20001911 PARAMETER Experiment Name: At_Drought_Reproduction_P Parameter: Tissue Value: Flowers
  misc_feature: MA Experiment 20001911 PARAMETER Experiment Name: At_Drought_Reproduction_P Parameter: Treatment Value: Drought vs. No Drought
acaacacaatctcacaacaattacacactaaacaaaattcaattttgcatctccatttctcgagaaactttcgttttcgtagacttataaaaccatgggtcatggcactaacagagtagaagacatggcgtcaccaaacaatggaaccgcaggagaaacggtcgtggagatacacagcgtttgtctaccgccgaagaaaacagcgtttcagaaactgaaaaaacgcgttggggacgtgttcttccctgatgatccgttacagaggtttaggaaccaaacatggagaaacagagtgattctaggtcttcaaagcttgttcccgatattcacatggggttctcagtacgatctcaagcttcttaggtccgatgttatctctggtctcaccattgccagtctcgccattcctcagggaatcagctatgcaaagctagcaaacttaccacctatagttggtctttattcaagctttgtgccaccactgatatatgcagttcttgggagttcaagacatcttgcagttggtcctgtctcaatagcatcacttgtgatgggctcaatgctaagtgaaagtgtttcaccaacacaagattcaattctatatctcaaattggctttcacttcaactttctttgctggtgtcttccaagcctcccttggccttcttaggctaggatttatgattgactttttgtcaaaggcaactttgattggtttcactgctggtgctgcagttatcgtgtcacttcaacaacttaagggtcttcttggaattgttcatttcactggcaaaatgcaaattgttcctgtcatgtcttctgttttcaaccatagatctgaatggtcttgggaaactattgtcatggggattggcttcttgagcattctcttaaccacaagacacattagcatgaggaagccaaaactgttctggatatctgctgcatcacctttggcatcggttattatatcaactctgcttgtatacctcattagatccaagactcatgccatctctttcattggacatctaccaaagggtttgaatccaccttcattaaacatgttgtacttcagtggtgctcatcttgctcttgccatcaaaaccggtatcatcaccgggattctttctcttacagaagggattgctgtagggagaacctttgcatctctaaagaactatcaagttaatggaaacaaagaaatgatggctataggttttatgaacatggctggttcttgcacctcttgctatgttacaacagggtctttctctcgatctgcggtaaactataatgctggagcgaaaacagcggtttctaacattgtgatggcctctgcagttctagtgacccttctgtttttgatgccactcttctattacactcctaatgtgatcctagctgctatcatcttaaccgcggtgataggcctcattgattatcaagcggcttacaagctttggaaagttgacaaattcgatttcttcacttgcttgtgttccttctttggcgttctctttgtttctgtacctcttggcctagcaatagcagtggcagtttcagttatcaagatcttgttgcacgtaaccaggccaaacacttcagaatttgggaatatcccagggactcagatttatcagagtcttggaagatacagagaagcttcaagaatcccaggcttcctaatccttgctattgaatctcctatatatttcgccaatagcacttatcttcaagacaggattttgagatgggccagggaagaggaaaatcggataaaggagaacaatggtactaccttgaaatgcataattcttgacatgacagctgtgtctgcgatagacacaagcgggcttgaagcggtgtttgaacttaggaggagactcgagaagcaatctcttcagcttgtgctggtgaatcctgtggggactgtgatggaaaagctacacaagtccaagatcattgaggcattgggtctgagtggactttatctaacagttggtgaagctgtggctgatctctcatcaacatggaaagctaatggccagccttgaaacaaagcagtctctaatctaatagagagactgtttctgaagatggagcagcctcttgtgaaacatttttggtgctagctgaaaactccttgagggagtttctgttttaattgtagaataaatgtaatttcatcttttaacaattcggtatgtatacataatttggatataaatagcctatgcaaagcatttatcttctc

SEQ ID NO: 91475 - protein, 653 aa, Arabidopsis thaliana
  peptide (1)..(653): Ceres Seq. ID no. 12727914
  misc_feature (188)..(498): Pfam Name: Sulfate transporter family Pfam Description: Sulfate transporter family
  misc_feature (24)..(644): Homolog of NCBI NO: 15220016 NR Description: putative sulphate transporter protein; protein
  misc_feature (24)..(644): Homolog of NCBI NO: 4579913 NR Description: sulfate transporter [Arabidopsis thaliana]
  misc_feature (2)..(648): Homolog of NCBI NO: 1907270 NR Description: sulphate transporter protein [Sporobolus
  misc_feature (9)..(640): Homolog of NCBI NO: 11279065 NR Description: sulfate transporter ATST1 [imported] - thaliana >gi|2285885|dbj|BAA21657.1| sulfate transporter
  misc_feature (9)..(640): Homolog of NCBI NO: 11279064 NR Description: hypothetical protein [imported] - Arabidopsis
  misc_feature (9)..(640): Homolog of NCBI NO: 15231069 NR Description: sulfate transporter ATST1; protein id: supported by cDNA: gi_20466813, supported by cDNA: gi_2285884
  misc_feature (31)..(642): Homolog of NCBI NO: 34902632 NR Description: Putative sulfate transporter ATST1 [Oryza sativa
  misc_feature (9)..(640): Homolog of NCBI NO: 11279066 NR Description: sulfate transporter AST12 [imported] - thaliana >gi|2967456|dbj|BAA25175.1| sulfate transporter
  misc_feature (1)..(640): Homolog of NCBI NO: 24421083 NR Description: sulphate transporter [Triticum aestivum]
  misc_feature (1)..(640): Homolog of NCBI NO: 15238085 NR Description: sulfate transporter; protein id: At5g10180.1, by cDNA: gi_17064939, supported by cDNA: gi_20259973, supported
MGHGTNRVEDMASPNNGTAGETVVEIHSVCLPPKKTAFQKLKKRVGDVFFPDDPLQRFRNQTWRNRVILGLQSLFPIFTWGSQYDLKLLRSDVISGLTIASLAIPQGISYAKLANLPPIVGLYSSFVPPLIYAVLGSSRHLAVGPVSIASLVMGSMLSESVSPTQDSILYLKLAFTSTFFAGVFQASLGLLRLGFMIDFLSKATLIGFTAGAAVIVSLQQLKGLLGIVHFTGKMQIVPVMSSVFNHRSEWSWETIVMGIGFLSILLTTRHISMRKPKLFWISAASPLASVIISTLLVYLIRSKTHAISFIGHLPKGLNPPSLNMLYFSGAHLALAIKTGIITGILSLTEGIAVGRTFASLKNYQVNGNKEMMAIGFMNMAGSCTSCYVTTGSFSRSAVNYNAGAKTAVSNIVMASAVLVTLLFLMPLFYYTPNVILAAIILTAVIGLIDYQAAYKLWKVDKFDFFTCLCSFFGVLFVSVPLGLAIAVAVSVIKILLHVTRPNTSEFGNIPGTQIYQSLGRYREASRIPGFLILAIESPIYFANSTYLQDRILRWAREEENRIKENNGTTLKCIILDMTAVSAIDTSGLEAVFELRRRLEKQSLQLVLVNPVGTVMEKLHKSKIIEALGLSGLYLTVGEAVADLSSTWKANGQP

SEQ ID NO: 91476 - protein, 643 aa, Arabidopsis thaliana
  peptide (1)..(643): Ceres Seq. ID no. 12727915
  misc_feature (178)..(488): Pfam Name: Sulfate transporter family Pfam Description: Sulfate transporter family
  misc_feature (14)..(634): Homolog of NCBI NO: 15220016 NR Description: putative sulphate transporter protein; protein
  misc_feature (14)..(634): Homolog of NCBI NO: 4579913 NR Description: sulfate transporter [Arabidopsis thaliana]
  misc_feature (1)..(638): Homolog of NCBI NO: 1907270 NR Description: sulphate transporter protein [Sporobolus
  misc_feature (1)..(630): Homolog of NCBI NO: 11279065 NR Description: sulfate transporter ATST1 [imported] - thaliana >gi|2285885|dbj|BAA21657.1| sulfate transporter
  misc_feature (1)..(630): Homolog of NCBI NO: 11279064 NR Description: hypothetical protein [imported] - Arabidopsis
  misc_feature (1)..(630): Homolog of NCBI NO: 15231069 NR Description: sulfate transporter ATST1; protein id: supported by cDNA: gi_20466813, supported by cDNA: gi_2285884
  misc_feature (21)..(632): Homolog of NCBI NO: 34902632 NR Description: Putative sulfate transporter ATST1 [Oryza sativa
  misc_feature (1)..(630): Homolog of NCBI NO: 11279066 NR Description: sulfate transporter AST12 [imported] - thaliana >gi|2967456|dbj|BAA25175.1| sulfate transporter
  misc_feature (1)..(630): Homolog of NCBI NO: 24421083 NR Description: sulphate transporter [Triticum aestivum]
  misc_feature (1)..(630): Homolog of NCBI NO: 15238085 NR Description: sulfate transporter; protein id: At5g10180.1, by cDNA: gi_17064939, supported by cDNA: gi_20259973, supported
MASPNNGTAGETVVEIHSVCLPPKKTAFQKLKKRVGDVFFPDDPLQRFRNQTWRNRVILGLQSLFPIFTWGSQYDLKLLRSDVISGLTIASLAIPQGISYAKLANLPPIVGLYSSFVPPLIYAVLGSSRHLAVGPVSIASLVMGSMLSESVSPTQDSILYLKLAFTSTFFAGVFQASLGLLRLGFMIDFLSKATLIGFTAGAAVIVSLQQLKGLLGIVHFTGKMQIVPVMSSVFNHRSEWSWETIVMGIGFLSILLTTRHISMRKPKLFWISAASPLASVIISTLLVYLIRSKTHAISFIGHLPKGLNPPSLNMLYFSGAHLALAIKTGIITGILSLTEGIAVGRTFASLKNYQVNGNKEMMAIGFMNMAGSCTSCYVTTGSFSRSAVNYNAGAKTAVSNIVMASAVLVTLLFLMPLFYYTPNVILAAIILTAVIGLIDYQAAYKLWKVDKFDFFTCLCSFFGVLFVSVPLGLAIAVAVSVIKILLHVTRPNTSEFGNIPGTQIYQSLGRYREASRIPGFLILAIESPIYFANSTYLQDRILRWAREEENRIKENNGTTLKCIILDMTAVSAIDTSGLEAVFELRRRLEKQSLQLVLVNPVGTVMEKLHKSKIIEALGLSGLYLTVGEAVADLSSTWKANGQP

SEQ ID NO: 91477 - protein, 501 aa, Arabidopsis thaliana
  peptide (1)..(501): Ceres Seq. ID no. 12727916
  misc_feature (36)..(346): Pfam Name: Sulfate transporter family Pfam Description: Sulfate transporter family
  misc_feature (1)..(492): Homolog of NCBI NO: 15220016 NR Description: putative sulphate transporter protein; protein
  misc_feature (1)..(492): Homolog of NCBI NO: 4579913 NR Description: sulfate transporter [Arabidopsis thaliana]
  misc_feature (1)..(496): Homolog of NCBI NO: 1907270 NR Description: sulphate transporter protein [Sporobolus
  misc_feature (1)..(488): Homolog of NCBI NO: 11279065 NR Description: sulfate transporter ATST1 [imported] - thaliana >gi|2285885|dbj|BAA21657.1| sulfate transporter
  misc_feature (1)..(488): Homolog of NCBI NO: 11279064 NR Description: hypothetical protein [imported] - Arabidopsis
  misc_feature (1)..(488): Homolog of NCBI NO: 15231069 NR Description: sulfate transporter ATST1; protein id: supported by cDNA: gi_20466813, supported by cDNA: gi_2285884
  misc_feature (1)..(490): Homolog of NCBI NO: 34902632 NR Description: Putative sulfate transporter ATST1 [Oryza sativa
  misc_feature (1)..(488): Homolog of NCBI NO: 11279066 NR Description: sulfate transporter AST12 [imported] - thaliana >gi|2967456|dbj|BAA25175.1| sulfate transporter
  misc_feature (1)..(488): Homolog of NCBI NO: 24421083 NR Description: sulphate transporter [Triticum aestivum]
  misc_feature (1)..(488): Homolog of NCBI NO: 15238085 NR Description: sulfate transporter; protein id: At5g10180.1, by cDNA: gi_17064939, supported by cDNA: gi_20259973, supported
MGSMLSESVSPTQDSILYLKLAFTSTFFAGVFQASLGLLRLGFMIDFLSKATLIGFTAGAAVIVSLQQLKGLLGIVHFTGKMQIVPVMSSVFNHRSEWSWETIVMGIGFLSILLTTRHISMRKPKLFWISAASPLASVIISTLLVYLIRSKTHAISFIGHLPKGLNPPSLNMLYFSGAHLALAIKTGIITGILSLTEGIAVGRTFASLKNYQVNGNKEMMAIGFMNMAGSCTSCYVTTGSFSRSAVNYNAGAKTAVSNIVMASAVLVTLLFLMPLFYYTPNVILAAIILTAVIGLIDYQAAYKLWKVDKFDFFTCLCSFFGVLFVSVPLGLAIAVAVSVIKILLHVTRPNTSEFGNIPGTQIYQSLGRYREASRIPGFLILAIESPIYFANSTYLQDRILRWAREEENRIKENNGTTLKCIILDMTAVSAIDTSGLEAVFELRRRLEKQSLQLVLVNPVGTVMEKLHKSKIIEALGLSGLYLTVGEAVADLSSTWKANGQP

SEQ ID NO: 91478 - DNA, 1334 bp, Arabidopsis thaliana
  misc_feature (1)..(1334): Ceres Seq. ID no. 12727921
  misc_feature: MA Experiment ID: 20000171 Result: Up-regulated in Transcription
  misc_feature: MA Experiment 20000171 PARAMETER Experiment Name: At_42deg_Heat_P Parameter: Age (day) Value: 14
  misc_feature: MA Experiment 20000171 PARAMETER Experiment Name: At_42deg_Heat_P Parameter: Organism Value: A. thaliana
  misc_feature: MA Experiment 20000171 PARAMETER Experiment Name: At_42deg_Heat_P Parameter: Plant Line Value: WS
  misc_feature: MA Experiment 20000171 PARAMETER Experiment Name: At_42deg_Heat_P Parameter: Temperature (deg C) Value: 42 vs. 22
  misc_feature: MA Experiment 20000171 PARAMETER Experiment Name: At_42deg_Heat_P Parameter: Timepoint (hr) Value: 1
  misc_feature: MA Experiment 20000171 PARAMETER Experiment Name: At_42deg_Heat_P Parameter: Tissue Value: Aerial
  misc_feature: MA Experiment ID: 20000173 Result: Up-regulated in Transcription
  misc_feature: MA Experiment 20000173 PARAMETER Experiment Name: At_42deg_Heat_P Parameter: Age (day) Value: 14
  misc_feature: MA Experiment 20000173 PARAMETER Experiment Name: At_42deg_Heat_P Parameter: Organism Value: A. thaliana
  misc_feature: MA Experiment 20000173 PARAMETER Experiment Name: At_42deg_Heat_P Parameter: Plant Line Value: WS
  misc_feature: MA Experiment 20000173 PARAMETER Experiment Name: At_42deg_Heat_P Parameter: Temperature (deg C) Value: 42 vs. 22
  misc_feature: MA Experiment 20000173 PARAMETER Experiment Name: At_42deg_Heat_P Parameter: Timepoint (hr) Value: 6
  misc_feature: MA Experiment 20000173 PARAMETER Experiment Name: At_42deg_Heat_P Parameter: Tissue Value: Aerial
  misc_feature: MA Experiment ID: 20000234 Result: Up-regulated in Transcription
  misc_feature: MA Experiment 20000234 PARAMETER Experiment Name: At_Siliques_P Parameter: Age (day) Value: 21
  misc_feature: MA Experiment 20000234 PARAMETER Experiment Name: At_Siliques_P Parameter: Organism Value: A. thaliana
  misc_feature: MA Experiment 20000234 PARAMETER Experiment Name: At_Siliques_P Parameter: Plant Line Value: WS
  misc_feature: MA Experiment 20000234 PARAMETER Experiment Name: At_Siliques_P Parameter: Tissue Value: Less Than 5mm Siliques vs. Whole Plant
  misc_feature: MA Experiment ID: 20000437 Result: Up-regulated in Transcription
  misc_feature: MA Experiment 20000437 PARAMETER Experiment Name: At_Drought_P Parameter: Age (day) Value: 8
  misc_feature: MA Experiment 20000437 PARAMETER Experiment Name: At_Drought_P Parameter: Organism Value: A. thaliana
  misc_feature: MA Experiment 20000437 PARAMETER Experiment Name: At_Drought_P Parameter: Plant Line Value: WS
  misc_feature: MA Experiment 20000437 PARAMETER Experiment Name: At_Drought_P Parameter: Timepoint (hr) Value: 24
  misc_feature: MA Experiment 20000437 PARAMETER Experiment Name: At_Drought_P Parameter: Tissue Value: Whole Plant
  misc_feature: MA Experiment 20000437 PARAMETER Experiment Name: At_Drought_P Parameter: Treatment Value: Drought vs. No Drought
  misc_feature: MA Experiment ID: 20000443 Result: Up-regulated in Transcription
  misc_feature: MA Experiment 20000443 PARAMETER Experiment Name: At_1uM_BR-BRZ__P Parameter: Tissue Value: Shoot Apices
  misc_feature: MA Experiment 20000443 PARAMETER Experiment Name: At_1uM_BR-BRZ__P Parameter: Treatment Value: 1uM BRZ vs. No Treatment
  misc_feature: MA Experiment ID: 20000794 Result: Down-regulated in Transcription
  misc_feature: MA Experiment 20000794 PARAMETER Experiment Name: At_Petals_P Parameter: Age (day) Value: 23-25 days
  misc_feature: MA Experiment 20000794 PARAMETER Experiment Name: At_Petals_P Parameter: Plant Line Value: WS
  misc_feature: MA Experiment 20000794 PARAMETER Experiment Name: At_Petals_P Parameter: Tissue Value: Petals vs. Whole plant
  misc_feature: MA Experiment ID: 20001247 Result: Down-regulated in Transcription
  misc_feature: MA Experiment 20001247 PARAMETER Experiment Name: At_Far-red-induction_P Parameter: Age (day) Value: 7
  misc_feature: MA Experiment 20001247 PARAMETER Experiment Name: At_Far-red-induction_P Parameter: Light Value: Far-red vs. White
  misc_feature: MA Experiment 20001247 PARAMETER Experiment Name: At_Far-red-induction_P Parameter: Organism Value: A. thaliana
  misc_feature: MA Experiment 20001247 PARAMETER Experiment Name: At_Far-red-induction_P Parameter: Plant Line Value: Columbia
  misc_feature: MA Experiment 20001247 PARAMETER Experiment Name: At_Far-red-induction_P Parameter: Timepoint (hr) Value: 1
  misc_feature: MA Experiment 20001247 PARAMETER Experiment Name: At_Far-red-induction_P Parameter: Tissue Value: Whole Plant
  misc_feature: MA Experiment ID: 20001248 Result: Down-regulated in Transcription
  misc_feature: MA Experiment 20001248 PARAMETER Experiment Name: At_Far-red-induction_P Parameter: Age (day) Value: 7
  misc_feature: MA Experiment 20001248 PARAMETER Experiment Name: At_Far-red-induction_P Parameter: Light Value: Far-red vs. White
  misc_feature: MA Experiment 20001248 PARAMETER Experiment Name: At_Far-red-induction_P Parameter: Organism Value: A. thaliana
  misc_feature: MA Experiment 20001248 PARAMETER Experiment Name: At_Far-red-induction_P Parameter: Plant Line Value: Columbia
  misc_feature: MA Experiment 20001248 PARAMETER Experiment Name: At_Far-red-induction_P Parameter: Timepoint (hr) Value: 4
  misc_feature: MA Experiment 20001248 PARAMETER Experiment Name: At_Far-red-induction_P Parameter: Tissue Value: Whole Plant
  misc_feature: MA Experiment ID: 20001450 Result: Down-regulated in Transcription
  misc_feature: MA Experiment 20001450 PARAMETER Experiment Name: At_Far-red-induction_P Parameter: Age (day) Value: 7
  misc_feature: MA Experiment 20001450 PARAMETER Experiment Name: At_Far-red-induction_P Parameter: Light Value: Far-red vs. White
  misc_feature: MA Experiment 20001450 PARAMETER Experiment Name: At_Far-red-induction_P Parameter: Organism Value: A. thaliana
  misc_feature: MA Experiment 20001450 PARAMETER Experiment Name: At_Far-red-induction_P Parameter: Plant Line Value: Columbia
  misc_feature: MA Experiment 20001450 PARAMETER Experiment Name: At_Far-red-induction_P Parameter: Timepoint (hr) Value: 8
  misc_feature: MA Experiment 20001450 PARAMETER Experiment Name: At_Far-red-induction_P Parameter: Tissue Value: Whole Plant
  misc_feature: MA Experiment ID: 20001557 Result: Up-regulated in Transcription
  misc_feature: MA Experiment 20001557 PARAMETER Experiment Name: At_Drought_Soil_Dry_P Parameter: Age (day) Value: 27
  misc_feature: MA Experiment 20001557 PARAMETER Experiment Name: At_Drought_Soil_Dry_P Parameter: Organism Value: A. thaliana
  misc_feature: MA Experiment 20001557 PARAMETER Experiment Name: At_Drought_Soil_Dry_P Parameter: Plant Line Value: WS
  misc_feature: MA Experiment 20001557 PARAMETER Experiment Name: At_Drought_Soil_Dry_P Parameter: Post Timepoint (hr) Value: 3
  misc_feature: MA Experiment 20001557 PARAMETER Experiment Name: At_Drought_Soil_Dry_P Parameter: Post-Treatment Value: Re-Water vs. No Drought
  misc_feature: MA Experiment 20001557 PARAMETER Experiment Name: At_Drought_Soil_Dry_P Parameter: Timepoint (day) Value: 13
  misc_feature: MA Experiment 20001557 PARAMETER Experiment Name: At_Drought_Soil_Dry_P Parameter: Treatment Value: Drought vs. No Drought
  misc_feature: MA Experiment ID: 20001560 Result: Up-regulated in Transcription
  misc_feature: MA Experiment 20001560 PARAMETER Experiment Name: At_Drought_Soil_Dry_P Parameter: Age (day) Value: 28
  misc_feature: MA Experiment 20001560 PARAMETER Experiment Name: At_Drought_Soil_Dry_P Parameter: Organism Value: A. thaliana
  misc_feature: MA Experiment 20001560 PARAMETER Experiment Name: At_Drought_Soil_Dry_P Parameter: Plant Line Value: WS
  misc_feature: MA Experiment 20001560 PARAMETER Experiment Name: At_Drought_Soil_Dry_P Parameter: Post Timepoint (hr) Value: None
  misc_feature: MA Experiment 20001560 PARAMETER Experiment Name: At_Drought_Soil_Dry_P Parameter: Post-Treatment Value: None
  misc_feature: MA Experiment 20001560 PARAMETER Experiment Name: At_Drought_Soil_Dry_P Parameter: Timepoint (day) Value: 14
  misc_feature: MA Experiment 20001560 PARAMETER Experiment Name: At_Drought_Soil_Dry_P Parameter: Treatment Value: Drought vs. No Drought
  misc_feature: MA Experiment ID: 20001905 Result: Up-regulated in Transcription
  misc_feature: MA Experiment 20001905 PARAMETER Experiment Name: At_Drought_Reproduction_P Parameter: Age (day) Value: 40
  misc_feature: MA Experiment 20001905 PARAMETER Experiment Name: At_Drought_Reproduction_P Parameter: Organism Value: A. thaliana
  misc_feature: MA Experiment 20001905 PARAMETER Experiment Name: At_Drought_Reproduction_P Parameter: Plant Line Value: WS
  misc_feature: MA Experiment 20001905 PARAMETER Experiment Name: At_Drought_Reproduction_P Parameter: Timepoint (day) Value: 10
  misc_feature: MA Experiment 20001905 PARAMETER Experiment Name: At_Drought_Reproduction_P Parameter: Tissue Value: Rosettes
  misc_feature: MA Experiment 20001905 PARAMETER Experiment Name: At_Drought_Reproduction_P Parameter: Treatment Value: Drought vs. No Drought
acgacgccgttttgcgattccaccctaaccatttctcagtgacgaacagtctcagaagtttctagaccaaaccacactcttcttcgtcttctccgttctctctatatttctcctcaccttcaacgcagctttctcgttctcgtctcagatcgtgttactaacaaacaccgtttctccggcgaaaagctctctgttactaaaaactcacagaacctaaaaatggcggatcaagctatgacggatcaagatcaaggagctgttactctctacagcggcacagccattaccgacgcgaagaaaaaccatccgttctctgttaaggtcggattagctcaggtacttcgtggcggcgccattgttgaagtttcctcggttaaccaagctaagctcgctgaatccgccggcgcatgttctgtaatcgtctcagatccggttcgatctcgcggcggtgttcgtcgtatgccggatccggttctcatcaaagaggtaaaacgagctgtgtctgtacctgtgatggcacgagctcgcgttggtcattttgttgaggctcagatcttggaatctcttgcggttgattacattgacgagagcgagattatctctgttgcggatgatgatcatttcatcaacaaacataatttccgatctccgttcatttgtggttgccgtgatacaggagaagctttgaggagaatcagagaaggtgctgctatgattaggatccaaggagatttaaccgcaacaggtaacattgcagagactgtgaagaacgttaggtcattgatgggtgaagttagagtcttgaacaacatggatgatgatgaggtgttcacgtttgctaagaagatttcagcaccgtatgatcttgtggctcagactaagcagatgggtagggttccggttgttcagtttgcatcaggtgggatcacgactcctgctgatgcagctttgatgatgcagctaggttgtgatggggtttttgtgggttctgaggtttttgatggtcctgatccgtttaagaaacttaggagcattgttcaagctgttcaacattacaatgatcctcatgtgttggctgagatgagttctggattggagaatgcaatggagagcttaaatgttcgtggtgacaggattcaagactttggccaaggcagtgtttgatgaaaaggttcgaagctgcaaactttttgggacttctaaagtcgtaatcttttttggttttgagtctcaaaatatcggttgttttttgttaatgctggtgcatatgatccgtttggtttaatcgaaacttgcaacaactaaaacctcaatgaaaagttgcagaatttttg

SEQ ID NO: 91479 - protein, 314 aa, Arabidopsis thaliana
  peptide (1)..(314): Ceres Seq. ID no. 12727922
  misc_feature (30)..(233): Pfam Name: SOR/SNZ family Pfam Description: SOR/SNZ family
  misc_feature (1)..(314): Homolog of NCBI NO: 15233273 NR Description: putative ethylene-inducible protein; protein id: supported by cDNA: gi_4103951 [Arabidopsis thaliana] A37 [Arabidopsis thaliana] >gi|4103954|gb|AAD01898.1| A37
  misc_feature (12)..(313): Homolog of NCBI NO: 15240972 NR Description: pyridoxine biosynthesis protein - like; protein At5g01410.1, supported by cDNA: 8877., supported by cDNA: supported by cDNA: gi_17933286, supported by cDNA: gi_20453410
  misc_feature (12)..(313): Homolog of NCBI NO: 21617922 NR Description: pyridoxine biosynthesis protein-like [Arabidopsis
  misc_feature (6)..(313): Homolog of NCBI NO: 10719739 NR Description: putative pyridoxine biosynthetic enzyme
  misc_feature (12)..(313): Homolog of NCBI NO: 2501578 NR Description: ETHYLENE-INDUCIBLE PROTEIN HEVER
  misc_feature (6)..(313): Homolog of NCBI NO: 34394152 NR Description: putative ethylene-inducible protein [Oryza sativa
  misc_feature (12)..(313): Homolog of NCBI NO: 15224470 NR Description: similar to SOR1 from the fungus Cercospora protein id: At2g38230.1, supported by cDNA: 19998., supported by gi_13878066, supported by cDNA: gi_14326482, supported by cDNA:
  misc_feature (12)..(313): Homolog of NCBI NO: 13310484 NR Description: Sor-like protein [Ginkgo biloba]
  misc_feature (6)..(306): Homolog of NCBI NO: 37530308 NR Description: putative pyridoxine/pyridoxal 5-phosphate
  misc_feature (31)..(301): Homolog of NCBI NO: 22970419 NR Description: hypothetical protein [Chloroflexus aurantiacus]
MADQAMTDQDQGAVTLYSGTAITDAKKNHPFSVKVGLAQVLRGGAIVEVSSVNQAKLAESAGACSVIVSDPVRSRGGVRRMPDPVLIKEVKRAVSVPVMARARVGHFVEAQILESLAVDYIDESEIISVADDDHFINKHNFRSPFICGCRDTGEALRRIREGAAMIRIQGDLTATGNIAETVKNVRSLMGEVRVLNNMDDDEVFTFAKKISAPYDLVAQTKQMGRVPVVQFASGGITTPADAALMMQLGCDGVFVGSEVFDGPDPFKKLRSIVQAVQHYNDPHVLAEMSSGLENAMESLNVRGDRIQDFGQGSV

SEQ ID NO: 91480 - protein, 309 aa, Arabidopsis thaliana
  peptide (1)..(309): Ceres Seq. ID no. 12727923
  misc_feature (25)..(228): Pfam Name: SOR/SNZ family Pfam Description: SOR/SNZ family
  misc_feature (1)..(309): Homolog of NCBI NO: 15233273 NR Description: putative ethylene-inducible protein; protein id: supported by cDNA: gi_4103951 [Arabidopsis thaliana] A37 [Arabidopsis thaliana] >gi|4103954|gb|AAD01898.1| A37
  misc_feature (7)..(308): Homolog of NCBI NO: 15240972 NR Description: pyridoxine biosynthesis protein - like; protein At5g01410.1, supported by cDNA: 8877., supported by cDNA: supported by cDNA: gi_17933286, supported by cDNA: gi_20453410
  misc_feature (7)..(308): Homolog of NCBI NO: 21617922 NR Description: pyridoxine biosynthesis protein-like [Arabidopsis
  misc_feature (1)..(308): Homolog of NCBI NO: 10719739 NR Description: putative pyridoxine biosynthetic enzyme
  misc_feature (7)..(308): Homolog of NCBI NO: 2501578 NR Description: ETHYLENE-INDUCIBLE PROTEIN HEVER
  misc_feature (1)..(308): Homolog of NCBI NO: 34394152 NR Description: putative ethylene-inducible protein [Oryza sativa
  misc_feature (7)..(308): Homolog of NCBI NO: 15224470 NR Description: similar to SOR1 from the fungus Cercospora protein id: At2g38230.1, supported by cDNA: 19998., supported by gi_13878066, supported by cDNA: gi_14326482, supported by cDNA:
  misc_feature (7)..(308): Homolog of NCBI NO: 13310484 NR Description: Sor-like protein [Ginkgo biloba]
  misc_feature (1)..(301): Homolog of NCBI NO: 37530308 NR Description: putative pyridoxine/pyridoxal 5-phosphate
  misc_feature (26)..(296): Homolog of NCBI NO: 22970419 NR Description: hypothetical protein [Chloroflexus aurantiacus]
MTDQDQGAVTLYSGTAITDAKKNHPFSVKVGLAQVLRGGAIVEVSSVNQAKLAESAGACSVIVSDPVRSRGGVRRMPDPVLIKEVKRAVSVPVMARARVGHFVEAQILESLAVDYIDESEIISVADDDHFINKHNFRSPFICGCRDTGEALRRIREGAAMIRIQGDLTATGNIAETVKNVRSLMGEVRVLNNMDDDEVFTFAKKISAPYDLVAQTKQMGRVPVVQFASGGITTPADAALMMQLGCDGVFVGSEVFDGPDPFKKLRSIVQAVQHYNDPHVLAEMSSGLENAMESLNVRGDRIQDFGQGSV

SEQ ID NO: 91481 - protein, 234 aa, Arabidopsis thaliana
  peptide (1)..(234): Ceres Seq. ID no. 12727924
  misc_feature (1)..(153): Pfam Name: SOR/SNZ family Pfam Description: SOR/SNZ family
  misc_feature (1)..(234): Homolog of NCBI NO: 15233273 NR Description: putative ethylene-inducible protein; protein id: supported by cDNA: gi_4103951 [Arabidopsis thaliana] A37 [Arabidopsis thaliana] >gi|4103954|gb|AAD01898.1| A37
  misc_feature (1)..(233): Homolog of NCBI NO: 15240972 NR Description: pyridoxine biosynthesis protein - like; protein At5g01410.1, supported by cDNA: 8877., supported by cDNA: supported by cDNA: gi_17933286, supported by cDNA: gi_20453410
  misc_feature (1)..(233): Homolog of NCBI NO: 21617922 NR Description: pyridoxine biosynthesis protein-like [Arabidopsis
  misc_feature (1)..(233): Homolog of NCBI NO: 10719739 NR Description: putative pyridoxine biosynthetic enzyme
  misc_feature (1)..(233): Homolog of NCBI NO: 2501578 NR Description: ETHYLENE-INDUCIBLE PROTEIN HEVER
  misc_feature (1)..(233): Homolog of NCBI NO: 34394152 NR Description: putative ethylene-inducible protein [Oryza sativa
  misc_feature (1)..(233): Homolog of NCBI NO: 15224470 NR Description: similar to SOR1 from the fungus Cercospora protein id: At2g38230.1, supported by cDNA: 19998., supported by gi_13878066, supported by cDNA: gi_14326482, supported by cDNA:
  misc_feature (1)..(233): Homolog of NCBI NO: 13310484 NR Description: Sor-like protein [Ginkgo biloba]
  misc_feature (1)..(226): Homolog of NCBI NO: 37530308 NR Description: putative pyridoxine/pyridoxal 5-phosphate
  misc_feature (1)..(221): Homolog of NCBI NO: 22970419 NR Description: hypothetical protein [Chloroflexus aurantiacus]
MPDPVLIKEVKRAVSVPVMARARVGHFVEAQILESLAVDYIDESEIISVADDDHFINKHNFRSPFICGCRDTGEALRRIREGAAMIRIQGDLTATGNIAETVKNVRSLMGEVRVLNNMDDDEVFTFAKKISAPYDLVAQTKQMGRVPVVQFASGGITTPADAALMMQLGCDGVFVGSEVFDGPDPFKKLRSIVQAVQHYNDPHVLAEMSSGLENAMESLNVRGDRIQDFGQGSV

SEQ ID NO: 91482 - DNA, 1412 bp, Arabidopsis thaliana
  misc_feature (1)..(1412): Ceres Seq. ID no. 12727960
  misc_feature: MA Experiment ID: 20000184 Result: Down-regulated in Transcription
  misc_feature: MA Experiment 20000184 PARAMETER Experiment Name: At_Shoots__P Parameter: Age (day) Value: 7
  misc_feature: MA Experiment 20000184 PARAMETER Experiment Name: At_Shoots__P Parameter: Tissue Value: Shoots vs. Whole Plant
  misc_feature: MA Experiment ID: 20000185 Result: Down-regulated in Transcription
  misc_feature: MA Experiment 20000185 PARAMETER Experiment Name: At_Roots__P Parameter: Age (day) Value: 7 vs. 21
  misc_feature: MA Experiment 20000185 PARAMETER Experiment Name: At_Roots__P Parameter: Organism Value: A. thaliana
  misc_feature: MA Experiment 20000185 PARAMETER Experiment Name: At_Roots__P Parameter: Tissue Value: Roots vs. Whole Plant
  misc_feature: MA Experiment ID: 20000234 Result: Down-regulated in Transcription
  misc_feature: MA Experiment 20000234 PARAMETER Experiment Name: At_Siliques_P Parameter: Age (day) Value: 21
  misc_feature: MA Experiment 20000234 PARAMETER Experiment Name: At_Siliques_P Parameter: Organism Value: A. thaliana
  misc_feature: MA Experiment 20000234 PARAMETER Experiment Name: At_Siliques_P Parameter: Plant Line Value: WS
  misc_feature: MA Experiment 20000234 PARAMETER Experiment Name: At_Siliques_P Parameter: Tissue Value: Less Than 5mm Siliques vs. Whole Plant
  misc_feature: MA Experiment ID: 20000235 Result: Down-regulated in Transcription
  misc_feature: MA Experiment 20000235 PARAMETER Experiment Name: At_Siliques_P Parameter: Age (day) Value: 21
  misc_feature: MA Experiment 20000235 PARAMETER Experiment Name: At_Siliques_P Parameter: Organism Value: A. thaliana
  misc_feature: MA Experiment 20000235 PARAMETER Experiment Name: At_Siliques_P Parameter: Plant Line Value: WS
  misc_feature: MA Experiment 20000235 PARAMETER Experiment Name: At_Siliques_P Parameter: Tissue Value: 5-10mm Siliques vs. Whole Plant
  misc_feature: MA Experiment ID: 20000264 Result: Down-regulated in Transcription
  misc_feature: MA Experiment 20000264 PARAMETER Experiment Name: At_Open_Flower_P Parameter: Age (day) Value: 21
  misc_feature: MA Experiment 20000264 PARAMETER Experiment Name: At_Open_Flower_P Parameter: Plant Line Value: WS
  misc_feature: MA Experiment 20000264 PARAMETER Experiment Name: At_Open_Flower_P Parameter: Tissue Value: Open Flower vs. Whole Plant
  misc_feature: MA Experiment ID: 20000268 Result: Down-regulated in Transcription
  misc_feature: MA Experiment 20000268 PARAMETER Experiment Name: At_100mM_NaCl__P Parameter: Age (day) Value: 14
  misc_feature: MA Experiment 20000268 PARAMETER Experiment Name: At_100mM_NaCl__P Parameter: Organism Value: A. thaliana
  misc_feature: MA Experiment 20000268 PARAMETER Experiment Name: At_100mM_NaCl__P Parameter: Plant Line Value: WS
  misc_feature: MA Experiment 20000268 PARAMETER Experiment Name: At_100mM_NaCl__P Parameter: Timepoint (hr) Value: 6
  misc_feature: MA Experiment 20000268 PARAMETER Experiment Name: At_100mM_NaCl__P Parameter: Tissue Value: Whole Plant
  misc_feature: MA Experiment 20000268 PARAMETER Experiment Name: At_100mM_NaCl__P Parameter: Treatment Value: 100mM NaCl vs. No Treatment
  misc_feature: MA Experiment ID: 20000286 Result: Down-regulated in Transcription
  misc_feature: MA Experiment 20000286 PARAMETER Experiment Name: At_Open_Flower_P Parameter: Age (day) Value: 21
  misc_feature: MA Experiment 20000286 PARAMETER Experiment Name: At_Open_Flower_P Parameter: Plant Line Value: WS
  misc_feature: MA Experiment 20000286 PARAMETER Experiment Name: At_Open_Flower_P Parameter: Tissue Value: Half Open vs. Whole Plant
  misc_feature: MA Experiment ID: 20000437 Result: Down-regulated in Transcription
  misc_feature: MA Experiment 20000437 PARAMETER Experiment Name: At_Drought_P Parameter: Age (day) Value: 8
  misc_feature: MA Experiment 20000437 PARAMETER Experiment Name: At_Drought_P Parameter: Organism Value: A. thaliana
  misc_feature: MA Experiment 20000437 PARAMETER Experiment Name: At_Drought_P Parameter: Plant Line Value: WS
  misc_feature: MA Experiment 20000437 PARAMETER Experiment Name: At_Drought_P Parameter: Timepoint (hr) Value: 24
  misc_feature: MA Experiment 20000437 PARAMETER Experiment Name: At_Drought_P Parameter: Tissue Value: Whole Plant
  misc_feature: MA Experiment 20000437 PARAMETER Experiment Name: At_Drought_P Parameter: Treatment Value: Drought vs. No Drought
  misc_feature: MA Experiment ID: 20000439 Result: Down-regulated in Transcription
  misc_feature: MA Experiment 20000439 PARAMETER Experiment Name: At_Roots__P Parameter: Age (day) Value: 14 vs. 21
  misc_feature: MA Experiment 20000439 PARAMETER Experiment Name: At_Roots__P Parameter: Organism Value: A. thaliana
  misc_feature: MA Experiment 20000439 PARAMETER Experiment Name: At_Roots__P Parameter: Tissue Value: Roots vs. Whole Plant
  misc_feature: MA Experiment ID: 20000441 Result: Up-regulated in Transcription
  misc_feature: MA Experiment 20000441 PARAMETER Experiment Name: At_1uM_BR-BRZ__P Parameter: Tissue Value: Shoot Apices
  misc_feature: MA Experiment 20000441 PARAMETER Experiment Name: At_1uM_BR-BRZ__P Parameter: Treatment Value: 1uM BR vs. No Treatment
  misc_feature: MA Experiment ID: 20000443 Result: Up-regulated in Transcription
  misc_feature: MA Experiment 20000443 PARAMETER Experiment Name: At_1uM_BR-BRZ__P Parameter: Tissue Value: Shoot Apices
  misc_feature: MA Experiment 20000443 PARAMETER Experiment Name: At_1uM_BR-BRZ__P Parameter: Treatment Value: 1uM BRZ vs. No Treatment
  misc_feature: MA Experiment ID: 20000460 Result: Up-regulated in Transcription
  misc_feature: MA Experiment 20000460 PARAMETER Experiment Name: At_10percent_PEG_P Parameter: Age (day) Value: 12
  misc_feature: MA Experiment 20000460 PARAMETER Experiment Name: At_10percent_PEG_P Parameter: Organism Value: A. thaliana
  misc_feature: MA Experiment 20000460 PARAMETER Experiment Name: At_10percent_PEG_P Parameter: Plant Line Value: WS
  misc_feature: MA Experiment 20000460 PARAMETER Experiment Name: At_10percent_PEG_P Parameter: Timepoint (day) Value: 12
  misc_feature: MA Experiment 20000460 PARAMETER Experiment Name: At_10percent_PEG_P Parameter: Tissue Value: Whole Plant
  misc_feature: MA Experiment 20000460 PARAMETER Experiment Name: At_10percent_PEG_P Parameter: Treatment Value: 10percent PEG vs. No Treatment
  misc_feature: MA Experiment ID: 20000495 Result: Down-regulated in Transcription
  misc_feature: MA Experiment 20000495 PARAMETER Experiment Name: At_Guard_Cells_P Parameter: Harvest Date Value: 8/2/2002
  misc_feature: MA Experiment 20000495 PARAMETER Experiment Name: At_Guard_Cells_P Parameter: Organism Value: A. thaliana
  misc_feature: MA Experiment 20000495 PARAMETER Experiment Name: At_Guard_Cells_P Parameter: Tissue Value: Guard Cells vs. Leaves
  misc_feature: MA Experiment ID: 20000527 Result: Up-regulated in Transcription
  misc_feature: MA Experiment 20000527 PARAMETER Experiment Name: At_10percent_PEG_P Parameter: Age (day) Value: 20
  misc_feature: MA Experiment 20000527 PARAMETER Experiment Name: At_10percent_PEG_P Parameter: Organism Value: A. thaliana
  misc_feature: MA Experiment 20000527 PARAMETER Experiment Name: At_10percent_PEG_P Parameter: Plant Line Value: WS
  misc_feature: MA Experiment 20000527 PARAMETER Experiment Name: At_10percent_PEG_P Parameter: Timepoint (day) Value: 20
  misc_feature: MA Experiment 20000527 PARAMETER Experiment Name: At_10percent_PEG_P Parameter: Tissue Value: Whole Plant
  misc_feature: MA Experiment 20000527 PARAMETER Experiment Name: At_10percent_PEG_P Parameter: Treatment Value: 10percent PEG vs. No Treatment
  misc_feature: MA Experiment ID: 20000573 Result: Down-regulated in Transcription
  misc_feature: MA Experiment 20000573 PARAMETER Experiment Name: At_100uM_ABA_Mutants__P Parameter: Organism Value: A. thaliana
  misc_feature: MA Experiment 20000573 PARAMETER Experiment Name: At_100uM_ABA_Mutants__P Parameter: Plant Line Value: CS22 vs. Ler wt
  misc_feature: MA Experiment 20000573 PARAMETER Experiment Name: At_100uM_ABA_Mutants__P Parameter: Timepoint (hr) Value: N/A
  misc_feature: MA Experiment 20000573 PARAMETER Experiment Name: At_100uM_ABA_Mutants__P Parameter: Tissue Value: Whole Plant
  misc_feature: MA Experiment 20000573 PARAMETER Experiment Name: At_100uM_ABA_Mutants__P Parameter: Treatment Value: None
  misc_feature: MA Experiment ID: 20000574 Result: Down-regulated in Transcription
  misc_feature: MA Experiment 20000574 PARAMETER Experiment Name: At_100uM_ABA_Mutants__P Parameter: Organism Value: A. thaliana
  misc_feature: MA Experiment 20000574 PARAMETER Experiment Name: At_100uM_ABA_Mutants__P Parameter: Plant Line Value: CS23 vs. Ler wt
  misc_feature: MA Experiment 20000574 PARAMETER Experiment Name: At_100uM_ABA_Mutants__P Parameter: Timepoint (hr) Value: N/A
  misc_feature: MA Experiment 20000574 PARAMETER Experiment Name: At_100uM_ABA_Mutants__P Parameter: Tissue Value: Whole Plant
  misc_feature: MA Experiment 20000574 PARAMETER Experiment Name: At_100uM_ABA_Mutants__P Parameter: Treatment Value: None
  misc_feature: MA Experiment ID: 20000794 Result: Down-regulated in Transcription
  misc_feature: MA Experiment 20000794 PARAMETER Experiment Name: At_Petals_P Parameter: Age (day) Value: 23-25 days
  misc_feature: MA Experiment 20000794 PARAMETER Experiment Name: At_Petals_P Parameter: Plant Line Value: WS
  misc_feature: MA Experiment 20000794 PARAMETER Experiment Name: At_Petals_P Parameter: Tissue Value: Petals vs. Whole plant
  misc_feature: MA Experiment ID: 20001247 Result: Up-regulated in Transcription
  misc_feature: MA Experiment 20001247 PARAMETER Experiment Name: At_Far-red-induction_P Parameter: Age (day) Value: 7
  misc_feature: MA Experiment 20001247 PARAMETER Experiment Name: At_Far-red-induction_P Parameter: Light Value: Far-red vs. White
  misc_feature: MA Experiment 20001247 PARAMETER Experiment Name: At_Far-red-induction_P Parameter: Organism Value: A. thaliana
  misc_feature: MA Experiment 20001247 PARAMETER Experiment Name: At_Far-red-induction_P Parameter: Plant Line Value: Columbia
  misc_feature: MA Experiment 20001247 PARAMETER Experiment Name: At_Far-red-induction_P Parameter: Timepoint (hr) Value: 1
  misc_feature: MA Experiment 20001247 PARAMETER Experiment Name: At_Far-red-induction_P Parameter: Tissue Value: Whole Plant
  misc_feature: MA Experiment ID: 20001450 Result: Down-regulated in Transcription
  misc_feature: MA Experiment 20001450 PARAMETER Experiment Name: At_Far-red-induction_P Parameter: Age (day) Value: 7
  misc_feature: MA Experiment 20001450 PARAMETER Experiment Name: At_Far-red-induction_P Parameter: Light Value: Far-red vs. White
  misc_feature: MA Experiment 20001450 PARAMETER Experiment Name: At_Far-red-induction_P Parameter: Organism Value: A. thaliana
  misc_feature: MA Experiment 20001450 PARAMETER Experiment Name: At_Far-red-induction_P Parameter: Plant Line Value: Columbia
  misc_feature: MA Experiment 20001450 PARAMETER Experiment Name: At_Far-red-induction_P Parameter: Timepoint (hr) Value: 8
  misc_feature: MA Experiment 20001450 PARAMETER Experiment Name: At_Far-red-induction_P Parameter: Tissue Value: Whole Plant
  misc_feature: MA Experiment ID: 20001451 Result: Down-regulated in Transcription
  misc_feature: MA Experiment 20001451 PARAMETER Experiment Name: At_Far-red-induction_P Parameter: Age (day) Value: 7
  misc_feature: MA Experiment 20001451 PARAMETER Experiment Name: At_Far-red-induction_P Parameter: Light Value: Far-red vs. White
  misc_feature: MA Experiment 20001451 PARAMETER Experiment Name: At_Far-red-induction_P Parameter: Organism Value: A. thaliana
  misc_feature: MA Experiment 20001451 PARAMETER Experiment Name: At_Far-red-induction_P Parameter: Plant Line Value: Columbia
  misc_feature: MA Experiment 20001451 PARAMETER Experiment Name: At_Far-red-induction_P Parameter: Timepoint (hr) Value: 24
  misc_feature: MA Experiment 20001451 PARAMETER Experiment Name: At_Far-red-induction_P Parameter: Tissue Value: Whole Plant
  misc_feature: MA Experiment ID: 20001555 Result: Down-regulated in Transcription
  misc_feature: MA Experiment 20001555 PARAMETER Experiment Name: At_Drought_Soil_Dry_P Parameter: Age (day) Value: 24
  misc_feature: MA Experiment 20001555 PARAMETER Experiment Name: At_Drought_Soil_Dry_P Parameter: Organism Value: A. thaliana
  misc_feature: MA Experiment 20001555 PARAMETER Experiment Name: At_Drought_Soil_Dry_P Parameter: Plant Line Value: WS
  misc_feature: MA Experiment 20001555 PARAMETER Experiment Name: At_Drought_Soil_Dry_P Parameter: Post Timepoint (hr) Value: None
  misc_feature: MA Experiment 20001555 PARAMETER Experiment Name: At_Drought_Soil_Dry_P Parameter: Post-Treatment Value: None
  misc_feature: MA Experiment 20001555 PARAMETER Experiment Name: At_Drought_Soil_Dry_P Parameter: Timepoint (day) Value: 10
  misc_feature: MA Experiment 20001555 PARAMETER Experiment Name: At_Drought_Soil_Dry_P Parameter: Treatment Value: Drought vs. No Drought
  misc_feature: MA Experiment ID: 20001755 Result: Up-regulated in Transcription
  misc_feature: MA Experiment 20001755 PARAMETER Experiment Name: At_50mM_NH4NO3_L-to-H_P Parameter: Timepoint (hr) Value: 2
  misc_feature: MA Experiment 20001755 PARAMETER Experiment Name: At_50mM_NH4NO3_L-to-H_P Parameter: Tissue Value: Leaf
  misc_feature: MA Experiment 20001755 PARAMETER Experiment Name: At_50mM_NH4NO3_L-to-H_P Parameter: Treatment Value: 50mM NH4NO3 vs 100mM Mannitol
  misc_feature: MA Experiment ID: 20001904 Result: Down-regulated in Transcription
  misc_feature: MA Experiment 20001904 PARAMETER Experiment Name: At_Drought_Reproduction_P Parameter: Age (day) Value: 37
  misc_feature: MA Experiment 20001904 PARAMETER Experiment Name: At_Drought_Reproduction_P Parameter: Organism Value: A. thaliana
  misc_feature: MA Experiment 20001904 PARAMETER Experiment Name: At_Drought_Reproduction_P Parameter: Plant Line Value: WS
  misc_feature: MA Experiment 20001904 PARAMETER Experiment Name: At_Drought_Reproduction_P Parameter: Timepoint (day) Value: 7
  misc_feature: MA Experiment 20001904 PARAMETER Experiment Name: At_Drought_Reproduction_P Parameter: Tissue Value: Rosettes
  misc_feature: MA Experiment 20001904 PARAMETER Experiment Name: At_Drought_Reproduction_P Parameter: Treatment Value: Drought vs. No Drought
  misc_feature: MA Experiment ID: 20001905 Result: Down-regulated in Transcription
  misc_feature: MA Experiment 20001905 PARAMETER Experiment Name: At_Drought_Reproduction_P Parameter: Age (day) Value: 40
  misc_feature: MA Experiment 20001905 PARAMETER Experiment Name: At_Drought_Reproduction_P Parameter: Organism Value: A. thaliana
  misc_feature: MA Experiment 20001905 PARAMETER Experiment Name: At_Drought_Reproduction_P Parameter: Plant Line Value: WS
  misc_feature: MA Experiment 20001905 PARAMETER Experiment Name: At_Drought_Reproduction_P Parameter: Timepoint (day) Value: 10
  misc_feature: MA Experiment 20001905 PARAMETER Experiment Name: At_Drought_Reproduction_P Parameter: Tissue Value: Rosettes
  misc_feature: MA Experiment 20001905 PARAMETER Experiment Name: At_Drought_Reproduction_P Parameter: Treatment Value: Drought vs. No Drought
atcatacttaagttctcaatagagagaatcaaaaatcaaaatgacttctcctactgcgactaagtatgatgtctttctgagtttcagaggagtcgacactcgtcgcaacttcatcagttttctctacaaagaattcgttcgaaggaaaattcgaactttcaaagacgacaaggagcttgagaatggccggaggatttctccggagctcaaacgcgccatcgaggagtcgaaattcgccgtcgttgttgtctctgtaaactacgctgcgtctccttggtgtctcgatgagcttgtgaagattatggatttcgaaaacaagggttccatcaccgtgatgcctatcttctacggtgtggatccgtgtcatttgaggaggcagatcggagatgtcgctgaacagtttaagaagcacgaggctagagaagaagatcatgagaaagttgcttcgtggagacgagcattgaccagtttggctagtatctccggagattgttcatccaaatgtgaagatgaagcgaagctggtggacgaaattgctgacaagatatcaaaaaatctgatgactgttacaacaataagcaatgggaagaacctagttgggattgatacacacatgaaggctcttaacaaaaaactggatttgaattccaacaaaagtttgagagtggttgggatttgggcaagaggatacaatggtagatcagctttagctaaatatgtttatcaagacatctgtcaccactttgacagccattgtttcttgggaagcgtgaaaaggatttctcagggtcgtcacttatcgcatctacacgaagagtttctgataaggattcaaggaagtaaacataatctcaaggaccaaaaggttttgcttgtggctgatgatgtttataagcttgaacagttagatgctcttgctgaggatttcaacgggtttggtccgggaagtgttgttatcatcactacacaagacaagcatctgtttgtttctgctggtataaagcttgtctacgaagttgagcttttgaaattccagaaagtttgtgaactcttccgacaattcgcctttaaaaagagagacatttctgctgcggtcaagttggtttactatagggcaacaaattggttaggttgtctaagtggtagatctggttaggggggaagtgttaagaatcaattttgaagctaaatctcttttcataggcaaatagacattaagttaagggaatgtggctttgattaagtttgaagcctctccaaataaccttccggttctcgtttgggataccatcctatccttttattactttgttttcctttccactcgtgtaaaagcgagttccttggcaaagagttccgtttgcttaattgtgattttgtatctttggtttaattaatcttaaaggaaattg

SEQ ID NO: 91483 - protein, 371 aa, Arabidopsis thaliana
  peptide (1)..(371): Ceres Seq. ID no. 12727961
  misc_feature (11)..(143): Pfam Name: TIR domain Pfam Description: TIR domain
  misc_feature (1)..(371): Homolog of NCBI NO: 15218632 NR Description: disease resistance protein (TIR-NBS class), protein id: At1g72940.1, supported by cDNA: gi_18086371
  misc_feature (2)..(371): Homolog of NCBI NO: 15219332 NR Description: disease resistance protein (TIR-NBS class), protein id: At1g72950.1 [Arabidopsis thaliana]
  misc_feature (1)..(357): Homolog of NCBI NO: 15218623 NR Description: disease resistance protein (TIR-NBS class), protein id: At1g72900.1 [Arabidopsis thaliana]
  misc_feature (1)..(362): Homolog of NCBI NO: 15218624 NR Description: disease resistance protein (TIR-NBS class), protein id: At1g72910.1, supported by cDNA: gi_20466363 thaliana] >gi|25406230|pir||C96754 Similar to part of disease
  misc_feature (1)..(362): Homolog of NCBI NO: 20466364 NR Description: disease resistance protein, putative [Arabidopsis >gi|23198072|gb|AAN15563.1| disease resistance protein, putative
  misc_feature (1)..(233): Homolog of NCBI NO: 15218627 NR Description: disease resistance protein (TIR-NBS class), protein id: At1g72920.1 [Arabidopsis thaliana]
  misc_feature (1)..(362): Homolog of NCBI NO: 24417364 NR Description: unknown [Arabidopsis thaliana]
  misc_feature (1)..(354): Homolog of NCBI NO: 8778463 NR Description: F1L3.31 [Arabidopsis thaliana]
  misc_feature (1)..(354): Homolog of NCBI NO: 15220798 NR Description: disease resistance protein (TIR class), putative;
  misc_feature (1)..(347): Homolog of NCBI NO: 15218621 NR Description: disease resistance protein (TIR-NBS class),
MTSPTATKYDVFLSFRGVDTRRNFISFLYKEFVRRKIRTFKDDKELENGRRISPELKRAIEESKFAVVVVSVNYAASPWCLDELVKIMDFENKGSITVMPIFYGVDPCHLRRQIGDVAEQFKKHEAREEDHEKVASWRRALTSLASISGDCSSKCEDEAKLVDEIADKISKNLMTVTTISNGKNLVGIDTHMKALNKKLDLNSNKSLRVVGIWARGYNGRSALAKYVYQDICHHFDSHCFLGSVKRISQGRHLSHLHEEFLIRIQGSKHNLKDQKVLLVADDVYKLEQLDALAEDFNGFGPGSVVIITTQDKHLFVSAGIKLVYEVELLKFQKVCELFRQFAFKKRDISAAVKLVYYRATNWLGCLSGRSG

SEQ ID NO: 91484 - protein, 284 aa, Arabidopsis thaliana
  peptide (1)..(284): Ceres Seq. ID no. 12727962
  misc_feature (1)..(56): Pfam Name: TIR domain Pfam Description: TIR domain
  misc_feature (1)..(284): Homolog of NCBI NO: 15218632 NR Description: disease resistance protein (TIR-NBS class), protein id: At1g72940.1, supported by cDNA: gi_18086371
  misc_feature (1)..(284): Homolog of NCBI NO: 15219332 NR Description: disease resistance protein (TIR-NBS class), protein id: At1g72950.1 [Arabidopsis thaliana]
  misc_feature (1)..(270): Homolog of NCBI NO: 15218623 NR Description: disease resistance protein (TIR-NBS class), protein id: At1g72900.1 [Arabidopsis thaliana]
  misc_feature (1)..(275): Homolog of NCBI NO: 15218624 NR Description: disease resistance protein (TIR-NBS class), protein id: At1g72910.1, supported by cDNA: gi_20466363 thaliana] >gi|25406230|pir||C96754 Similar to part of disease
  misc_feature (1)..(275): Homolog of NCBI NO: 20466364 NR Description: disease resistance protein, putative [Arabidopsis >gi|23198072|gb|AAN15563.1| disease resistance protein, putative
  misc_feature (1)..(146): Homolog of NCBI NO: 15218627 NR Description: disease resistance protein (TIR-NBS class), protein id: At1g72920.1 [Arabidopsis thaliana]
  misc_feature (1)..(275): Homolog of NCBI NO: 24417364 NR Description: unknown [Arabidopsis thaliana]
  misc_feature (1)..(267): Homolog of NCBI NO: 8778463 NR Description: F1L3.31 [Arabidopsis thaliana]
  misc_feature (1)..(267): Homolog of NCBI NO: 15220798 NR Description: disease resistance protein (TIR class), putative;
  misc_feature (1)..(260): Homolog of NCBI NO: 15218621 NR Description: disease resistance protein (TIR-NBS class),
MDFENKGSITVMPIFYGVDPCHLRRQIGDVAEQFKKHEAREEDHEKVASWRRALTSLASISGDCSSKCEDEAKLVDEIADKISKNLMTVTTISNGKNLVGIDTHMKALNKKLDLNSNKSLRVVGIWARGYNGRSALAKYVYQDICHHFDSHCFLGSVKRISQGRHLSHLHEEFLIRIQGSKHNLKDQKVLLVADDVYKLEQLDALAEDFNGFGPGSVVIITTQDKHLFVSAGIKLVYEVELLKFQKVCELFRQFAFKKRDISAAVKLVYYRATNWLGCLSGRSG

SEQ ID NO: 91485 - protein, 273 aa, Arabidopsis thaliana
  peptide (1)..(273): Ceres Seq. ID no. 12727963
  misc_feature (70)..(143): Pfam Name: NB-ARC domain Pfam Description: NB-ARC domain
  misc_feature (1)..(273): Homolog of NCBI NO: 15218632 NR Description: disease resistance protein (TIR-NBS class), protein id: At1g72940.1, supported by cDNA: gi_18086371
  misc_feature (1)..(273): Homolog of NCBI NO: 15219332 NR Description: disease resistance protein (TIR-NBS class), protein id: At1g72950.1 [Arabidopsis thaliana]
  misc_feature (1)..(259): Homolog of NCBI NO: 15218623 NR Description: disease resistance protein (TIR-NBS class), protein id: At1g72900.1 [Arabidopsis thaliana]
  misc_feature (1)..(264): Homolog of NCBI NO: 15218624 NR Description: disease resistance protein (TIR-NBS class), protein id: At1g72910.1, supported by cDNA: gi_20466363 thaliana] >gi|25406230|pir||C96754 Similar to part of disease
  misc_feature (1)..(264): Homolog of NCBI NO: 20466364 NR Description: disease resistance protein, putative [Arabidopsis >gi|23198072|gb|AAN15563.1| disease resistance protein, putative
  misc_feature (1)..(135): Homolog of NCBI NO: 15218627 NR Description: disease resistance protein (TIR-NBS class), protein id: At1g72920.1 [Arabidopsis thaliana]
  misc_feature (1)..(264): Homolog of NCBI NO: 24417364 NR Description: unknown [Arabidopsis thaliana]
  misc_feature (1)..(256): Homolog of NCBI NO: 8778463 NR Description: F1L3.31 [Arabidopsis thaliana]
  misc_feature (1)..(256): Homolog of NCBI NO: 15220798 NR Description: disease resistance protein (TIR class), putative;
  misc_feature (1)..(249): Homolog of NCBI NO: 15218621 NR Description: disease resistance protein (TIR-NBS class),
MPIFYGVDPCHLRRQIGDVAEQFKKHEAREEDHEKVASWRRALTSLASISGDCSSKCEDEAKLVDEIADKISKNLMTVTTISNGKNLVGIDTHMKALNKKLDLNSNKSLRVVGIWARGYNGRSALAKYVYQDICHHFDSHCFLGSVKRISQGRHLSHLHEEFLIRIQGSKHNLKDQKVLLVADDVYKLEQLDALAEDFNGFGPGSVVIITTQDKHLFVSAGIKLVYEVELLKFQKVCELFRQFAFKKRDISAAVKLVYYRATNWLGCLSGRSG

SEQ ID NO: 91486 - DNA, 2101 bp, Arabidopsis thaliana
  misc_feature (1)..(2101): Ceres Seq. ID no. 12727964
  misc_feature: MA Experiment ID: 108434 Result: Up-regulated in Transcription
  misc_feature: MA Experiment 108434 PARAMETER Experiment Name: At_Root_Tips_cDNA_P Parameter: Tissue Value: Root Tips
  misc_feature: MA Experiment ID: 108461 Result: Up-regulated in Transcription
  misc_feature: MA Experiment 108461 PARAMETER Experiment Name: At_Germinating_Seeds_cDNA_P Parameter: Age (day) Value: 1 vs. 0
  misc_feature: MA Experiment 108461 PARAMETER Experiment Name: At_Germinating_Seeds_cDNA_P Parameter: Tissue Value: Germinating Seeds
  misc_feature: MA Experiment ID: 108462 Result: Up-regulated in Transcription
  misc_feature: MA Experiment 108462 PARAMETER Experiment Name: At_Germinating_Seeds_cDNA_P Parameter: Age (day) Value: 2 vs. 0
  misc_feature: MA Experiment 108462 PARAMETER Experiment Name: At_Germinating_Seeds_cDNA_P Parameter: Tissue Value: Germinating Seeds
  misc_feature: MA Experiment ID: 108573 Result: Down-regulated in Transcription
  misc_feature: MA Experiment 108573 PARAMETER Experiment Name: At_Drought_cDNA_P Parameter: Timepoint (hr) Value: 6
  misc_feature: MA Experiment 108573 PARAMETER Experiment Name: At_Drought_cDNA_P Parameter: Tissue Value: Aerial
  misc_feature: MA Experiment 108573 PARAMETER Experiment Name: At_Drought_cDNA_P Parameter: Treatment Value: Drought vs. No Drought
  misc_feature: MA Experiment ID: 108576 Result: Down-regulated in Transcription
  misc_feature: MA Experiment 108576 PARAMETER Experiment Name: At_42deg_Heat_cDNA_P Parameter: Temperature (deg C) Value: 42 vs. 22
  misc_feature: MA Experiment 108576 PARAMETER Experiment Name: At_42deg_Heat_cDNA_P Parameter: Timepoint (hr) Value: 1
  misc_feature: MA Experiment 108576 PARAMETER Experiment Name: At_42deg_Heat_cDNA_P Parameter: Tissue Value: Aerial
  misc_feature: MA Experiment ID: 108579 Result: Up-regulated in Transcription
  misc_feature: MA Experiment 108579 PARAMETER Experiment Name: At_4deg_Cold_cDNA_P Parameter: Temperature (deg C) Value: 4 vs. 22
  misc_feature: MA Experiment 108579 PARAMETER Experiment Name: At_4deg_Cold_cDNA_P Parameter: Timepoint (hr) Value: 6
  misc_feature: MA Experiment 108579 PARAMETER Experiment Name: At_4deg_Cold_cDNA_P Parameter: Tissue Value: Aerial
  misc_feature: MA Experiment ID: 108595 Result: Up-regulated in Transcription
  misc_feature: MA Experiment 108595 PARAMETER Experiment Name: At_Ler-pi_Ovule_cDNA_P Parameter: Plant Line Value: null
  misc_feature: MA Experiment ID: 20000069 Result: Down-regulated in Transcription
  misc_feature: MA Experiment 20000069 PARAMETER Experiment Name: At_100uM_ABA_Mutants_cDNA_P Parameter: Plant Line Value: CS23
  misc_feature: MA Experiment 20000069 PARAMETER Experiment Name: At_100uM_ABA_Mutants_cDNA_P Parameter: Timepoint (hr) Value: 6
  misc_feature: MA Experiment 20000069 PARAMETER Experiment Name: At_100uM_ABA_Mutants_cDNA_P Parameter: Tissue Value: Aerial
  misc_feature: MA Experiment 20000069 PARAMETER Experiment Name: At_100uM_ABA_Mutants_cDNA_P Parameter: Treatment Value: 100uM ABA vs. No Treatment
  misc_feature: MA Experiment ID: 20000070 Result: Down-regulated in Transcription
  misc_feature: MA Experiment 20000070 PARAMETER Experiment Name: At_100uM_ABA_Mutants_cDNA_P Parameter: Plant Line Value: CS24
  misc_feature: MA Experiment 20000070 PARAMETER Experiment Name: At_100uM_ABA_Mutants_cDNA_P Parameter: Timepoint (hr) Value: 6
  misc_feature: MA Experiment 20000070 PARAMETER Experiment Name: At_100uM_ABA_Mutants_cDNA_P Parameter: Tissue Value: Aerial
  misc_feature: MA Experiment 20000070 PARAMETER Experiment Name: At_100uM_ABA_Mutants_cDNA_P Parameter: Treatment Value: 100uM ABA vs. No Treatment
  misc_feature: MA Experiment ID: 20000071 Result: Down-regulated in Transcription
  misc_feature: MA Experiment 20000071 PARAMETER Experiment Name: At_100uM_ABA_Mutants_cDNA_P Parameter: Plant Line Value: CS8104
  misc_feature: MA Experiment 20000071 PARAMETER Experiment Name: At_100uM_ABA_Mutants_cDNA_P Parameter: Timepoint (hr) Value: 6
  misc_feature: MA Experiment 20000071 PARAMETER Experiment Name: At_100uM_ABA_Mutants_cDNA_P Parameter: Tissue Value: Aerial
  misc_feature: MA Experiment 20000071 PARAMETER Experiment Name: At_100uM_ABA_Mutants_cDNA_P Parameter: Treatment Value: 100uM ABA vs. No Treatment
  misc_feature: MA Experiment ID: 20000072 Result: Down-regulated in Transcription
  misc_feature: MA Experiment 20000072 PARAMETER Experiment Name: At_100uM_ABA_Mutants_cDNA_P Parameter: Plant Line Value: CS8105
  misc_feature: MA Experiment 20000072 PARAMETER Experiment Name: At_100uM_ABA_Mutants_cDNA_P Parameter: Timepoint (hr) Value: 6
  misc_feature: MA Experiment 20000072 PARAMETER Experiment Name: At_100uM_ABA_Mutants_cDNA_P Parameter: Tissue Value: Aerial
  misc_feature: MA Experiment 20000072 PARAMETER Experiment Name: At_100uM_ABA_Mutants_cDNA_P Parameter: Treatment Value: 100uM ABA vs. No Treatment
  misc_feature: MA Experiment ID: 20000086 Result: Down-regulated in Transcription
  misc_feature: MA Experiment 20000086 PARAMETER Experiment Name: At_100uM_ABA_Mutants_cDNA_P Parameter: Plant Line Value: CS22
  misc_feature: MA Experiment 20000086 PARAMETER Experiment Name: At_100uM_ABA_Mutants_cDNA_P Parameter: Timepoint (hr) Value: 6
  misc_feature: MA Experiment 20000086 PARAMETER Experiment Name: At_100uM_ABA_Mutants_cDNA_P Parameter: Tissue Value: Aerial
  misc_feature: MA Experiment 20000086 PARAMETER Experiment Name: At_100uM_ABA_Mutants_cDNA_P Parameter: Treatment Value: 100uM ABA vs. No Treatment
  misc_feature: MA Experiment ID: 20000087 Result: Down-regulated in Transcription
  misc_feature: MA Experiment 20000087 PARAMETER Experiment Name: At_100uM_ABA_Mutants_cDNA_P Parameter: Plant Line Value: WS
  misc_feature: MA Experiment 20000087 PARAMETER Experiment Name: At_100uM_ABA_Mutants_cDNA_P Parameter: Timepoint (hr) Value: 6
  misc_feature: MA Experiment 20000087 PARAMETER Experiment Name: At_100uM_ABA_Mutants_cDNA_P Parameter: Tissue Value: Aerial
  misc_feature: MA Experiment 20000087 PARAMETER Experiment Name: At_100uM_ABA_Mutants_cDNA_P Parameter: Treatment Value: 100uM ABA vs. No Treatment
  misc_feature: MA Experiment ID: 20000090 Result: Down-regulated in Transcription
  misc_feature: MA Experiment ID: 20000093 Result: Down-regulated in Transcription
  misc_feature: MA Experiment 20000093 PARAMETER Experiment Name: At_42deg_Heat_cDNA_P Parameter: Temperature (deg C) Value: 42 vs. 22
  misc_feature: MA Experiment 20000093 PARAMETER Experiment Name: At_42deg_Heat_cDNA_P Parameter: Timepoint (hr) Value: 0.5
  misc_feature: MA Experiment 20000093 PARAMETER Experiment Name: At_42deg_Heat_cDNA_P Parameter: Tissue Value: Aerial
  misc_feature: MA Experiment ID: 20000111 Result: Down-regulated in Transcription
  misc_feature: MA Experiment 20000111 PARAMETER Experiment Name: At_42deg_Heat_cDNA_P Parameter: Temperature (deg C) Value: 42 vs. 22
  misc_feature: MA Experiment 20000111 PARAMETER Experiment Name: At_42deg_Heat_cDNA_P Parameter: Timepoint (hr) Value: 6
  misc_feature: MA Experiment 20000111 PARAMETER Experiment Name: At_42deg_Heat_cDNA_P Parameter: Tissue Value: Aerial
  misc_feature: MA Experiment ID: 20000112 Result: Down-regulated in Transcription
  misc_feature: MA Experiment 20000112 PARAMETER Experiment Name: At_42deg_Heat_cDNA_P Parameter: Temperature (deg C) Value: 42 vs. 22
  misc_feature: MA Experiment 20000112 PARAMETER Experiment Name: At_42deg_Heat_cDNA_P Parameter: Timepoint (hr) Value: 2
  misc_feature: MA Experiment 20000112 PARAMETER Experiment Name: At_42deg_Heat_cDNA_P Parameter: Tissue Value: Aerial
  misc_feature: MA Experiment ID: 20000113 Result: Down-regulated in Transcription
  misc_feature: MA Experiment 20000113 PARAMETER Experiment Name: At_42deg_Heat_cDNA_P Parameter: Temperature (deg C) Value: 42 vs. 22
  misc_feature: MA Experiment 20000113 PARAMETER Experiment Name: At_42deg_Heat_cDNA_P Parameter: Timepoint (hr) Value: 8
  misc_feature: MA Experiment 20000113 PARAMETER Experiment Name: At_42deg_Heat_cDNA_P Parameter: Tissue Value: Aerial
  misc_feature: MA Experiment ID: 20000117 Result: Down-regulated in Transcription
  misc_feature: MA Experiment 20000117 PARAMETER Experiment Name: At_100uM_ABA_Mutants_cDNA_P Parameter: Plant Line Value: Columbia
  misc_feature: MA Experiment 20000117 PARAMETER Experiment Name: At_100uM_ABA_Mutants_cDNA_P Parameter: Timepoint (hr) Value: 6
  misc_feature: MA Experiment 20000117 PARAMETER Experiment Name: At_100uM_ABA_Mutants_cDNA_P Parameter: Tissue Value: Aerial
  misc_feature: MA Experiment 20000117 PARAMETER Experiment Name: At_100uM_ABA_Mutants_cDNA_P Parameter: Treatment Value: 100uM ABA vs. No Treatment
  misc_feature: MA Experiment ID: 20000144 Result: Down-regulated in Transcription
  misc_feature: MA Experiment 20000144 PARAMETER Experiment Name: At_42deg_Heat_cDNA_P Parameter: Temperature (deg C) Value: 42 vs. 22
  misc_feature: MA Experiment 20000144 PARAMETER Experiment Name: At_42deg_Heat_cDNA_P Parameter: Timepoint (hr) Value: 1
  misc_feature: MA Experiment 20000144 PARAMETER Experiment Name: At_42deg_Heat_cDNA_P Parameter: Tissue Value: Aerial
  misc_feature: MA Experiment ID: 20000171 Result: Down-regulated in Transcription
  misc_feature: MA Experiment 20000171 PARAMETER Experiment Name: At_42deg_Heat_P Parameter: Age (day) Value: 14
  misc_feature: MA Experiment 20000171 PARAMETER Experiment Name: At_42deg_Heat_P Parameter: Organism Value: A. thaliana
  misc_feature: MA Experiment 20000171 PARAMETER Experiment Name: At_42deg_Heat_P Parameter: Plant Line Value: WS
  misc_feature: MA Experiment 20000171 PARAMETER Experiment Name: At_42deg_Heat_P Parameter: Temperature (deg C) Value: 42 vs. 22
  misc_feature: MA Experiment 20000171 PARAMETER Experiment Name: At_42deg_Heat_P Parameter: Timepoint (hr) Value: 1
  misc_feature: MA Experiment 20000171 PARAMETER Experiment Name: At_42deg_Heat_P Parameter: Tissue Value: Aerial
  misc_feature: MA Experiment ID: 20000180 Result: Up-regulated in Transcription
  misc_feature: MA Experiment 20000180 PARAMETER Experiment Name: At_Germinating_Seeds_P Parameter: Age (hr) Value: 24 vs. 0
  misc_feature: MA Experiment 20000180 PARAMETER Experiment Name: At_Germinating_Seeds_P Parameter: Tissue Value: Germinating Seeds
  misc_feature: MA Experiment ID: 20000184 Result: Up-regulated in Transcription
  misc_feature: MA Experiment 20000184 PARAMETER Experiment Name: At_Shoots__P Parameter: Age (day) Value: 7
  misc_feature: MA Experiment 20000184 PARAMETER Experiment Name: At_Shoots__P Parameter: Tissue Value: Shoots vs. Whole Plant
  misc_feature: MA Experiment ID: 20000185 Result: Down-regulated in Transcription
  misc_feature: MA Experiment 20000185 PARAMETER Experiment Name: At_Roots__P Parameter: Age (day) Value: 7 vs. 21
  misc_feature: MA Experiment 20000185 PARAMETER Experiment Name: At_Roots__P Parameter: Organism Value: A. thaliana
  misc_feature: MA Experiment 20000185 PARAMETER Experiment Name: At_Roots__P Parameter: Tissue Value: Roots vs. Whole Plant
  misc_feature: MA Experiment ID: 20000224 Result: Up-regulated in Transcription
  misc_feature: MA Experiment ID: 20000234 Result: Up-regulated in Transcription
  misc_feature: MA Experiment 20000234 PARAMETER Experiment Name: At_Siliques_P Parameter: Age (day) Value: 21
  misc_feature: MA Experiment 20000234 PARAMETER Experiment Name: At_Siliques_P Parameter: Organism Value: A. thaliana
  misc_feature: MA Experiment 20000234 PARAMETER Experiment Name: At_Siliques_P Parameter: Plant Line Value: WS
  misc_feature: MA Experiment 20000234 PARAMETER Experiment Name: At_Siliques_P Parameter: Tissue Value: Less Than 5mm Siliques vs. Whole Plant
  misc_feature: MA Experiment ID: 20000235 Result: Up-regulated in Transcription
  misc_feature: MA Experiment 20000235 PARAMETER Experiment Name: At_Siliques_P Parameter: Age (day) Value: 21
  misc_feature: MA Experiment 20000235 PARAMETER Experiment Name: At_Siliques_P Parameter: Organism Value: A. thaliana
  misc_feature: MA Experiment 20000235 PARAMETER Experiment Name: At_Siliques_P Parameter: Plant Line Value: WS
  misc_feature: MA Experiment 20000235 PARAMETER Experiment Name: At_Siliques_P Parameter: Tissue Value: 5-10mm Siliques vs. Whole Plant
  misc_feature: MA Experiment ID: 20000264 Result: Up-regulated in Transcription
  misc_feature: MA Experiment 20000264 PARAMETER Experiment Name: At_Open_Flower_P Parameter: Age (day) Value: 21
  misc_feature: MA Experiment 20000264 PARAMETER Experiment Name: At_Open_Flower_P Parameter: Plant Line Value: WS
  misc_feature: MA Experiment 20000264 PARAMETER Experiment Name: At_Open_Flower_P Parameter: Tissue Value: Open Flower vs. Whole Plant
  misc_feature: MA Experiment ID: 20000265 Result: Up-regulated in Transcription
  misc_feature: MA Experiment 20000265 PARAMETER Experiment Name: At_Open_Flower_P Parameter: Age (day) Value: 21
  misc_feature: MA Experiment 20000265 PARAMETER Experiment Name: At_Open_Flower_P Parameter: Plant Line Value: WS
  misc_feature: MA Experiment 20000265 PARAMETER Experiment Name: At_Open_Flower_P Parameter: Tissue Value: Closed Flower vs. Whole Plant
  misc_feature: MA Experiment ID: 20000286 Result: Up-regulated in Transcription
  misc_feature: MA Experiment 20000286 PARAMETER Experiment Name: At_Open_Flower_P Parameter: Age (day) Value: 21
  misc_feature: MA Experiment 20000286 PARAMETER Experiment Name: At_Open_Flower_P Parameter: Plant Line Value: WS
  misc_feature: MA Experiment 20000286 PARAMETER Experiment Name: At_Open_Flower_P Parameter: Tissue Value: Half Open vs. Whole Plant
  misc_feature: MA Experiment ID: 20000436 Result: Down-regulated in Transcription
  misc_feature: MA Experiment 20000436 PARAMETER Experiment Name: At_Drought_P Parameter: Age (day) Value: 7
  misc_feature: MA Experiment 20000436 PARAMETER Experiment Name: At_Drought_P Parameter: Organism Value: A. thaliana
  misc_feature: MA Experiment 20000436 PARAMETER Experiment Name: At_Drought_P Parameter: Plant Line Value: WS
  misc_feature: MA Experiment 20000436 PARAMETER Experiment Name: At_Drought_P Parameter: Timepoint (hr) Value: 12
  misc_feature: MA Experiment 20000436 PARAMETER Experiment Name: At_Drought_P Parameter: Tissue Value: Whole Plant
  misc_feature: MA Experiment 20000436 PARAMETER Experiment Name: At_Drought_P Parameter: Treatment Value: Drought vs. No Drought
  misc_feature: MA Experiment ID: 20000437 Result: Down-regulated in Transcription
  misc_feature: MA Experiment 20000437 PARAMETER Experiment Name: At_Drought_P Parameter: Age (day) Value: 8
  misc_feature: MA Experiment 20000437 PARAMETER Experiment Name: At_Drought_P Parameter: Organism Value: A. thaliana
  misc_feature: MA Experiment 20000437 PARAMETER Experiment Name: At_Drought_P Parameter: Plant Line Value: WS
  misc_feature: MA Experiment 20000437 PARAMETER Experiment Name: At_Drought_P Parameter: Timepoint (hr) Value: 24
  misc_feature: MA Experiment 20000437 PARAMETER Experiment Name: At_Drought_P Parameter: Tissue Value: Whole Plant
  misc_feature: MA Experiment 20000437 PARAMETER Experiment Name: At_Drought_P Parameter: Treatment Value: Drought vs. No Drought
  misc_feature: MA Experiment ID: 20000439 Result: Down-regulated in Transcription
  misc_feature: MA Experiment 20000439 PARAMETER Experiment Name: At_Roots__P Parameter: Age (day) Value: 14 vs. 21
  misc_feature: MA Experiment 20000439 PARAMETER Experiment Name: At_Roots__P Parameter: Organism Value: A. thaliana
  misc_feature: MA Experiment 20000439 PARAMETER Experiment Name: At_Roots__P Parameter: Tissue Value: Roots vs. Whole Plant
  misc_feature: MA Experiment ID: 20000573 Result: Down-regulated in Transcription
  misc_feature: MA Experiment 20000573 PARAMETER Experiment Name: At_100uM_ABA_Mutants__P Parameter: Organism Value: A. thaliana
  misc_feature: MA Experiment 20000573 PARAMETER Experiment Name: At_100uM_ABA_Mutants__P Parameter: Plant Line Value: CS22 vs. Ler wt
  misc_feature: MA Experiment 20000573 PARAMETER Experiment Name: At_100uM_ABA_Mutants__P Parameter: Timepoint (hr) Value: N/A
  misc_feature: MA Experiment 20000573 PARAMETER Experiment Name: At_100uM_ABA_Mutants__P Parameter: Tissue Value: Whole Plant
  misc_feature: MA Experiment 20000573 PARAMETER Experiment Name: At_100uM_ABA_Mutants__P Parameter: Treatment Value: None
  misc_feature: MA Experiment ID: 20000574 Result: Down-regulated in Transcription
  misc_feature: MA Experiment 20000574 PARAMETER Experiment Name: At_100uM_ABA_Mutants__P Parameter: Organism Value: A. thaliana
  misc_feature: MA Experiment 20000574 PARAMETER Experiment Name: At_100uM_ABA_Mutants__P Parameter: Plant Line Value: CS23 vs. Ler wt
  misc_feature: MA Experiment 20000574 PARAMETER Experiment Name: At_100uM_ABA_Mutants__P Parameter: Timepoint (hr) Value: N/A
  misc_feature: MA Experiment 20000574 PARAMETER Experiment Name: At_100uM_ABA_Mutants__P Parameter: Tissue Value: Whole Plant
  misc_feature: MA Experiment 20000574 PARAMETER Experiment Name: At_100uM_ABA_Mutants__P Parameter: Treatment Value: None
  misc_feature: MA Experiment ID: 20000794 Result: Down-regulated in Transcription
  misc_feature: MA Experiment 20000794 PARAMETER Experiment Name: At_Petals_P Parameter: Age (day) Value: 23-25 days
  misc_feature: MA Experiment 20000794 PARAMETER Experiment Name: At_Petals_P Parameter: Plant Line Value: WS
  misc_feature: MA Experiment 20000794 PARAMETER Experiment Name: At_Petals_P Parameter: Tissue Value: Petals vs. Whole plant
  misc_feature: MA Experiment ID: 20001248 Result: Down-regulated in Transcription
  misc_feature: MA Experiment 20001248 PARAMETER Experiment Name: At_Far-red-induction_P Parameter: Age (day) Value: 7
  misc_feature: MA Experiment 20001248 PARAMETER Experiment Name: At_Far-red-induction_P Parameter: Light Value: Far-red vs. White
  misc_feature: MA Experiment 20001248 PARAMETER Experiment Name: At_Far-red-induction_P Parameter: Organism Value: A. thaliana
  misc_feature: MA Experiment 20001248 PARAMETER Experiment Name: At_Far-red-induction_P Parameter: Plant Line Value: Columbia
  misc_feature: MA Experiment 20001248 PARAMETER Experiment Name: At_Far-red-induction_P Parameter: Timepoint (hr) Value: 4
  misc_feature: MA Experiment 20001248 PARAMETER Experiment Name: At_Far-red-induction_P Parameter: Tissue Value: Whole Plant
  misc_feature: MA Experiment ID: 20001450 Result: Down-regulated in Transcription
  misc_feature: MA Experiment 20001450 PARAMETER Experiment Name: At_Far-red-induction_P Parameter: Age (day) Value: 7
  misc_feature: MA Experiment 20001450 PARAMETER Experiment Name: At_Far-red-induction_P Parameter: Light Value: Far-red vs. White
  misc_feature: MA Experiment 20001450 PARAMETER Experiment Name: At_Far-red-induction_P Parameter: Organism Value: A. thaliana
  misc_feature: MA Experiment 20001450 PARAMETER Experiment Name: At_Far-red-induction_P Parameter: Plant Line Value: Columbia
  misc_feature: MA Experiment 20001450 PARAMETER Experiment Name: At_Far-red-induction_P Parameter: Timepoint (hr) Value: 8
  misc_feature: MA Experiment 20001450 PARAMETER Experiment Name: At_Far-red-induction_P Parameter: Tissue Value: Whole Plant
  misc_feature: MA Experiment ID: 20001451 Result: Down-regulated in Transcription
  misc_feature: MA Experiment 20001451 PARAMETER Experiment Name: At_Far-red-induction_P Parameter: Age (day) Value: 7
  misc_feature: MA Experiment 20001451 PARAMETER Experiment Name: At_Far-red-induction_P Parameter: Light Value: Far-red vs. White
  misc_feature: MA Experiment 20001451 PARAMETER Experiment Name: At_Far-red-induction_P Parameter: Organism Value: A. thaliana
  misc_feature: MA Experiment 20001451 PARAMETER Experiment Name: At_Far-red-induction_P Parameter: Plant Line Value: Columbia
  misc_feature: MA Experiment 20001451 PARAMETER Experiment Name: At_Far-red-induction_P Parameter: Timepoint (hr) Value: 24
  misc_feature: MA Experiment 20001451 PARAMETER Experiment Name: At_Far-red-induction_P Parameter: Tissue Value: Whole Plant
  misc_feature: MA Experiment ID: 20001555 Result: Down-regulated in Transcription
  misc_feature: MA Experiment 20001555 PARAMETER Experiment Name: At_Drought_Soil_Dry_P Parameter: Age (day) Value: 24
  misc_feature: MA Experiment 20001555 PARAMETER Experiment Name: At_Drought_Soil_Dry_P Parameter: Organism Value: A. thaliana
  misc_feature: MA Experiment 20001555 PARAMETER Experiment Name: At_Drought_Soil_Dry_P Parameter: Plant Line Value: WS
  misc_feature: MA Experiment 20001555 PARAMETER Experiment Name: At_Drought_Soil_Dry_P Parameter: Post Timepoint (hr) Value: None
  misc_feature: MA Experiment 20001555 PARAMETER Experiment Name: At_Drought_Soil_Dry_P Parameter: Post-Treatment Value: None
  misc_feature: MA Experiment 20001555 PARAMETER Experiment Name: At_Drought_Soil_Dry_P Parameter: Timepoint (day) Value: 10
  misc_feature: MA Experiment 20001555 PARAMETER Experiment Name: At_Drought_Soil_Dry_P Parameter: Treatment Value: Drought vs. No Drought
  misc_feature: MA Experiment ID: 20001557 Result: Up-regulated in Transcription
  misc_feature: MA Experiment 20001557 PARAMETER Experiment Name: At_Drought_Soil_Dry_P Parameter: Age (day) Value: 27
  misc_feature: MA Experiment 20001557 PARAMETER Experiment Name: At_Drought_Soil_Dry_P Parameter: Organism Value: A. thaliana
  misc_feature: MA Experiment 20001557 PARAMETER Experiment Name: At_Drought_Soil_Dry_P Parameter: Plant Line Value: WS
  misc_feature: MA Experiment 20001557 PARAMETER Experiment Name: At_Drought_Soil_Dry_P Parameter: Post Timepoint (hr) Value: 3
  misc_feature: MA Experiment 20001557 PARAMETER Experiment Name: At_Drought_Soil_Dry_P Parameter: Post-Treatment Value: Re-Water vs. No Drought
  misc_feature: MA Experiment 20001557 PARAMETER Experiment Name: At_Drought_Soil_Dry_P Parameter: Timepoint (day) Value: 13
  misc_feature: MA Experiment 20001557 PARAMETER Experiment Name: At_Drought_Soil_Dry_P Parameter: Treatment Value: Drought vs. No Drought
  misc_feature: MA Experiment ID: 20001558 Result: Up-regulated in Transcription
  misc_feature: MA Experiment 20001558 PARAMETER Experiment Name: At_Drought_Soil_Dry_P Parameter: Age (day) Value: 27
  misc_feature: MA Experiment 20001558 PARAMETER Experiment Name: At_Drought_Soil_Dry_P Parameter: Organism Value: A. thaliana
  misc_feature: MA Experiment 20001558 PARAMETER Experiment Name: At_Drought_Soil_Dry_P Parameter: Plant Line Value: WS
  misc_feature: MA Experiment 20001558 PARAMETER Experiment Name: At_Drought_Soil_Dry_P Parameter: Post Timepoint (hr) Value: 6
  misc_feature: MA Experiment 20001558 PARAMETER Experiment Name: At_Drought_Soil_Dry_P Parameter: Post-Treatment Value: Re-Water vs. No Drought
  misc_feature: MA Experiment 20001558 PARAMETER Experiment Name: At_Drought_Soil_Dry_P Parameter: Timepoint (day) Value: 13
  misc_feature: MA Experiment 20001558 PARAMETER Experiment Name: At_Drought_Soil_Dry_P Parameter: Treatment Value: Drought vs. No Drought
  misc_feature: MA Experiment ID: 20001560 Result: Up-regulated in Transcription
  misc_feature: MA Experiment 20001560 PARAMETER Experiment Name: At_Drought_Soil_Dry_P Parameter: Age (day) Value: 28
  misc_feature: MA Experiment 20001560 PARAMETER Experiment Name: At_Drought_Soil_Dry_P Parameter: Organism Value: A. thaliana
  misc_feature: MA Experiment 20001560 PARAMETER Experiment Name: At_Drought_Soil_Dry_P Parameter: Plant Line Value: WS
  misc_feature: MA Experiment 20001560 PARAMETER Experiment Name: At_Drought_Soil_Dry_P Parameter: Post Timepoint (hr) Value: None
  misc_feature: MA Experiment 20001560 PARAMETER Experiment Name: At_Drought_Soil_Dry_P Parameter: Post-Treatment Value: None
  misc_feature: MA Experiment 20001560 PARAMETER Experiment Name: At_Drought_Soil_Dry_P Parameter: Timepoint (day) Value: 14
  misc_feature: MA Experiment 20001560 PARAMETER Experiment Name: At_Drought_Soil_Dry_P Parameter: Treatment Value: Drought vs. No Drought
  misc_feature: MA Experiment ID: 20001906 Result: Down-regulated in Transcription
  misc_feature: MA Experiment 20001906 PARAMETER Experiment Name: At_Drought_Reproduction_P Parameter: Age (day) Value: 35
  misc_feature: MA Experiment 20001906 PARAMETER Experiment Name: At_Drought_Reproduction_P Parameter: Organism Value: A. thaliana
  misc_feature: MA Experiment 20001906 PARAMETER Experiment Name: At_Drought_Reproduction_P Parameter: Plant Line Value: WS
  misc_feature: MA Experiment 20001906 PARAMETER Experiment Name: At_Drought_Reproduction_P Parameter: Timepoint (day) Value: 5
  misc_feature: MA Experiment 20001906 PARAMETER Experiment Name: At_Drought_Reproduction_P Parameter: Tissue Value: Siliques
  misc_feature: MA Experiment 20001906 PARAMETER Experiment Name: At_Drought_Reproduction_P Parameter: Treatment Value: Drought vs. No Drought
  misc_feature: MA Experiment ID: 20001908 Result: Down-regulated in Transcription
  misc_feature: MA Experiment 20001908 PARAMETER Experiment Name: At_Drought_Reproduction_P Parameter: Age (day) Value: 40
  misc_feature: MA Experiment 20001908 PARAMETER Experiment Name: At_Drought_Reproduction_P Parameter: Organism Value: A. thaliana
  misc_feature: MA Experiment 20001908 PARAMETER Experiment Name: At_Drought_Reproduction_P Parameter: Plant Line Value: WS
  misc_feature: MA Experiment 20001908 PARAMETER Experiment Name: At_Drought_Reproduction_P Parameter: Timepoint (day) Value: 10
  misc_feature: MA Experiment 20001908 PARAMETER Experiment Name: At_Drought_Reproduction_P Parameter: Tissue Value: Siliques
  misc_feature: MA Experiment 20001908 PARAMETER Experiment Name: At_Drought_Reproduction_P Parameter: Treatment Value: Drought vs. No Drought
  misc_feature: MA Experiment ID: 20001911 Result: Down-regulated in Transcription
  misc_feature: MA Experiment 20001911 PARAMETER Experiment Name: At_Drought_Reproduction_P Parameter: Age (day) Value: 40
  misc_feature: MA Experiment 20001911 PARAMETER Experiment Name: At_Drought_Reproduction_P Parameter: Organism Value: A. thaliana
  misc_feature: MA Experiment 20001911 PARAMETER Experiment Name: At_Drought_Reproduction_P Parameter: Plant Line Value: WS
  misc_feature: MA Experiment 20001911 PARAMETER Experiment Name: At_Drought_Reproduction_P Parameter: Timepoint (day) Value: 10
  misc_feature: MA Experiment 20001911 PARAMETER Experiment Name: At_Drought_Reproduction_P Parameter: Tissue Value: Flowers
  misc_feature: MA Experiment 20001911 PARAMETER Experiment Name: At_Drought_Reproduction_P Parameter: Treatment Value: Drought vs. No Drought
aaaagccacataagaagttgatgcagaagcaataataacaaaacaaaaaaacattaaaaaaaaaagctcttcagttttggtttctgcagtctccaatggctctcaagctctttctctttgctcttcttctctgtctcccgacttctctctcctccactgcctctaaaggtaaagagaagaagtcgaagtttaatccatacagatacacattcatcgataaagcaagcacattctcatcatcttcctcatcttcattttcatccaacggtcaagattcgtcctacgactacatagtcatcggaggtggaaccgcagggtgtcctctcgccgcaacgttgtcgcagaatttcagcgttcttgttttagagagaggtggcgttccgtttacaaacgcaaacgtttctttcctcaggaattttcacatcggacttgctgacatttcagcttcttccgcgtctcaagcgtttgtttccactgacggcgtttacaacgcccgtgctagagttctcggtggcggttcctgtattaacgccggtttttactccagagccgatgctgcgttcgtgaagcgagcaggatgggatccgaagctggtgaaggagtcgtatccatgggtggagagagagattgttcatcagccaaagttaacgttatggcagaaagctctcagagacagtcttttagaggttggagtcagacctttcaatggtttcacttacgatcacgtttccggaaccaaaatcggcggtacaattttcgacagattcggccgtcgtcacaccgcggcggagcttctcgcttacgctaatcctcagaagcttagagtcttgatctacgccaccgtgcaaaaaatcgtctttgacacttctggaacaaggcctcgagtaacaggagtaatattcaaagatgagaaaggtaatcaacaccaggctttactctcgaatagaaagggaagtgaagtgatcttatctagtggagctattgggtcaccacagatgctgatgttaagtgggattggacctaagaaggagcttcagaggctgaagattcctgtggttttagagaatgagcatgtaggaaaaggaatggctgataatcccatgaacacgatcttggtgccttcaaaggcgcctatagagcagtcacttattcagactgttggaattacaaagatgggtgtgtatgttgaagccagtactggctttgggcaatctcctgagagtattcatactcactatgggattatgtcgaacaagaatgaattgttttccaccattcctgcaaagcagagaagaccagaagcaacgcaagcttacatcacaagaaacaaataccaacttcacgaagcattcaatggaagtttcatcttggagaaacttgcttacccgatctctagagggcatttgagcttggtcaacacaaatgttgatgacaacccttcagtcaccttcaattactttaaacacccggtggatctccaacgctgtgttgaagccattcgtcttgtttccaaagtggtgacgtctaaccgtttcttaaactacacgcagtgtgacaagcaaaacgtacacaagatgcttagcttaagcgtcaaggcaaacatcaatctaaggccaaagcaactgaacgataccaaatcaatggctcagttctgcaaagacactgttgtcacaatctggcactaccatggtggatgtcttgtgggtaaagttgtgagccctaaccgcaaagttcttggtgtcgacaggctcagagttattgatggttcaacgtttgacgagtctccaggaaccaacccgcaagctactatgatgatgatgggaagatacatgggagtcaagattcttcgggagagacttggaaacaaagctggtgtttagtttgcagattgagcttttatggtagacaaattcgtagcagataattctgttgtggaattgtgttggagaatatctctctctgtctccttctctgttatttgatattcgattcattaaagtataggatcatattgtctaatgaactgtgtaaccctctattgggcaatcggctctgttgcttattagcttgtgtgaaaagttaatcacgttttctgtttcaa

SEQ ID NO: 91487 - protein, 594 aa, Arabidopsis thaliana; identical to SEQ ID NO: 76779
  peptide (1)..(594): Ceres Seq. ID no. 12727965
  misc_feature (63)..(328): Pfam Name: GMC oxidoreductase Pfam Description: GMC oxidoreductase
  misc_feature (1)..(594): Homolog of NCBI NO: 11357159 NR Description: adhesion of calyx edges protein ACE [imported] -
  misc_feature (51)..(594): Homolog of NCBI NO: 37572986 NR Description: putative mandelonitrile lyase [Oryza sativa
  misc_feature (41)..(591): Homolog of NCBI NO: 22329512 NR Description: hypothetical protein; protein id: At1g12570.1,
  misc_feature (41)..(591): Homolog of NCBI NO: 17978954 NR Description: At1g12570/T12C24_9 [Arabidopsis thaliana]
  misc_feature (61)..(591): Homolog of NCBI NO: 8778640 NR Description: F5O11.31 [Arabidopsis thaliana]
  misc_feature (61)..(591): Homolog of NCBI NO: 9502391 NR Description: T12C24.11 [Arabidopsis thaliana]
  misc_feature (41)..(591): Homolog of NCBI NO: 15242236 NR Description: mandelonitrile lyase-like protein; protein id: supported by cDNA: gi_14194160 [Arabidopsis thaliana]
  misc_feature (61)..(587): Homolog of NCBI NO: 11358959 NR Description: probable mandelonitrile lyase (EC 4.1.2.10) - rice >gi|7649261|gb|AAF65820.1|AF251031_1 putative
  misc_feature (41)..(577): Homolog of NCBI NO: 10177730 NR Description: mandelonitrile lyase-like protein [Arabidopsis
  misc_feature (59)..(577): Homolog of NCBI NO: 10177728 NR Description: mandelonitrile lyase-like protein [Arabidopsis

SEQ ID NO: 91488 - DNA, 630 bp, Arabidopsis thaliana
  misc_feature (1)..(630): Ceres Seq. ID no. 12727970
  misc_feature: MA Experiment ID: 20000794 Result: Up-regulated in Transcription
  misc_feature: MA Experiment 20000794 PARAMETER Experiment Name: At_Petals_P Parameter: Age (day) Value: 23-25 days
  misc_feature: MA Experiment 20000794 PARAMETER Experiment Name: At_Petals_P Parameter: Plant Line Value: WS
  misc_feature: MA Experiment 20000794 PARAMETER Experiment Name: At_Petals_P Parameter: Tissue Value: Petals vs. Whole plant
  misc_feature: MA Experiment ID: 20001904 Result: Up-regulated in Transcription
  misc_feature: MA Experiment 20001904 PARAMETER Experiment Name: At_Drought_Reproduction_P Parameter: Age (day) Value: 37
  misc_feature: MA Experiment 20001904 PARAMETER Experiment Name: At_Drought_Reproduction_P Parameter: Organism Value: A. thaliana
  misc_feature: MA Experiment 20001904 PARAMETER Experiment Name: At_Drought_Reproduction_P Parameter: Plant Line Value: WS
  misc_feature: MA Experiment 20001904 PARAMETER Experiment Name: At_Drought_Reproduction_P Parameter: Timepoint (day) Value: 7
  misc_feature: MA Experiment 20001904 PARAMETER Experiment Name: At_Drought_Reproduction_P Parameter: Tissue Value: Rosettes
  misc_feature: MA Experiment 20001904 PARAMETER Experiment Name: At_Drought_Reproduction_P Parameter: Treatment Value: Drought vs. No Drought
atgaatcttgctccaatccatgatccatcatcatcatcaacaacaacaacatcatcgtcaacaccatacggattaacaaaggacgagttctcaacactagactccatcatccgaacacaccacacgttcccaagatcgccaaacacgtgcacatcactcatagcacaccgtgtagacgcaccggcacatgccatatggagattcgtccgcgacttcgccaatccaaacaaatacaaacacttcatcaagagttgcaccatcagagttaacggtaacggcatcaaagagattaaagttgggactataagggaagttagcgtggtctctggtcttccagcgtcaacaagcgttgagatactcgaagttcttgacgaagagaaacgaatcttgagttttcgtgttcttggaggagaacaccggttaaataattaccggtcggttacatcggtcaacgagttcgtcgtcttggaaaaggataagaagaagagagtgtatagtgtggtattggagtcttacattgttgatataccacaaggtaacacggaagaagatacaaggatgtttgtggatacggtcgttaagtcgaatctacagaatctcgccgtcatttccacggcttctccgacctga

SEQ ID NO: 91489 - protein, 209 aa, Arabidopsis thaliana
  peptide (1)..(209): Ceres Seq. ID no. 12727971
  misc_feature (49)..(202): Pfam Name: Pathogenesis-related protein Bet v I family Pfam Description: Pathogenesis-related protein Bet v I family
  misc_feature (1)..(209): Homolog of NCBI NO: 15219339 NR Description: hypothetical protein; protein id: At1g73000.1
  misc_feature (17)..(208): Homolog of NCBI NO: 15225245 NR Description: hypothetical protein; protein id: At2g26040.1
  misc_feature (4)..(206): Homolog of NCBI NO: 22327625 NR Description: putative protein; protein id: At5g46790.1, by cDNA: gi_17380841 [Arabidopsis thaliana] unknown protein [Arabidopsis thaliana]
  misc_feature (22)..(206): Homolog of NCBI NO: 15236689 NR Description: putative protein; protein id: At4g17870.1, by cDNA: gi_14596204, supported by cDNA: gi_20148394 [Arabidopsis
  misc_feature (22)..(206): Homolog of NCBI NO: 9758515 NR Description: gene_id:MZA15.21~pir||T05073~similar to unknown
  misc_feature (24)..(207): Homolog of NCBI NO: 37537066 NR Description: unknown protein [Oryza sativa (japonica
  misc_feature (6)..(204): Homolog of NCBI NO: 18404709 NR Description: expressed protein; protein id: At2g38310.1, by cDNA: 32244., supported by cDNA: gi_14517501, supported by gi_15809747 [Arabidopsis thaliana] >gi|7487162|pir||T02514
  misc_feature (37)..(201): Homolog of NCBI NO: 15239114 NR Description: putative protein; protein id: At5g05440.1, by cDNA: 117347., supported by cDNA: gi_15529253, supported by gi_16974394 [Arabidopsis thaliana] >gi|10176756|dbj|BAB09987.1|
  misc_feature (37)..(201): Homolog of NCBI NO: 34907924 NR Description: B1088C09.9 [Oryza sativa (japonica
  misc_feature (37)..(204): Homolog of NCBI NO: 18405351 NR Description: expressed protein; protein id: At2g40330.1, by cDNA: 6787. [Arabidopsis thaliana] >gi|20198019|gb|AAD25668.2| protein [Arabidopsis thaliana] >gi|21594278|gb|AAM65989.1|
MNLAPIHDPSSSSTTTTSSSTPYGLTKDEFSTLDSIIRTHHTFPRSPNTCTSLIAHRVDAPAHAIWRFVRDFANPNKYKHFIKSCTIRVNGNGIKEIKVGTIREVSVVSGLPASTSVEILEVLDEEKRILSFRVLGGEHRLNNYRSVTSVNEFVVLEKDKKKRVYSVVLESYIVDIPQGNTEEDTRMFVDTVVKSNLQNLAVISTASPT

SEQ ID NO: 91490 - DNA, 1461 bp, Arabidopsis thaliana
  misc_feature (1)..(1461): Ceres Seq. ID no. 12727996
  misc_feature: MA Experiment ID: 20000307 Result: Up-regulated in Transcription
  misc_feature: MA Experiment 20000307 PARAMETER Experiment Name: At_Germinating_Seeds_Sub_P Parameter: Age (hr) Value: 24 vs. 0
  misc_feature: MA Experiment 20000307 PARAMETER Experiment Name: At_Germinating_Seeds_Sub_P Parameter: Organism Value: A. thaliana
  misc_feature: MA Experiment 20000307 PARAMETER Experiment Name: At_Germinating_Seeds_Sub_P Parameter: Plant Line Value: WS
  misc_feature: MA Experiment 20000307 PARAMETER Experiment Name: At_Germinating_Seeds_Sub_P Parameter: Tissue Value: Germinating Seeds
  misc_feature: MA Experiment ID: 20000314 Result: Up-regulated in Transcription
  misc_feature: MA Experiment 20000314 PARAMETER Experiment Name: At_14day_Shoots-Roots_Sub_P Parameter: Age (day) Value: 14
  misc_feature: MA Experiment 20000314 PARAMETER Experiment Name: At_14day_Shoots-Roots_Sub_P Parameter: Organism Value: A. thaliana
  misc_feature: MA Experiment 20000314 PARAMETER Experiment Name: At_14day_Shoots-Roots_Sub_P Parameter: Plant Line Value: WS
  misc_feature: MA Experiment 20000314 PARAMETER Experiment Name: At_14day_Shoots-Roots_Sub_P Parameter: Tissue Value: Roots vs. Whole Plant
atggccttcaagaaccattcttcaagaacaactctttcttcttcttcttccacttcattttcattcagattcacaacaatcattaccttagcattcatcttttgttcttcttactacattttcttctcacagtttgattactctccggtgacttcttcaccggaaaatcctcctttcgcaggagatcttcgagacctgacattcccttggaacaaactctcacttggaccaatctcggagaagctcaaactcgctgtcttctgcaagtcatggcctgttggttcgatccccggaggaatggagcgtcatgcttacacactctacacttctctcgcctcaagaggtcacgagattcacgtcttcacggtttcttccgacagaagtaaccgagaagagtactacaacaaaggagatctccatgtctactttgctccaaacgaacacggctcacttaaccactctcgagcttttgagatcttccataaaatcaacagtctagatcatcattcctttgattatgttcacactgagagtgtttctctgcctcattggcgagtcaaaatggtgcctaatggtgacatagctgtgacatggcacggaatctggtacgagattatgcattcaaatctttttcaagaactttccaatgatcgtcctagctctgatcttcaacaaacgatgcctagactcgtcgatgaaatcagattcttcccaaaatataaacagcatatttgcattagcaacagcgcgcgcgaggtactagttaacatctatcaacttcctaagagaaaagttcacgttatagtcaacggtgttgaccaaaccaagttcgtgtattctcctgaatctggagctaggttcagggcgaaacacggtattcctgacaatgggacatatattgtgatgggtgtgtctggacgtttggtgagagacaaaggacatccacttctatatgaagcgtttgctttgctcgttaaaatgcacccgaaagtctatttgcttgtggctggatctggtccttggggcaaaagatacgcggaattaggcgaaaacgttagggttttaggagctttagagccagaggagctctctggtttctacaacgctttagatgtgtttgtgaatccgacgttgagaccacaggggcttgatttgacgatcattgaggcgatgcagtgtgggaaacctgtcgtggcacctaattatccaagcattgttgggacagtggttgtggacgagcgttttgggtacacattttctccaaacgtgagatctcttgttgagactttggattctgttgtaagagatgggcctagggttttggagatgaaaggaatagcttgtaagggatacgctctttcgatgtttacagcgactcaaatggcttcggcttatgagagattctttatgtgtatgaaaaatgagaggtactgtaggtaccctctttccacagataactga

SEQ ID NO: 91491 - protein, 486 aa, Arabidopsis thaliana
  peptide (1)..(486): Ceres Seq. ID no. 12727997
  misc_feature (283)..(450): Pfam Name: Glycosyl transferases group 1 Pfam Description: Glycosyl transferases group 1
  misc_feature (1)..(486): Homolog of NCBI NO: 15219398 NR Description: putative glycosyl transferase; protein id: [Arabidopsis thaliana] >gi|25406256|pir||E96757 protein glycosyl
  misc_feature (1)..(476): Homolog of NCBI NO: 5903105 NR Description: Hypothetical protein [Arabidopsis thaliana]
  misc_feature (13)..(481): Homolog of NCBI NO: 18415319 NR Description: putative protein; protein id: At4g19460.1,
  misc_feature (13)..(481): Homolog of NCBI NO: 21593749 NR Description: unknown [Arabidopsis thaliana]
  misc_feature (59)..(485): Homolog of NCBI NO: 34911892 NR Description: OSJNBb0032K15.23 [Oryza sativa (japonica
  misc_feature (13)..(461): Homolog of NCBI NO: 7487719 NR Description: hypothetical protein T5K18.240 - Arabidopsis
  misc_feature (13)..(458): Homolog of NCBI NO: 7486088 NR Description: hypothetical protein F24J7.20 - Arabidopsis
  misc_feature (13)..(458): Homolog of NCBI NO: 25407571 NR Description: hypothetical protein AT4g19460 [imported] - thaliana >gi|4582486|emb|CAA16923.2| putative protein thaliana] >gi|7268741|emb|CAB78948.1| putative protein
  misc_feature (219)..(478): Homolog of NCBI NO: 15237813 NR Description: hexosyltransferase - like protein; protein id:
  misc_feature (12)..(214): Homolog of NCBI NO: 15237813 NR Description: hexosyltransferase - like protein; protein id:
MAFKNHSSRTTLSSSSSTSFSFRFTTIITLAFIFCSSYYIFFSQFDYSPVTSSPENPPFAGDLRDLTFPWNKLSLGPISEKLKLAVFCKSWPVGSIPGGMERHAYTLYTSLASRGHEIHVFTVSSDRSNREEYYNKGDLHVYFAPNEHGSLNHSRAFEIFHKINSLDHHSFDYVHTESVSLPHWRVKMVPNGDIAVTWHGIWYEIMHSNLFQELSNDRPSSDLQQTMPRLVDEIRFFPKYKQHICISNSAREVLVNIYQLPKRKVHVIVNGVDQTKFVYSPESGARFRAKHGIPDNGTYIVMGVSGRLVRDKGHPLLYEAFALLVKMHPKVYLLVAGSGPWGKRYAELGENVRVLGALEPEELSGFYNALDVFVNPTLRPQGLDLTIIEAMQCGKPVVAPNYPSIVGTVVVDERFGYTFSPNVRSLVETLDSVVRDGPRVLEMKGIACKGYALSMFTATQMASAYERFFMCMKNERYCRYPLSTDN

SEQ ID NO: 91492 - protein, 387 aa, Arabidopsis thaliana
  peptide (1)..(387): Ceres Seq. ID no. 12727998
  misc_feature (184)..(351): Pfam Name: Glycosyl transferases group 1 Pfam Description: Glycosyl transferases group 1
  misc_feature (1)..(387): Homolog of NCBI NO: 15219398 NR Description: putative glycosyl transferase; protein id: [Arabidopsis thaliana] >gi|25406256|pir||E96757 protein glycosyl
  misc_feature (1)..(377): Homolog of NCBI NO: 5903105 NR Description: Hypothetical protein [Arabidopsis thaliana]
  misc_feature (1)..(382): Homolog of NCBI NO: 18415319 NR Description: putative protein; protein id: At4g19460.1,
  misc_feature (1)..(382): Homolog of NCBI NO: 21593749 NR Description: unknown [Arabidopsis thaliana]
  misc_feature (1)..(386): Homolog of NCBI NO: 34911892 NR Description: OSJNBb0032K15.23 [Oryza sativa (japonica
  misc_feature (1)..(362): Homolog of NCBI NO: 7487719 NR Description: hypothetical protein T5K18.240 - Arabidopsis
  misc_feature (1)..(359): Homolog of NCBI NO: 7486088 NR Description: hypothetical protein F24J7.20 - Arabidopsis
  misc_feature (1)..(359): Homolog of NCBI NO: 25407571 NR Description: hypothetical protein AT4g19460 [imported] - thaliana >gi|4582486|emb|CAA16923.2| putative protein thaliana] >gi|7268741|emb|CAB78948.1| putative protein
  misc_feature (120)..(379): Homolog of NCBI NO: 15237813 NR Description: hexosyltransferase - like protein; protein id:
  misc_feature (1)..(115): Homolog of NCBI NO: 15237813 NR Description: hexosyltransferase - like protein; protein id:
MERHAYTLYTSLASRGHEIHVFTVSSDRSNREEYYNKGDLHVYFAPNEHGSLNHSRAFEIFHKINSLDHHSFDYVHTESVSLPHWRVKMVPNGDIAVTWHGIWYEIMHSNLFQELSNDRPSSDLQQTMPRLVDEIRFFPKYKQHICISNSAREVLVNIYQLPKRKVHVIVNGVDQTKFVYSPESGARFRAKHGIPDNGTYIVMGVSGRLVRDKGHPLLYEAFALLVKMHPKVYLLVAGSGPWGKRYAELGENVRVLGALEPEELSGFYNALDVFVNPTLRPQGLDLTIIEAMQCGKPVVAPNYPSIVGTVVVDERFGYTFSPNVRSLVETLDSVVRDGPRVLEMKGIACKGYALSMFTATQMASAYERFFMCMKNERYCRYPLSTDN

SEQ ID NO: 91493 - protein, 299 aa, Arabidopsis thaliana
  peptide (1)..(299): Ceres Seq. ID no. 12727999
  misc_feature (96)..(263): Pfam Name: Glycosyl transferases group 1 Pfam Description: Glycosyl transferases group 1
  misc_feature (1)..(299): Homolog of NCBI NO: 15219398 NR Description: putative glycosyl transferase; protein id: [Arabidopsis thaliana] >gi|25406256|pir||E96757 protein glycosyl
  misc_feature (1)..(289): Homolog of NCBI NO: 5903105 NR Description: Hypothetical protein [Arabidopsis thaliana]
  misc_feature (1)..(294): Homolog of NCBI NO: 18415319 NR Description: putative protein; protein id: At4g19460.1,
  misc_feature (1)..(294): Homolog of NCBI NO: 21593749 NR Description: unknown [Arabidopsis thaliana]
  misc_feature (1)..(298): Homolog of NCBI NO: 34911892 NR Description: OSJNBb0032K15.23 [Oryza sativa (japonica
  misc_feature (1)..(274): Homolog of NCBI NO: 7487719 NR Description: hypothetical protein T5K18.240 - Arabidopsis
  misc_feature (1)..(271): Homolog of NCBI NO: 7486088 NR Description: hypothetical protein F24J7.20 - Arabidopsis
  misc_feature (1)..(271): Homolog of NCBI NO: 25407571 NR Description: hypothetical protein AT4g19460 [imported] - thaliana >gi|4582486|emb|CAA16923.2| putative protein thaliana] >gi|7268741|emb|CAB78948.1| putative protein
  misc_feature (32)..(291): Homolog of NCBI NO: 15237813 NR Description: hexosyltransferase - like protein; protein id:
  misc_feature (1)..(27): Homolog of NCBI NO: 15237813 NR Description: hexosyltransferase - like protein; protein id:
MVPNGDIAVTWHGIWYEIMHSNLFQELSNDRPSSDLQQTMPRLVDEIRFFPKYKQHICISNSAREVLVNIYQLPKRKVHVIVNGVDQTKFVYSPESGARFRAKHGIPDNGTYIVMGVSGRLVRDKGHPLLYEAFALLVKMHPKVYLLVAGSGPWGKRYAELGENVRVLGALEPEELSGFYNALDVFVNPTLRPQGLDLTIIEAMQCGKPVVAPNYPSIVGTVVVDERFGYTFSPNVRSLVETLDSVVRDGPRVLEMKGIACKGYALSMFTATQMASAYERFFMCMKNERYCRYPLSTDN

SEQ ID NO: 91494 - DNA, 981 bp, Arabidopsis thaliana
  misc_feature (1)..(981): Ceres Seq. ID no. 12728004
  misc_feature: MA Experiment ID: 20000306 Result: Down-regulated in Transcription
  misc_feature: MA Experiment 20000306 PARAMETER Experiment Name: At_Germinating_Seeds_Sub_P Parameter: Age (hr) Value: 6 vs. 0
  misc_feature: MA Experiment 20000306 PARAMETER Experiment Name: At_Germinating_Seeds_Sub_P Parameter: Organism Value: A. thaliana
  misc_feature: MA Experiment 20000306 PARAMETER Experiment Name: At_Germinating_Seeds_Sub_P Parameter: Plant Line Value: WS
  misc_feature: MA Experiment 20000306 PARAMETER Experiment Name: At_Germinating_Seeds_Sub_P Parameter: Tissue Value: Germinating Seeds
  misc_feature: MA Experiment ID: 20000307 Result: Down-regulated in Transcription
  misc_feature: MA Experiment 20000307 PARAMETER Experiment Name: At_Germinating_Seeds_Sub_P Parameter: Age (hr) Value: 24 vs. 0
  misc_feature: MA Experiment 20000307 PARAMETER Experiment Name: At_Germinating_Seeds_Sub_P Parameter: Organism Value: A. thaliana
  misc_feature: MA Experiment 20000307 PARAMETER Experiment Name: At_Germinating_Seeds_Sub_P Parameter: Plant Line Value: WS
  misc_feature: MA Experiment 20000307 PARAMETER Experiment Name: At_Germinating_Seeds_Sub_P Parameter: Tissue Value: Germinating Seeds
  misc_feature: MA Experiment ID: 20000315 Result: Up-regulated in Transcription
  misc_feature: MA Experiment 20000315 PARAMETER Experiment Name: At_14day_Shoots-Roots_Sub_P Parameter: Age (day) Value: 14
  misc_feature: MA Experiment 20000315 PARAMETER Experiment Name: At_14day_Shoots-Roots_Sub_P Parameter: Organism Value: A. thaliana
  misc_feature: MA Experiment 20000315 PARAMETER Experiment Name: At_14day_Shoots-Roots_Sub_P Parameter: Plant Line Value: WS
  misc_feature: MA Experiment 20000315 PARAMETER Experiment Name: At_14day_Shoots-Roots_Sub_P Parameter: Tissue Value: Shoots vs. Whole Plant
  misc_feature: MA Experiment ID: 20000329 Result: Down-regulated in Transcription
  misc_feature: MA Experiment 20000329 PARAMETER Experiment Name: At_4deg_Cold_Sub_P Parameter: Age (day) Value: 14
  misc_feature: MA Experiment 20000329 PARAMETER Experiment Name: At_4deg_Cold_Sub_P Parameter: Organism Value: A. thaliana
  misc_feature: MA Experiment 20000329 PARAMETER Experiment Name: At_4deg_Cold_Sub_P Parameter: Plant Line Value: WS
  misc_feature: MA Experiment 20000329 PARAMETER Experiment Name: At_4deg_Cold_Sub_P Parameter: Temperature (deg C) Value: 4 vs. 22
  misc_feature: MA Experiment 20000329 PARAMETER Experiment Name: At_4deg_Cold_Sub_P Parameter: Timepoint (hr) Value: 6
  misc_feature: MA Experiment 20000329 PARAMETER Experiment Name: At_4deg_Cold_Sub_P Parameter: Tissue Value: Aerial
  misc_feature: MA Experiment ID: 20000355 Result: Down-regulated in Transcription
  misc_feature: MA Experiment 20000355 PARAMETER Experiment Name: At_Siliques_Sub_P Parameter: Age (day) Value: 21
  misc_feature: MA Experiment 20000355 PARAMETER Experiment Name: At_Siliques_Sub_P Parameter: Organism Value: A. thaliana
  misc_feature: MA Experiment 20000355 PARAMETER Experiment Name: At_Siliques_Sub_P Parameter: Plant Line Value: WS
  misc_feature: MA Experiment 20000355 PARAMETER Experiment Name: At_Siliques_Sub_P Parameter: Tissue Value: Less Than 5mm Siliques vs. Whole Plant
  misc_feature: MA Experiment ID: 20000440 Result: Down-regulated in Transcription
  misc_feature: MA Experiment 20000440 PARAMETER Experiment Name: At_Closed-Flower__Sub_P Parameter: Tissue Value: Closed Flower vs. Whole Plant
acactttgttgttaatttcaagtgtttgatcataatggcaacatcagctcgtagagcatacggtttcggtagagccgatgaggctacacaccctgactccattagagcaactttagctgagtttctctccacttttgtcttcgtctttgcagctgaaggctctatcctctctctcgataagttgtattgggaacatgcggctcatgcggggacaaacacaccaggagggctgattttagtagcgttggctcatgcgtttgctctgtttgctgctgtttcagcagccattaatgtctccggcggacacgttaacccggcagtcacttttggtgctcttgttggaggcagagttacagcgatccgcgccatctactactggatcgctcagcttcttggagccatcctcgcttgtctcttgttaaggctcacaacaaacggcatgagaccagttggtttccgtctagcatcaggtgttggagcggttaatggacttgtattagagatcattttaacatttggcttagtctacgtagtgtattccactttgattgatccaaaacgtggaagcctcgggatcatagcaccgcttgcaatcggactcatagttggggcaaacatcttagtaggtggaccattttctggtgcttcgatgaatccagctagagcttttggtccagcgttggtgggatggagatggcatgaccactggatctattgggtcggaccattcatcggtagtgctttagccgcccttatatatgagtacatggtcatacccaccgaaccacctacccaccacgcacatggtgtacaccagcccttggcccctgaagattactagatggaactttcctcatgtcaccactgcttttgttcgttgttcaagctctctttgtctgtatgatgagatcacttgcatagatactttttttcttatgctactcttatgttgtaataataaaaaataaagaacgatttcgc

SEQ ID NO: 91495 - protein, 279 aa, Arabidopsis thaliana
  peptide (1)..(279): Ceres Seq. ID no. 12728005
  misc_feature (27)..(253): Pfam Name: Major intrinsic protein Pfam Description: Major intrinsic protein
  misc_feature (12)..(279): Homolog of NCBI NO: 15219403 NR Description: tonoplast intrinsic protein, alpha (alpha-TIP); id: At1g73190.1 [Arabidopsis thaliana] Tonoplast intrinsic protein, alpha (Alpha TIP)
  misc_feature (12)..(279): Homolog of NCBI NO: 15220848 NR Description: tonoplast intrinsic protein, putative; protein
  misc_feature (77)..(279): Homolog of NCBI NO: 7441287 NR Description: membrane protein MP23 precursor - cucurbit
  misc_feature (18)..(76): Homolog of NCBI NO: 7441287 NR Description: membrane protein MP23 precursor - cucurbit
  misc_feature (59)..(279): Homolog of NCBI NO: 30685536 NR Description: major intrinsic protein (MIP) family [Arabidopsis
  misc_feature (18)..(279): Homolog of NCBI NO: 7441288 NR Description: membrane protein MP28 - cucurbit
  misc_feature (16)..(279): Homolog of NCBI NO: 81886 NR Description: tonoplast intrinsic protein alpha - kidney bean
  misc_feature (16)..(279): Homolog of NCBI NO: 135859 NR Description: TONOPLAST INTRINSIC PROTEIN, ALPHA (ALPHA TIP)
  misc_feature (12)..(279): Homolog of NCBI NO: 37535634 NR Description: putative beta-tonoplast intrinsic protein [Oryza
  misc_feature (12)..(279): Homolog of NCBI NO: 13447827 NR Description: tonoplast membrane integral protein ZmTIP3-1 [Zea
HFVVNFKCLIIMATSARRAYGFGRADEATHPDSIRATLAEFLSTFVFVFAAEGSILSLDKLYWEHAAHAGTNTPGGLILVALAHAFALFAAVSAAINVSGGHVNPAVTFGALVGGRVTAIRAIYYWIAQLLGAILACLLLRLTTNGMRPVGFRLASGVGAVNGLVLEIILTFGLVYVVYSTLIDPKRGSLGIIAPLAIGLIVGANILVGGPFSGASMNPARAFGPALVGWRWHDHWIYWVGPFIGSALAALIYEYMVIPTEPPTHHAHGVHQPLAPEDY

SEQ ID NO: 91496 - protein, 268 aa, Arabidopsis thaliana
  peptide (1)..(268): Ceres Seq. ID no. 12728006
  misc_feature (16)..(242): Pfam Name: Major intrinsic protein Pfam Description: Major intrinsic protein
  misc_feature (1)..(268): Homolog of NCBI NO: 15219403 NR Description: tonoplast intrinsic protein, alpha (alpha-TIP); id: At1g73190.1 [Arabidopsis thaliana] Tonoplast intrinsic protein, alpha (Alpha TIP)
  misc_feature (1)..(268): Homolog of NCBI NO: 15220848 NR Description: tonoplast intrinsic protein, putative; protein
  misc_feature (66)..(268): Homolog of NCBI NO: 7441287 NR Description: membrane protein MP23 precursor - cucurbit
  misc_feature (7)..(65): Homolog of NCBI NO: 7441287 NR Description: membrane protein MP23 precursor - cucurbit
  misc_feature (48)..(268): Homolog of NCBI NO: 30685536 NR Description: major intrinsic protein (MIP) family [Arabidopsis
  misc_feature (7)..(268): Homolog of NCBI NO: 7441288 NR Description: membrane protein MP28 - cucurbit
  misc_feature (5)..(268): Homolog of NCBI NO: 81886 NR Description: tonoplast intrinsic protein alpha - kidney bean
  misc_feature (5)..(268): Homolog of NCBI NO: 135859 NR Description: TONOPLAST INTRINSIC PROTEIN, ALPHA (ALPHA TIP)
  misc_feature (1)..(268): Homolog of NCBI NO: 37535634 NR Description: putative beta-tonoplast intrinsic protein [Oryza
  misc_feature (1)..(268): Homolog of NCBI NO: 13447827 NR Description: tonoplast membrane integral protein ZmTIP3-1 [Zea
MATSARRAYGFGRADEATHPDSIRATLAEFLSTFVFVFAAEGSILSLDKLYWEHAAHAGTNTPGGLILVALAHAFALFAAVSAAINVSGGHVNPAVTFGALVGGRVTAIRAIYYWIAQLLGAILACLLLRLTTNGMRPVGFRLASGVGAVNGLVLEIILTFGLVYVVYSTLIDPKRGSLGIIAPLAIGLIVGANILVGGPFSGASMNPARAFGPALVGWRWHDHWIYWVGPFIGSALAALIYEYMVIPTEPPTHHAHGVHQPLAPEDY

SEQ ID NO: 91497 - DNA, 2340 bp, Arabidopsis thaliana
  misc_feature (1)..(2340): Ceres Seq. ID no. 12728007
  misc_feature: MA Experiment ID: 20000179 Result: Up-regulated in Transcription
  misc_feature: MA Experiment 20000179 PARAMETER Experiment Name: At_Germinating_Seeds_P Parameter: Age (hr) Value: 6 vs. 0
  misc_feature: MA Experiment 20000179 PARAMETER Experiment Name: At_Germinating_Seeds_P Parameter: Tissue Value: Germinating Seeds
  misc_feature: MA Experiment ID: 20000184 Result: Down-regulated in Transcription
  misc_feature: MA Experiment 20000184 PARAMETER Experiment Name: At_Shoots__P Parameter: Age (day) Value: 7
  misc_feature: MA Experiment 20000184 PARAMETER Experiment Name: At_Shoots__P Parameter: Tissue Value: Shoots vs. Whole Plant
  misc_feature: MA Experiment ID: 20001247 Result: Up-regulated in Transcription
  misc_feature: MA Experiment 20001247 PARAMETER Experiment Name: At_Far-red-induction_P Parameter: Age (day) Value: 7
  misc_feature: MA Experiment 20001247 PARAMETER Experiment Name: At_Far-red-induction_P Parameter: Light Value: Far-red vs. White
  misc_feature: MA Experiment 20001247 PARAMETER Experiment Name: At_Far-red-induction_P Parameter: Organism Value: A. thaliana
  misc_feature: MA Experiment 20001247 PARAMETER Experiment Name: At_Far-red-induction_P Parameter: Plant Line Value: Columbia
  misc_feature: MA Experiment 20001247 PARAMETER Experiment Name: At_Far-red-induction_P Parameter: Timepoint (hr) Value: 1
  misc_feature: MA Experiment 20001247 PARAMETER Experiment Name: At_Far-red-induction_P Parameter: Tissue Value: Whole Plant
  misc_feature: MA Experiment ID: 20001451 Result: Up-regulated in Transcription
  misc_feature: MA Experiment 20001451 PARAMETER Experiment Name: At_Far-red-induction_P Parameter: Age (day) Value: 7
  misc_feature: MA Experiment 20001451 PARAMETER Experiment Name: At_Far-red-induction_P Parameter: Light Value: Far-red vs. White
  misc_feature: MA Experiment 20001451 PARAMETER Experiment Name: At_Far-red-induction_P Parameter: Organism Value: A. thaliana
  misc_feature: MA Experiment 20001451 PARAMETER Experiment Name: At_Far-red-induction_P Parameter: Plant Line Value: Columbia
  misc_feature: MA Experiment 20001451 PARAMETER Experiment Name: At_Far-red-induction_P Parameter: Timepoint (hr) Value: 24
  misc_feature: MA Experiment 20001451 PARAMETER Experiment Name: At_Far-red-induction_P Parameter: Tissue Value: Whole Plant
atggtttcgtttacgggtttcgctttcgtatttggaattctacttgggattcttgcgatcgttacggcggaagttgtagggtttttgtatcttctgaagcgattgaatcggaaaagagatcgtcaggaatcgaattcgagttctgatccaaacttcaagagttttgatcctcgccaatccattgattttagtctcaacaaacagggagtgatctggatattggaattagatgaaaatgtaaaagattggatgaaggagaaattaccaaaagagcaaaagaagaagagagtagatctcttggaggtacatccagttaggagatttgctcgcatcaaagatcataagctcatcttgtctgattcattagatggccctcagactcctattactttgaaaggttgctttgttgacgctgtttcaggctctggaccaacaaggaaatgggctaaaagatttcctatacaagtagaaagcaaaacttctgtcttgtataaaggaaacagagtgttttacattttcttagagacttcttgggagaaggagtcatggtgtaaagctcttcgtcttgctgcttgcgagaatcaggaaaggtttatttggtccaccaaattgaaagaagatttccggaactatctggcttcccttaatgctgcctatccttcttttatgaaaccatcagctgggtttagttttgagtcattggacaaggggcttaaagcagatggtccttcatcaaaggttcgtttgatctggaagaaattttcgaaaaagtgctcaactaaagtgaattttcccccgtcgattcgtgacgacaagaagacttcatcccgttcttaccaagattcacaatctactggtagctctggaaagagtacctcagcaaggaggatgcaagataacatcccggaggaaactgatgtccaagttatctcacgttcttggagccatagcagtcatgcatcagatgtagattcagaagacaagtcttttgatgaaggaacattggcattgaacgtagtattatctcggctgttttttgatgttaaacagaacacagtactgaagaatttagtgcgcgaacgaatccagcggataatgtccaacatgagaattcccagctacataggcgaattaatctgctgtgacgtagacattggaaatctcccgccttacatacacggtacgagaattcttccaatggagatgaatggtgtgtgggcgttcgaaatagatattgaatacactggtggtgcgggacttgaagttgaaactcgggttgatgctcgagaggaagatttgcagaaaggcatagctgagggaaagttgcagccaaattctgctggggatgttccaccagatctccttgaaggtcttgcagattttgaaaagcaattaaatgttcccggaggaactgttgatgcacaagatgtgaaaagtggtggaactgataaagctgatgaatcgaagggtccaaaaggtacaaaaacaggttcgagcaatggatccaagtggaagtctatgctgaagaacatcgttgaacaagtttcccaggtcccaattactttgtctataggggtgtcttcgcttcgagggacactgtgtgtacacatgaagccgcctccatctgatcaactgtggtttggcttcacaagcatgcctgatattgaattcaaccttgtctcttctgttggtgaacacaaaatcacaaacagccatgttgctatgttcttggtcaaccggttcaagacggcgatacgagacgtcatggtgctccccaattgtgaaagcgttaccattccttggatgacagctgaaaaggatgattgggtcgaacgcaatgtcgctccattcatgtggctgaatcaagactccaccagtgatcgcgaaaatttggaagctgcagaagcgaaatctaaagctgacaagccaccgacttctgaacaaatgcagaaaactgtcaacatcccgcagaagcctagaattgaggaagaatctgtgtcggctgacactgcaccatcagctaattccatagctctcctagtagagagtgacaaatccttagaagaactcaagactccactgctggaaagcagcgaaaagcatgatacaatagcgagaggaggcagtgcgggagatataattccgggtattggtcaatcaccgtctatgtcgactgtttcgggtgaagaggatgattcaaattcaaaaggaaagaaaatgggggcagcaaaggcgaggatgttcgattttaggaagaaagtgggagagaagtttgaagagaagaaacgtcacgttgaggaaaaaagtagacagattgttgaaaagatgagaggaccttga

SEQ ID NO: 91498 - protein, 779 aa, Arabidopsis thaliana
  peptide (1)..(779): Ceres Seq. ID no. 12728008
  misc_feature (1)..(737): Homolog of NCBI NO: 30685543 NR Description: expressed protein [Arabidopsis thaliana]
  misc_feature (1)..(737): Homolog of NCBI NO: 25518065 NR Description: F2H15.5 protein - Arabidopsis thaliana Strong similarity to a hypothetical protein T18K17.13 gi|6598861 Arabidopsis thaliana BAC T18K17 gb|AC010556 and contains a PH
  misc_feature (646)..(779): Homolog of NCBI NO: 25518065 NR Description: F2H15.5 protein - Arabidopsis thaliana Strong similarity to a hypothetical protein T18K17.13 gi|6598861 Arabidopsis thaliana BAC T18K17 gb|AC010556 and contains a PH
  misc_feature (646)..(779): Homolog of NCBI NO: 30685543 NR Description: expressed protein [Arabidopsis thaliana]
  misc_feature (298)..(607): Homolog of NCBI NO: 34783705 NR Description: Unknown (protein for MGC:62520) [Mus musculus]
  misc_feature (167)..(607): Homolog of NCBI NO: 26251776 NR Description: Uncharacterized hypothalamus protein HT008 [Homo
  misc_feature (167)..(607): Homolog of NCBI NO: 38679909 NR Description: uncharacterized hypothalamus protein HT008 [Homo
  misc_feature (298)..(607): Homolog of NCBI NO: 38091890 NR Description: testis expressed gene 2 [Mus musculus]
  misc_feature (167)..(607): Homolog of NCBI NO: 33337924 NR Description: MSTP069 [Homo sapiens]
  misc_feature (167)..(607): Homolog of NCBI NO: 7021045 NR Description: unnamed protein product [Homo sapiens]
MVSFTGFAFVFGILLGILAIVTAEVVGFLYLLKRLNRKRDRQESNSSSDPNFKSFDPRQSIDFSLNKQGVIWILELDENVKDWMKEKLPKEQKKKRVDLLEVHPVRRFARIKDHKLILSDSLDGPQTPITLKGCFVDAVSGSGPTRKWAKRFPIQVESKTSVLYKGNRVFYIFLETSWEKESWCKALRLAACENQERFIWSTKLKEDFRNYLASLNAAYPSFMKPSAGFSFESLDKGLKADGPSSKVRLIWKKFSKKCSTKVNFPPSIRDDKKTSSRSYQDSQSTGSSGKSTSARRMQDNIPEETDVQVISRSWSHSSHASDVDSEDKSFDEGTLALNVVLSRLFFDVKQNTVLKNLVRERIQRIMSNMRIPSYIGELICCDVDIGNLPPYIHGTRILPMEMNGVWAFEIDIEYTGGAGLEVETRVDAREEDLQKGIAEGKLQPNSAGDVPPDLLEGLADFEKQLNVPGGTVDAQDVKSGGTDKADESKGPKGTKTGSSNGSKWKSMLKNIVEQVSQVPITLSIGVSSLRGTLCVHMKPPPSDQLWFGFTSMPDIEFNLVSSVGEHKITNSHVAMFLVNRFKTAIRDVMVLPNCESVTIPWMTAEKDDWVERNVAPFMWLNQDSTSDRENLEAAEAKSKADKPPTSEQMQKTVNIPQKPRIEEESVSADTAPSANSIALLVESDKSLEELKTPLLESSEKHDTIARGGSAGDIIPGIGQSPSMSTVSGEEDDSNSKGKKMGAAKARMFDFRKKVGEKFEEKKRHVEEKSRQIVEKMRGP

SEQ ID NO: 91499 - protein, 696 aa, Arabidopsis thaliana
  peptide (1)..(696): Ceres Seq. ID no. 12728009
  misc_feature (1)..(654): Homolog of NCBI NO: 30685543 NR Description: expressed protein [Arabidopsis thaliana]
  misc_feature (1)..(654): Homolog of NCBI NO: 25518065 NR Description: F2H15.5 protein - Arabidopsis thaliana Strong similarity to a hypothetical protein T18K17.13 gi|6598861 Arabidopsis thaliana BAC T18K17 gb|AC010556 and contains a PH
  misc_feature (563)..(696): Homolog of NCBI NO: 25518065 NR Description: F2H15.5 protein - Arabidopsis thaliana Strong similarity to a hypothetical protein T18K17.13 gi|6598861 Arabidopsis thaliana BAC T18K17 gb|AC010556 and contains a PH
  misc_feature (563)..(696): Homolog of NCBI NO: 30685543 NR Description: expressed protein [Arabidopsis thaliana]
  misc_feature (215)..(524): Homolog of NCBI NO: 34783705 NR Description: Unknown (protein for MGC:62520) [Mus musculus]
  misc_feature (84)..(524): Homolog of NCBI NO: 26251776 NR Description: Uncharacterized hypothalamus protein HT008 [Homo
  misc_feature (84)..(524): Homolog of NCBI NO: 38679909 NR Description: uncharacterized hypothalamus protein HT008 [Homo
  misc_feature (215)..(524): Homolog of NCBI NO: 38091890 NR Description: testis expressed gene 2 [Mus musculus]
  misc_feature (84)..(524): Homolog of NCBI NO: 33337924 NR Description: MSTP069 [Homo sapiens]
  misc_feature (84)..(524): Homolog of NCBI NO: 7021045 NR Description: unnamed protein product [Homo sapiens]
MKEKLPKEQKKKRVDLLEVHPVRRFARIKDHKLILSDSLDGPQTPITLKGCFVDAVSGSGPTRKWAKRFPIQVESKTSVLYKGNRVFYIFLETSWEKESWCKALRLAACENQERFIWSTKLKEDFRNYLASLNAAYPSFMKPSAGFSFESLDKGLKADGPSSKVRLIWKKFSKKCSTKVNFPPSIRDDKKTSSRSYQDSQSTGSSGKSTSARRMQDNIPEETDVQVISRSWSHSSHASDVDSEDKSFDEGTLALNVVLSRLFFDVKQNTVLKNLVRERIQRIMSNMRIPSYIGELICCDVDIGNLPPYIHGTRILPMEMNGVWAFEIDIEYTGGAGLEVETRVDAREEDLQKGIAEGKLQPNSAGDVPPDLLEGLADFEKQLNVPGGTVDAQDVKSGGTDKADESKGPKGTKTGSSNGSKWKSMLKNIVEQVSQVPITLSIGVSSLRGTLCVHMKPPPSDQLWFGFTSMPDIEFNLVSSVGEHKITNSHVAMFLVNRFKTAIRDVMVLPNCESVTIPWMTAEKDDWVERNVAPFMWLNQDSTSDRENLEAAEAKSKADKPPTSEQMQKTVNIPQKPRIEEESVSADTAPSANSIALLVESDKSLEELKTPLLESSEKHDTIARGGSAGDIIPGIGQSPSMSTVSGEEDDSNSKGKKMGAAKARMFDFRKKVGEKFEEKKRHVEEKSRQIVEKMRGP

SEQ ID NO: 91500 - protein, 557 aa, Arabidopsis thaliana
  peptide (1)..(557): Ceres Seq. ID no. 12728010
  misc_feature (1)..(515): Homolog of NCBI NO: 30685543 NR Description: expressed protein [Arabidopsis thaliana]
  misc_feature (1)..(515): Homolog of NCBI NO: 25518065 NR Description: F2H15.5 protein - Arabidopsis thaliana Strong similarity to a hypothetical protein T18K17.13 gi|6598861 Arabidopsis thaliana BAC T18K17 gb|AC010556 and contains a PH
  misc_feature (424)..(557): Homolog of NCBI NO: 25518065 NR Description: F2H15.5 protein - Arabidopsis thaliana Strong similarity to a hypothetical protein T18K17.13 gi|6598861 Arabidopsis thaliana BAC T18K17 gb|AC010556 and contains a PH
  misc_feature (424)..(557): Homolog of NCBI NO: 30685543 NR Description: expressed protein [Arabidopsis thaliana]
  misc_feature (76)..(385): Homolog of NCBI NO: 34783705 NR Description: Unknown (protein for MGC:62520) [Mus musculus]
  misc_feature (1)..(385): Homolog of NCBI NO: 26251776 NR Description: Uncharacterized hypothalamus protein HT008 [Homo
  misc_feature (1)..(385): Homolog of NCBI NO: 38679909 NR Description: uncharacterized hypothalamus protein HT008 [Homo
  misc_feature (76)..(385): Homolog of NCBI NO: 38091890 NR Description: testis expressed gene 2 [Mus musculus]
  misc_feature (1)..(385): Homolog of NCBI NO: 33337924 NR Description: MSTP069 [Homo sapiens]
  misc_feature (1)..(385): Homolog of NCBI NO: 7021045 NR Description: unnamed protein product [Homo sapiens]
MKPSAGFSFESLDKGLKADGPSSKVRLIWKKFSKKCSTKVNFPPSIRDDKKTSSRSYQDSQSTGSSGKSTSARRMQDNIPEETDVQVISRSWSHSSHASDVDSEDKSFDEGTLALNVVLSRLFFDVKQNTVLKNLVRERIQRIMSNMRIPSYIGELICCDVDIGNLPPYIHGTRILPMEMNGVWAFEIDIEYTGGAGLEVETRVDAREEDLQKGIAEGKLQPNSAGDVPPDLLEGLADFEKQLNVPGGTVDAQDVKSGGTDKADESKGPKGTKTGSSNGSKWKSMLKNIVEQVSQVPITLSIGVSSLRGTLCVHMKPPPSDQLWFGFTSMPDIEFNLVSSVGEHKITNSHVAMFLVNRFKTAIRDVMVLPNCESVTIPWMTAEKDDWVERNVAPFMWLNQDSTSDRENLEAAEAKSKADKPPTSEQMQKTVNIPQKPRIEEESVSADTAPSANSIALLVESDKSLEELKTPLLESSEKHDTIARGGSAGDIIPGIGQSPSMSTVSGEEDDSNSKGKKMGAAKARMFDFRKKVGEKFEEKKRHVEEKSRQIVEKMRGP

SEQ ID NO: 91501 - DNA, 1326 bp, Arabidopsis thaliana
  misc_feature (1)..(1326): Ceres Seq. ID no. 12728015
  misc_feature: MA Experiment ID: 20000307 Result: Up-regulated in Transcription
  misc_feature: MA Experiment 20000307 PARAMETER Experiment Name: At_Germinating_Seeds_Sub_P Parameter: Age (hr) Value: 24 vs. 0
  misc_feature: MA Experiment 20000307 PARAMETER Experiment Name: At_Germinating_Seeds_Sub_P Parameter: Organism Value: A. thaliana
  misc_feature: MA Experiment 20000307 PARAMETER Experiment Name: At_Germinating_Seeds_Sub_P Parameter: Plant Line Value: WS
  misc_feature: MA Experiment 20000307 PARAMETER Experiment Name: At_Germinating_Seeds_Sub_P Parameter: Tissue Value: Germinating Seeds
  misc_feature: MA Experiment ID: 20000440 Result: Down-regulated in Transcription
  misc_feature: MA Experiment 20000440 PARAMETER Experiment Name: At_Closed-Flower__Sub_P Parameter: Tissue Value: Closed Flower vs. Whole Plant
atggcaaacgactacatttcctttgttttcaagtcgctgcttctgttaattcaccttgtattcttaggtcagcaccatgttgattctgcctcagtcgtcaagtctcttcctggttttgaaggccctcttccctttgagctcgaaaccgggtatattggtgttggtgaggaagaggaagtgcaactgttctactacttcatcaagtctgagaggaacccaaaagaagaccctcttcttctctggctaactggaggacctggctgctctgccatctctggccttctttatgagaatggccctttgactatgaagcttgatgtttacaatggaactcttccttccttggtatctactacatattcatggacaaagaattcgagcatgatattcttggatcagcccgttggaactggcttctcctattcaagaactgaactttttaataaacccagtgatacaggagaagccaaacggatccatgagtttcttcaaaagtggctaggcaagcatcaagaattttcctccaaccctttctatgttggtggagattcttattccggtatcactgttccggctactgttcaagaaatctccaaaggaaattatcaatgctgcaaacctccaataaatcttcagggttatatgctcggtaacccaataacagactccaaaattgatggtaacagccaaattccgtatgctcatggaatggcactgatatctgatgaactctacgagtcgctaaagagaatctgcaaaggagaatatgaacatgttgatccatataacacagaatgcttgaaacttcttgaagaatttaatgagtgtacaagtaaactatacagatcacatatattatacccattgtgtgaaatgacaaatccggattgctatatttatcggtattcactaagtcactactgggttaatgacgaaaccgtacgcaaagctcttcaaatcaataaggagagtataagggaatggaaacgatgtgattggagtaagccatacactaaagacattataagcagcgtaccttaccatatgaacaatagcataaatggctatcgttctctcattttcagtggtgatcacgatttcgaagtacctttaattggaactcaagtttggataaagtctctcaactatgccatcgttgataaatggagaccatggatgatcaacaatcaagtcgctggatacacaagaacttatgcgaataaaatgacatttgctactgtcaaaggaggtgggcacacagcagagtataagccagatgaaacctttatcatgttccaaaggtggatcaatggacaagctctgtaa

SEQ ID NO: 91502 - protein, 441 aa, Arabidopsis thaliana
  peptide (1)..(441): Ceres Seq. ID no. 12728016
  misc_feature (37)..(438): Pfam Name: Serine carboxypeptidase Pfam Description: Serine carboxypeptidase
  misc_feature (1)..(441): Homolog of NCBI NO: 15219427 NR Description: putative serine carboxypeptidase; protein id: [Arabidopsis thaliana] >gi|25289777|pir||H96758 protein serine
  misc_feature (1)..(441): Homolog of NCBI NO: 15219433 NR Description: putative serine carboxypeptidase; protein id: [Arabidopsis thaliana] >gi|25289779|pir||C96759 protein serine
  misc_feature (1)..(441): Homolog of NCBI NO: 22327401 NR Description: serine carboxypeptidase; protein id: At5g36180.1, by cDNA: gi_20260289 [Arabidopsis thaliana] serine carboxypeptidase [Arabidopsis thaliana]
  misc_feature (1)..(441): Homolog of NCBI NO: 15219429 NR Description: putative serine carboxypeptidase; protein id: [Arabidopsis thaliana] >gi|25289788|pir||A96759 protein serine
  misc_feature (1)..(434): Homolog of NCBI NO: 8777303 NR Description: serine carboxypeptidase [Arabidopsis thaliana]
  misc_feature (1)..(441): Homolog of NCBI NO: 15219435 NR Description: putative serine carboxypeptidase; protein id: [Arabidopsis thaliana] >gi|12324317|gb|AAG52126.1|AC010556_8
  misc_feature (1)..(441): Homolog of NCBI NO: 15219431 NR Description: putative serine carboxypeptidase; protein id: [Arabidopsis thaliana] >gi|25289778|pir||B96759 protein serine
  misc_feature (1)..(441): Homolog of NCBI NO: 15228300 NR Description: putative glucose acyltransferase; protein id: [Arabidopsis thaliana] >gi|8567775|gb|AAF76347.1| glucose putative [Arabidopsis thaliana]
  misc_feature (1)..(275): Homolog of NCBI NO: 25289774 NR Description: probable serine carboxypeptidase T9L24.47 - Arabidopsis thaliana >gi|11120810|gb|AAG30990.1|AC012396_26
  misc_feature (300)..(441): Homolog of NCBI NO: 25289774 NR Description: probable serine carboxypeptidase T9L24.47 - Arabidopsis thaliana >gi|11120810|gb|AAG30990.1|AC012396_26
MANDYISFVFKSLLLLIHLVFLGQHHVDSASVVKSLPGFEGPLPFELETGYIGVGEEEEVQLFYYFIKSERNPKEDPLLLWLTGGPGCSAISGLLYENGPLTMKLDVYNGTLPSLVSTTYSWTKNSSMIFLDQPVGTGFSYSRTELFNKPSDTGEAKRIHEFLQKWLGKHQEFSSNPFYVGGDSYSGITVPATVQEISKGNYQCCKPPINLQGYMLGNPITDSKIDGNSQIPYAHGMALISDELYESLKRICKGEYEHVDPYNTECLKLLEEFNECTSKLYRSHILYPLCEMTNPDCYIYRYSLSHYWVNDETVRKALQINKESIREWKRCDWSKPYTKDIISSVPYHMNNSINGYRSLIFSGDHDFEVPLIGTQVWIKSLNYAIVDKWRPWMINNQVAGYTRTYANKMTFATVKGGGHTAEYKPDETFIMFQRWINGQAL

SEQ ID NO: 91503 - protein, 339 aa, Arabidopsis thaliana
  peptide (1)..(339): Ceres Seq. ID no. 12728017
  misc_feature (1)..(336): Pfam Name: Serine carboxypeptidase Pfam Description: Serine carboxypeptidase
  misc_feature (1)..(339): Homolog of NCBI NO: 15219427 NR Description: putative serine carboxypeptidase; protein id: [Arabidopsis thaliana] >gi|25289777|pir||H96758 protein serine
  misc_feature (1)..(339): Homolog of NCBI NO: 15219433 NR Description: putative serine carboxypeptidase; protein id: [Arabidopsis thaliana] >gi|25289779|pir||C96759 protein serine
  misc_feature (1)..(339): Homolog of NCBI NO: 22327401 NR Description: serine carboxypeptidase; protein id: At5g36180.1, by cDNA: gi_20260289 [Arabidopsis thaliana] serine carboxypeptidase [Arabidopsis thaliana]
  misc_feature (1)..(339): Homolog of NCBI NO: 15219429 NR Description: putative serine carboxypeptidase; protein id: [Arabidopsis thaliana] >gi|25289788|pir||A96759 protein serine
  misc_feature (1)..(332): Homolog of NCBI NO: 8777303 NR Description: serine carboxypeptidase [Arabidopsis thaliana]
  misc_feature (1)..(339): Homolog of NCBI NO: 15219435 NR Description: putative serine carboxypeptidase; protein id: [Arabidopsis thaliana] >gi|12324317|gb|AAG52126.1|AC010556_8
  misc_feature (1)..(339): Homolog of NCBI NO: 15219431 NR Description: putative serine carboxypeptidase; protein id: [Arabidopsis thaliana] >gi|25289778|pir||B96759 protein serine
  misc_feature (1)..(339): Homolog of NCBI NO: 15228300 NR Description: putative glucose acyltransferase; protein id: [Arabidopsis thaliana] >gi|8567775|gb|AAF76347.1| glucose putative [Arabidopsis thaliana]
  misc_feature (1)..(173): Homolog of NCBI NO: 25289774 NR Description: probable serine carboxypeptidase T9L24.47 - Arabidopsis thaliana >gi|11120810|gb|AAG30990.1|AC012396_26
  misc_feature (198)..(339): Homolog of NCBI NO: 25289774 NR Description: probable serine carboxypeptidase T9L24.47 - Arabidopsis thaliana >gi|11120810|gb|AAG30990.1|AC012396_26
MKLDVYNGTLPSLVSTTYSWTKNSSMIFLDQPVGTGFSYSRTELFNKPSDTGEAKRIHEFLQKWLGKHQEFSSNPFYVGGDSYSGITVPATVQEISKGNYQCCKPPINLQGYMLGNPITDSKIDGNSQIPYAHGMALISDELYESLKRICKGEYEHVDPYNTECLKLLEEFNECTSKLYRSHILYPLCEMTNPDCYIYRYSLSHYWVNDETVRKALQINKESIREWKRCDWSKPYTKDIISSVPYHMNNSINGYRSLIFSGDHDFEVPLIGTQVWIKSLNYAIVDKWRPWMINNQVAGYTRTYANKMTFATVKGGGHTAEYKPDETFIMFQRWINGQAL

SEQ ID NO: 91504 - protein, 314 aa, Arabidopsis thaliana
  peptide (1)..(314): Ceres Seq. ID no. 12728018
  misc_feature (1)..(311): Pfam Name: Serine carboxypeptidase Pfam Description: Serine carboxypeptidase
  misc_feature (1)..(314): Homolog of NCBI NO: 15219427 NR Description: putative serine carboxypeptidase; protein id: [Arabidopsis thaliana] >gi|25289777|pir||H96758 protein serine
  misc_feature (1)..(314): Homolog of NCBI NO: 15219433 NR Description: putative serine carboxypeptidase; protein id: [Arabidopsis thaliana] >gi|25289779|pir||C96759 protein serine
  misc_feature (1)..(314): Homolog of NCBI NO: 22327401 NR Description: serine carboxypeptidase; protein id: At5g36180.1, by cDNA: gi_20260289 [Arabidopsis thaliana] serine carboxypeptidase [Arabidopsis thaliana]
  misc_feature (1)..(314): Homolog of NCBI NO: 15219429 NR Description: putative serine carboxypeptidase; protein id: [Arabidopsis thaliana] >gi|25289788|pir||A96759 protein serine
  misc_feature (1)..(307): Homolog of NCBI NO: 8777303 NR Description: serine carboxypeptidase [Arabidopsis thaliana]
  misc_feature (1)..(314): Homolog of NCBI NO: 15219435 NR Description: putative serine carboxypeptidase; protein id: [Arabidopsis thaliana] >gi|12324317|gb|AAG52126.1|AC010556_8
  misc_feature (1)..(314): Homolog of NCBI NO: 15219431 NR Description: putative serine carboxypeptidase; protein id: [Arabidopsis thaliana] >gi|25289778|pir||B96759 protein serine
  misc_feature (1)..(314): Homolog of NCBI NO: 15228300 NR Description: putative glucose acyltransferase; protein id: [Arabidopsis thaliana] >gi|8567775|gb|AAF76347.1| glucose putative [Arabidopsis thaliana]
  misc_feature (1)..(148): Homolog of NCBI NO: 25289774 NR Description: probable serine carboxypeptidase T9L24.47 - Arabidopsis thaliana >gi|11120810|gb|AAG30990.1|AC012396_26
  misc_feature (173)..(314): Homolog of NCBI NO: 25289774 NR Description: probable serine carboxypeptidase T9L24.47 - Arabidopsis thaliana >gi|11120810|gb|AAG30990.1|AC012396_26
MIFLDQPVGTGFSYSRTELFNKPSDTGEAKRIHEFLQKWLGKHQEFSSNPFYVGGDSYSGITVPATVQEISKGNYQCCKPPINLQGYMLGNPITDSKIDGNSQIPYAHGMALISDELYESLKRICKGEYEHVDPYNTECLKLLEEFNECTSKLYRSHILYPLCEMTNPDCYIYRYSLSHYWVNDETVRKALQINKESIREWKRCDWSKPYTKDIISSVPYHMNNSINGYRSLIFSGDHDFEVPLIGTQVWIKSLNYAIVDKWRPWMINNQVAGYTRTYANKMTFATVKGGGHTAEYKPDETFIMFQRWINGQAL

SEQ ID NO: 91505 - DNA, 1326 bp, Arabidopsis thaliana
  misc_feature (1)..(1326): Ceres Seq. ID no. 12728019
  misc_feature: MA Experiment ID: 20000314 Result: Up-regulated in Transcription
  misc_feature: MA Experiment 20000314 PARAMETER Experiment Name: At_14day_Shoots-Roots_Sub_P Parameter: Age (day) Value: 14
  misc_feature: MA Experiment 20000314 PARAMETER Experiment Name: At_14day_Shoots-Roots_Sub_P Parameter: Organism Value: A. thaliana
  misc_feature: MA Experiment 20000314 PARAMETER Experiment Name: At_14day_Shoots-Roots_Sub_P Parameter: Plant Line Value: WS
  misc_feature: MA Experiment 20000314 PARAMETER Experiment Name: At_14day_Shoots-Roots_Sub_P Parameter: Tissue Value: Roots vs. Whole Plant
atggctagcaactacgttttctctgttctgaggtcgctgcttctgttaattcacactgtattcttaggtcagcaccatgttagttctgccacaattatcaagtctcttcctggttttgaaggccctcttccctttgagctcgaaaccgggtatattggtgttggtgaggaagaggaagtgcaactattctactacttcataaagtctgagaggaacccaaaagaagaccctcttcttctctggctaagtggaggacctggctgctcttccatctctggccttctttttgagaatgggcctctggctatgaagcttgatgtttacaatggaactcttccttctttggtctctactacatattcatggacaaaggcctcgagcatgatattcttggatcagcccgttggagctggcttctcctactcaagaactcaacttttaaataaacctagtgattcaggagaagccaaacggattcatgagtttctgcaaaagtggctaggcaagcatcaagagttttcctccaatcctttctatgttggaggagattcttactctggtatggttgttccggctaccgttcaagaaatctcaaaaggaaattatgaatgctgcaatcctccaataaatcttcagggctatgtgctcggtaacccgttaacagactttgtatatgattacaactcccgcattccatttgctcatggaatggcactaatctctgatgaactcttcgagtcattgaagaaaacctgcaaaggagactatagaaatgttcatccacgtaatacagaatgcttgaaattcattgaagaatttaataagtgtacaaacagcatatgtcaacgacgtataatagatccattttgtgaaactgaaactccaaattgctatatttaccgttttttgctagctgcctattgggccaatgacgaaaccgtacgcaaagctcttcaaatcaagaaggagactataggggaatgggtacgatgtcattatggtattccttacaattatgacattaaaagtagcataccttaccatatgaataacagcatcaatggttatcgttcactaatctacagtggtgatcacgatttcgaagtacccttccttggaacccaagcttggataagatctctcaactattcagtcatcgatgattggaggccatggatgatcaaagatcaaattgctggatacacaaggacttatgccaataaaatgacatttgctactatcagaggaggtgggcacacaatagagtttaaaccagaggaagcctctatcatgtttcaaagatggatcaaaggccaacctctgtaa

SEQ ID NO: 91506 - protein, 441 aa, Arabidopsis thaliana
  peptide (1)..(441): Ceres Seq. ID no. 12728020
  misc_feature (37)..(438): Pfam Name: Serine carboxypeptidase Pfam Description: Serine carboxypeptidase
  misc_feature (1)..(441): Homolog of NCBI NO: 15219429 NR Description: putative serine carboxypeptidase; protein id: [Arabidopsis thaliana] >gi|25289788|pir||A96759 protein serine
  misc_feature (1)..(441): Homolog of NCBI NO: 15219433 NR Description: putative serine carboxypeptidase; protein id: [Arabidopsis thaliana] >gi|25289779|pir||C96759 protein serine
  misc_feature (1)..(441): Homolog of NCBI NO: 22327401 NR Description: serine carboxypeptidase; protein id: At5g36180.1, by cDNA: gi_20260289 [Arabidopsis thaliana] serine carboxypeptidase [Arabidopsis thaliana]
  misc_feature (1)..(441): Homolog of NCBI NO: 8777303 NR Description: serine carboxypeptidase [Arabidopsis thaliana]
  misc_feature (1)..(441): Homolog of NCBI NO: 15219435 NR Description: putative serine carboxypeptidase; protein id: [Arabidopsis thaliana] >gi|12324317|gb|AAG52126.1|AC010556_8
  misc_feature (3)..(441): Homolog of NCBI NO: 15219431 NR Description: putative serine carboxypeptidase; protein id: [Arabidopsis thaliana] >gi|25289778|pir||B96759 protein serine
  misc_feature (1)..(441): Homolog of NCBI NO: 15219427 NR Description: putative serine carboxypeptidase; protein id: [Arabidopsis thaliana] >gi|25289777|pir||H96758 protein serine
  misc_feature (1)..(275): Homolog of NCBI NO: 25289774 NR Description: probable serine carboxypeptidase T9L24.47 - Arabidopsis thaliana >gi|11120810|gb|AAG30990.1|AC012396_26
  misc_feature (300)..(441): Homolog of NCBI NO: 25289774 NR Description: probable serine carboxypeptidase T9L24.47 - Arabidopsis thaliana >gi|11120810|gb|AAG30990.1|AC012396_26
  misc_feature (1)..(441): Homolog of NCBI NO: 15228300 NR Description: putative glucose acyltransferase; protein id: [Arabidopsis thaliana] >gi|8567775|gb|AAF76347.1| glucose putative [Arabidopsis thaliana]
MASNYVFSVLRSLLLLIHTVFLGQHHVSSATIIKSLPGFEGPLPFELETGYIGVGEEEEVQLFYYFIKSERNPKEDPLLLWLSGGPGCSSISGLLFENGPLAMKLDVYNGTLPSLVSTTYSWTKASSMIFLDQPVGAGFSYSRTQLLNKPSDSGEAKRIHEFLQKWLGKHQEFSSNPFYVGGDSYSGMVVPATVQEISKGNYECCNPPINLQGYVLGNPLTDFVYDYNSRIPFAHGMALISDELFESLKKTCKGDYRNVHPRNTECLKFIEEFNKCTNSICQRRIIDPFCETETPNCYIYRFLLAAYWANDETVRKALQIKKETIGEWVRCHYGIPYNYDIKSSIPYHMNNSINGYRSLIYSGDHDFEVPFLGTQAWIRSLNYSVIDDWRPWMIKDQIAGYTRTYANKMTFATIRGGGHTIEFKPEEASIMFQRWIKGQPL

SEQ ID NO: 91507 - protein, 339 aa, Arabidopsis thaliana
  peptide (1)..(339): Ceres Seq. ID no. 12728021
  misc_feature (1)..(336): Pfam Name: Serine carboxypeptidase Pfam Description: Serine carboxypeptidase
  misc_feature (1)..(339): Homolog of NCBI NO: 15219429 NR Description: putative serine carboxypeptidase; protein id: [Arabidopsis thaliana] >gi|25289788|pir||A96759 protein serine
  misc_feature (1)..(339): Homolog of NCBI NO: 15219433 NR Description: putative serine carboxypeptidase; protein id: [Arabidopsis thaliana] >gi|25289779|pir||C96759 protein serine
  misc_feature (1)..(339): Homolog of NCBI NO: 22327401 NR Description: serine carboxypeptidase; protein id: At5g36180.1, by cDNA: gi_20260289 [Arabidopsis thaliana] serine carboxypeptidase [Arabidopsis thaliana]
  misc_feature (1)..(339): Homolog of NCBI NO: 8777303 NR Description: serine carboxypeptidase [Arabidopsis thaliana]
  misc_feature (1)..(339): Homolog of NCBI NO: 15219435 NR Description: putative serine carboxypeptidase; protein id: [Arabidopsis thaliana] >gi|12324317|gb|AAG52126.1|AC010556_8
  misc_feature (1)..(339): Homolog of NCBI NO: 15219431 NR Description: putative serine carboxypeptidase; protein id: [Arabidopsis thaliana] >gi|25289778|pir||B96759 protein serine
  misc_feature (1)..(339): Homolog of NCBI NO: 15219427 NR Description: putative serine carboxypeptidase; protein id: [Arabidopsis thaliana] >gi|25289777|pir||H96758 protein serine
  misc_feature (1)..(173): Homolog of NCBI NO: 25289774 NR Description: probable serine carboxypeptidase T9L24.47 - Arabidopsis thaliana >gi|11120810|gb|AAG30990.1|AC012396_26
  misc_feature (198)..(339): Homolog of NCBI NO: 25289774 NR Description: probable serine carboxypeptidase T9L24.47 - Arabidopsis thaliana >gi|11120810|gb|AAG30990.1|AC012396_26
  misc_feature (1)..(339): Homolog of NCBI NO: 15228300 NR Description: putative glucose acyltransferase; protein id: [Arabidopsis thaliana] >gi|8567775|gb|AAF76347.1| glucose putative [Arabidopsis thaliana]
MKLDVYNGTLPSLVSTTYSWTKASSMIFLDQPVGAGFSYSRTQLLNKPSDSGEAKRIHEFLQKWLGKHQEFSSNPFYVGGDSYSGMVVPATVQEISKGNYECCNPPINLQGYVLGNPLTDFVYDYNSRIPFAHGMALISDELFESLKKTCKGDYRNVHPRNTECLKFIEEFNKCTNSICQRRIIDPFCETETPNCYIYRFLLAAYWANDETVRKALQIKKETIGEWVRCHYGIPYNYDIKSSIPYHMNNSINGYRSLIYSGDHDFEVPFLGTQAWIRSLNYSVIDDWRPWMIKDQIAGYTRTYANKMTFATIRGGGHTIEFKPEEASIMFQRWIKGQPL

SEQ ID NO: 91508 - protein, 314 aa, Arabidopsis thaliana
  peptide (1)..(314): Ceres Seq. ID no. 12728022
  misc_feature (1)..(311): Pfam Name: Serine carboxypeptidase Pfam Description: Serine carboxypeptidase
  misc_feature (1)..(314): Homolog of NCBI NO: 15219429 NR Description: putative serine carboxypeptidase; protein id: [Arabidopsis thaliana] >gi|25289788|pir||A96759 protein serine
  misc_feature (1)..(314): Homolog of NCBI NO: 15219433 NR Description: putative serine carboxypeptidase; protein id: [Arabidopsis thaliana] >gi|25289779|pir||C96759 protein serine
  misc_feature (1)..(314): Homolog of NCBI NO: 22327401 NR Description: serine carboxypeptidase; protein id: At5g36180.1, by cDNA: gi_20260289 [Arabidopsis thaliana] serine carboxypeptidase [Arabidopsis thaliana]
  misc_feature (1)..(314): Homolog of NCBI NO: 8777303 NR Description: serine carboxypeptidase [Arabidopsis thaliana]
  misc_feature (1)..(314): Homolog of NCBI NO: 15219435 NR Description: putative serine carboxypeptidase; protein id: [Arabidopsis thaliana] >gi|12324317|gb|AAG52126.1|AC010556_8
  misc_feature (1)..(314): Homolog of NCBI NO: 15219431 NR Description: putative serine carboxypeptidase; protein id: [Arabidopsis thaliana] >gi|25289778|pir||B96759 protein serine
  misc_feature (1)..(314): Homolog of NCBI NO: 15219427 NR Description: putative serine carboxypeptidase; protein id: [Arabidopsis thaliana] >gi|25289777|pir||H96758 protein serine
  misc_feature (1)..(148): Homolog of NCBI NO: 25289774 NR Description: probable serine carboxypeptidase T9L24.47 - Arabidopsis thaliana >gi|11120810|gb|AAG30990.1|AC012396_26
  misc_feature (173)..(314): Homolog of NCBI NO: 25289774 NR Description: probable serine carboxypeptidase T9L24.47 - Arabidopsis thaliana >gi|11120810|gb|AAG30990.1|AC012396_26
  misc_feature (1)..(314): Homolog of NCBI NO: 15228300 NR Description: putative glucose acyltransferase; protein id: [Arabidopsis thaliana] >gi|8567775|gb|AAF76347.1| glucose putative [Arabidopsis thaliana]
MIFLDQPVGAGFSYSRTQLLNKPSDSGEAKRIHEFLQKWLGKHQEFSSNPFYVGGDSYSGMVVPATVQEISKGNYECCNPPINLQGYVLGNPLTDFVYDYNSRIPFAHGMALISDELFESLKKTCKGDYRNVHPRNTECLKFIEEFNKCTNSICQRRIIDPFCETETPNCYIYRFLLAAYWANDETVRKALQIKKETIGEWVRCHYGIPYNYDIKSSIPYHMNNSINGYRSLIYSGDHDFEVPFLGTQAWIRSLNYSVIDDWRPWMIKDQIAGYTRTYANKMTFATIRGGGHTIEFKPEEASIMFQRWIKGQPL

SEQ ID NO: 91509 - DNA, 1317 bp, Arabidopsis thaliana
  misc_feature (1)..(1317): Ceres Seq. ID no. 12728023
  misc_feature: MA Experiment ID: 20000307 Result: Up-regulated in Transcription
  misc_feature: MA Experiment 20000307 PARAMETER Experiment Name: At_Germinating_Seeds_Sub_P Parameter: Age (hr) Value: 24 vs. 0
  misc_feature: MA Experiment 20000307 PARAMETER Experiment Name: At_Germinating_Seeds_Sub_P Parameter: Organism Value: A. thaliana
  misc_feature: MA Experiment 20000307 PARAMETER Experiment Name: At_Germinating_Seeds_Sub_P Parameter: Plant Line Value: WS
  misc_feature: MA Experiment 20000307 PARAMETER Experiment Name: At_Germinating_Seeds_Sub_P Parameter: Tissue Value: Germinating Seeds
  misc_feature: MA Experiment ID: 20000440 Result: Down-regulated in Transcription
  misc_feature: MA Experiment 20000440 PARAMETER Experiment Name: At_Closed-Flower__Sub_P Parameter: Tissue Value: Closed Flower vs. Whole Plant
atggctaactacatttcctctgttttgaagtcgctgcttctgcttcttcatcttgtcttcttgattcagcagcatgttgattctgcctctatcgtcaagtttcttcctggttttgaagggtctcttccctttgagctcgaaaccgggtatattggtattggtgaggaagaggaagtgcaactgttctactacttcatcaagtctgagaggaatccaaaagaagaccctcttcttctctggctaagtggaggacctggctgctcttccatctctggccttctttttgagaatgggcctctggctatgaagctcgatgtttacaatggaactctcccttctttggtccctactacatattcttggacaaagacttcgagcatgatattcttggatcagcccgttggaactggcttctcctattcaagaactcaacaatataataaacctagtgattcaggagaagccaaacggattcatgagtttcttcaaaagtggctaagcaagcatcaagagttttcctccaacccattctatgtcgccggtgattcttattccggtatggttgttccagctaccgttcaagaaatctccaaaggaaattatcaatgctgcagtcctccgataaatcttcagggctatgtactcggtaacccgataacagaacatgcaatcgattataactaccgcattccatttgcacatggaatggcattgatctctgatgaactttacgagtcgttgaagagagtctgcaaaggagaatatgttgatccacgtgacacagaatgcttgaaactcgttgaagaatttagtaagtgtaccaaaggagtatgccaagaagttgtaataaaaccattgtgcgtaactgaaactccaaattgctatatttatcgatatttgctaactacgtactgggtcaatgacgtgaatgtacgcaaagctcttcaaatcaacaaggagagtataggggaatgggtacgatgttattttggtattccttacactcatgacattaaaagtagtgtaccttaccatatgaataacagcatcaatggttatcgttctctcatttacagtggtgatcatgatttgaatgtacctttccttgcaactcaagcttgggtaagatctctcaactattccatcattgataactggaggccatggatgatcaaagatcaaatcgggggatacacaaagacttatgccaataaaatgacatttgcaactgtcagagcaagtgggcacacagcagagtacaagccatatgaaacctatatcatgttccacaggtggatcaatggccaacctctttaa

SEQ ID NO: 91510 - protein, 438 aa, Arabidopsis thaliana
  peptide (1)..(438): Ceres Seq. ID no. 12728024
  misc_feature (36)..(435): Pfam Name: Serine carboxypeptidase Pfam Description: Serine carboxypeptidase
  misc_feature (1)..(438): Homolog of NCBI NO: 15219431 NR Description: putative serine carboxypeptidase; protein id: [Arabidopsis thaliana] >gi|25289778|pir||B96759 protein serine
  misc_feature (1)..(438): Homolog of NCBI NO: 15219433 NR Description: putative serine carboxypeptidase; protein id: [Arabidopsis thaliana] >gi|25289779|pir||C96759 protein serine
  misc_feature (1)..(438): Homolog of NCBI NO: 22327401 NR Description: serine carboxypeptidase; protein id: At5g36180.1, by cDNA: gi_20260289 [Arabidopsis thaliana] serine carboxypeptidase [Arabidopsis thaliana]
  misc_feature (2)..(438): Homolog of NCBI NO: 15219429 NR Description: putative serine carboxypeptidase; protein id: [Arabidopsis thaliana] >gi|25289788|pir||A96759 protein serine
  misc_feature (3)..(438): Homolog of NCBI NO: 15219435 NR Description: putative serine carboxypeptidase; protein id: [Arabidopsis thaliana] >gi|12324317|gb|AAG52126.1|AC010556_8
  misc_feature (1)..(438): Homolog of NCBI NO: 8777303 NR Description: serine carboxypeptidase [Arabidopsis thaliana]
  misc_feature (1)..(438): Homolog of NCBI NO: 15219427 NR Description: putative serine carboxypeptidase; protein id: [Arabidopsis thaliana] >gi|25289777|pir||H96758 protein serine
  misc_feature (1)..(438): Homolog of NCBI NO: 15228300 NR Description: putative glucose acyltransferase; protein id: [Arabidopsis thaliana] >gi|8567775|gb|AAF76347.1| glucose putative [Arabidopsis thaliana]
  misc_feature (3)..(272): Homolog of NCBI NO: 25289774 NR Description: probable serine carboxypeptidase T9L24.47 - Arabidopsis thaliana >gi|11120810|gb|AAG30990.1|AC012396_26
  misc_feature (297)..(438): Homolog of NCBI NO: 25289774 NR Description: probable serine carboxypeptidase T9L24.47 - Arabidopsis thaliana >gi|11120810|gb|AAG30990.1|AC012396_26
MANYISSVLKSLLLLLHLVFLIQQHVDSASIVKFLPGFEGSLPFELETGYIGIGEEEEVQLFYYFIKSERNPKEDPLLLWLSGGPGCSSISGLLFENGPLAMKLDVYNGTLPSLVPTTYSWTKTSSMIFLDQPVGTGFSYSRTQQYNKPSDSGEAKRIHEFLQKWLSKHQEFSSNPFYVAGDSYSGMVVPATVQEISKGNYQCCSPPINLQGYVLGNPITEHAIDYNYRIPFAHGMALISDELYESLKRVCKGEYVDPRDTECLKLVEEFSKCTKGVCQEVVIKPLCVTETPNCYIYRYLLTTYWVNDVNVRKALQINKESIGEWVRCYFGIPYTHDIKSSVPYHMNNSINGYRSLIYSGDHDLNVPFLATQAWVRSLNYSIIDNWRPWMIKDQIGGYTKTYANKMTFATVRASGHTAEYKPYETYIMFHRWINGQPL

SEQ ID NO: 91511 - protein, 337 aa, Arabidopsis thaliana
  peptide (1)..(337): Ceres Seq. ID no. 12728025
  misc_feature (1)..(334): Pfam Name: Serine carboxypeptidase Pfam Description: Serine carboxypeptidase
  misc_feature (1)..(337): Homolog of NCBI NO: 15219431 NR Description: putative serine carboxypeptidase; protein id: [Arabidopsis thaliana] >gi|25289778|pir||B96759 protein serine
  misc_feature (1)..(337): Homolog of NCBI NO: 15219433 NR Description: putative serine carboxypeptidase; protein id: [Arabidopsis thaliana] >gi|25289779|pir||C96759 protein serine
  misc_feature (1)..(337): Homolog of NCBI NO: 22327401 NR Description: serine carboxypeptidase; protein id: At5g36180.1, by cDNA: gi_20260289 [Arabidopsis thaliana] serine carboxypeptidase [Arabidopsis thaliana]
  misc_feature (1)..(337): Homolog of NCBI NO: 15219429 NR Description: putative serine carboxypeptidase; protein id: [Arabidopsis thaliana] >gi|25289788|pir||A96759 protein serine
  misc_feature (1)..(337): Homolog of NCBI NO: 15219435 NR Description: putative serine carboxypeptidase; protein id: [Arabidopsis thaliana] >gi|12324317|gb|AAG52126.1|AC010556_8
  misc_feature (1)..(337): Homolog of NCBI NO: 8777303 NR Description: serine carboxypeptidase [Arabidopsis thaliana]
  misc_feature (1)..(337): Homolog of NCBI NO: 15219427 NR Description: putative serine carboxypeptidase; protein id: [Arabidopsis thaliana] >gi|25289777|pir||H96758 protein serine
  misc_feature (1)..(337): Homolog of NCBI NO: 15228300 NR Description: putative glucose acyltransferase; protein id: [Arabidopsis thaliana] >gi|8567775|gb|AAF76347.1| glucose putative [Arabidopsis thaliana]
  misc_feature (1)..(171): Homolog of NCBI NO: 25289774 NR Description: probable serine carboxypeptidase T9L24.47 - Arabidopsis thaliana >gi|11120810|gb|AAG30990.1|AC012396_26
  misc_feature (196)..(337): Homolog of NCBI NO: 25289774 NR Description: probable serine carboxypeptidase T9L24.47 - Arabidopsis thaliana >gi|11120810|gb|AAG30990.1|AC012396_26
MKLDVYNGTLPSLVPTTYSWTKTSSMIFLDQPVGTGFSYSRTQQYNKPSDSGEAKRIHEFLQKWLSKHQEFSSNPFYVAGDSYSGMVVPATVQEISKGNYQCCSPPINLQGYVLGNPITEHAIDYNYRIPFAHGMALISDELYESLKRVCKGEYVDPRDTECLKLVEEFSKCTKGVCQEVVIKPLCVTETPNCYIYRYLLTTYWVNDVNVRKALQINKESIGEWVRCYFGIPYTHDIKSSVPYHMNNSINGYRSLIYSGDHDLNVPFLATQAWVRSLNYSIIDNWRPWMIKDQIGGYTKTYANKMTFATVRASGHTAEYKPYETYIMFHRWINGQPL

SEQ ID NO: 91512 - protein, 312 aa, Arabidopsis thaliana
  peptide (1)..(312): Ceres Seq. ID no. 12728026
  misc_feature (1)..(309): Pfam Name: Serine carboxypeptidase Pfam Description: Serine carboxypeptidase
  misc_feature (1)..(312): Homolog of NCBI NO: 15219431 NR Description: putative serine carboxypeptidase; protein id: [Arabidopsis thaliana] >gi|25289778|pir||B96759 protein serine
  misc_feature (1)..(312): Homolog of NCBI NO: 15219433 NR Description: putative serine carboxypeptidase; protein id: [Arabidopsis thaliana] >gi|25289779|pir||C96759 protein serine
  misc_feature (1)..(312): Homolog of NCBI NO: 22327401 NR Description: serine carboxypeptidase; protein id: At5g36180.1, by cDNA: gi_20260289 [Arabidopsis thaliana] serine carboxypeptidase [Arabidopsis thaliana]
  misc_feature (1)..(312): Homolog of NCBI NO: 15219429 NR Description: putative serine carboxypeptidase; protein id: [Arabidopsis thaliana] >gi|25289788|pir||A96759 protein serine
  misc_feature (1)..(312): Homolog of NCBI NO: 15219435 NR Description: putative serine carboxypeptidase; protein id: [Arabidopsis thaliana] >gi|12324317|gb|AAG52126.1|AC010556_8
  misc_feature (1)..(312): Homolog of NCBI NO: 8777303 NR Description: serine carboxypeptidase [Arabidopsis thaliana]
  misc_feature (1)..(312): Homolog of NCBI NO: 15219427 NR Description: putative serine carboxypeptidase; protein id: [Arabidopsis thaliana] >gi|25289777|pir||H96758 protein serine
  misc_feature (1)..(312): Homolog of NCBI NO: 15228300 NR Description: putative glucose acyltransferase; protein id: [Arabidopsis thaliana] >gi|8567775|gb|AAF76347.1| glucose putative [Arabidopsis thaliana]
  misc_feature (1)..(146): Homolog of NCBI NO: 25289774 NR Description: probable serine carboxypeptidase T9L24.47 - Arabidopsis thaliana >gi|11120810|gb|AAG30990.1|AC012396_26
  misc_feature (171)..(312): Homolog of NCBI NO: 25289774 NR Description: probable serine carboxypeptidase T9L24.47 - Arabidopsis thaliana >gi|11120810|gb|AAG30990.1|AC012396_26
MIFLDQPVGTGFSYSRTQQYNKPSDSGEAKRIHEFLQKWLSKHQEFSSNPFYVAGDSYSGMVVPATVQEISKGNYQCCSPPINLQGYVLGNPITEHAIDYNYRIPFAHGMALISDELYESLKRVCKGEYVDPRDTECLKLVEEFSKCTKGVCQEVVIKPLCVTETPNCYIYRYLLTTYWVNDVNVRKALQINKESIGEWVRCYFGIPYTHDIKSSVPYHMNNSINGYRSLIYSGDHDLNVPFLATQAWVRSLNYSIIDNWRPWMIKDQIGGYTKTYANKMTFATVRASGHTAEYKPYETYIMFHRWINGQPL

SEQ ID NO: 91513 - DNA, 1029 bp, Arabidopsis thaliana
  misc_feature (1)..(1029): Ceres Seq. ID no. 12728041
  misc_feature: MA Experiment ID: 20000227 Result: Down-regulated in Transcription
  misc_feature: MA Experiment 20000227 PARAMETER Experiment Name: At_Root-Tips-vs-Tops_P Parameter: Tissue Value: Root Tips vs. Root Tops
gttcttgtattggtttggatcggtatacttagttaattacgtaattaaatagatcggcgtgaagaagaaaaatgatcatgtgcagccgaggccattggagaccagctgaagacgagaagctcaaggatcttgtcgaacaatacggtcctcacaattggaacgccattgctctcaagcttcctggtcgctctggtaagagttgtagattgagatggtttaatcaattggatccaaggatcaaccgaaaccctttcacggaagaagaagaagaaagacttttagcggctcatcggatccatgggaacagatggtccatcatcgcaaggcttttccctggaagaactgataacgccgtcaagaaccattggcacgtcatcatggctcgtcgcacacgccaaacctctaagcctcgtcttcttccctcgacgacttcgtcttcttctttaatggcgagtgaacaaatcatgatgagttctggtggttataatcataattatagttccgatgatcggaagaaaatatttccagcagactttataaatttcccttacaaattctctcatatcaatcatcttcacttcctaaaggagtttttcaccggaaagatcgctttaaatcacaaagcaaatcagagtaaaaagcctatggagttctacaattttctacaagtaaacacagattcaaacaagagcgagattatagatcaagattcaggtcaaagcaaacgcagtgactcggacaccaaacatgaaagtcatgttccattcttcgactttttatccgttggaaactctgcctcctaggattagtttttttgcagtaactcctaaatttctagattaactatttagtccgtatacgtacgagattatctaggtcgttagcatgtatgcttgatgtgtataatcactaactagtgagctattacctgcgaaaattgtaagaaaaatacataatgttgatgtatcacacattctcaatgtctgtaaaatttccatcgagttgttaactatcaaagttatccgtttg

SEQ ID NO: 91514 - protein, 243 aa, Arabidopsis thaliana
  peptide (1)..(243): Ceres Seq. ID no. 12728042
  misc_feature (6)..(52): Pfam Name: Myb-like DNA-binding domain Pfam Description: Myb-like DNA-binding domain
  misc_feature (1)..(243): Homolog of NCBI NO: 15219462 NR Description: myb family transcription factor(MYB54); protein
  misc_feature (1)..(243): Homolog of NCBI NO: 11358543 NR Description: myb-related transcription factor MYB54 [imported] Arabidopsis thaliana >gi|3941472|gb|AAC83612.1| putative
  misc_feature (2)..(243): Homolog of NCBI NO: 15220910 NR Description: myb family trnscription factor; protein id: supported by cDNA: 267121., supported by cDNA: gi_3941467
  misc_feature (3)..(243): Homolog of NCBI NO: 25513679 NR Description: F2H15.17 protein - Arabidopsis thaliana
  misc_feature (2)..(243): Homolog of NCBI NO: 11358541 NR Description: myb-related transcription factor MYB52 [imported] Arabidopsis thaliana >gi|3941468|gb|AAC83610.1| putative
  misc_feature (2)..(243): Homolog of NCBI NO: 21554916 NR Description: myb-like protein, putative [Arabidopsis thaliana]
  misc_feature (3)..(109): Homolog of NCBI NO: 21321780 NR Description: putative Myb/Myb-related protein [Oryza sativa
  misc_feature (3)..(143): Homolog of NCBI NO: 34903242 NR Description: unnamed protein product [Oryza sativa (japonica group)] >gi|6539552|dbj|BAA88169.1| unnamed protein product
  misc_feature (5)..(239): Homolog of NCBI NO: 15222362 NR Description: MYB-family transcription factor, putative; id: At1g69560.1, supported by cDNA: gi_7644365 [Arabidopsis
  misc_feature (4)..(124): Homolog of NCBI NO: 6979341 NR Description: myb-like protein [Oryza sativa]
MIMCSRGHWRPAEDEKLKDLVEQYGPHNWNAIALKLPGRSGKSCRLRWFNQLDPRINRNPFTEEEEERLLAAHRIHGNRWSIIARLFPGRTDNAVKNHWHVIMARRTRQTSKPRLLPSTTSSSSLMASEQIMMSSGGYNHNYSSDDRKKIFPADFINFPYKFSHINHLHFLKEFFTGKIALNHKANQSKKPMEFYNFLQVNTDSNKSEIIDQDSGQSKRSDSDTKHESHVPFFDFLSVGNSAS

SEQ ID NO: 91515 - protein, 241 aa, Arabidopsis thaliana
  peptide (1)..(241): Ceres Seq. ID no. 12728043
  misc_feature (4)..(50): Pfam Name: Myb-like DNA-binding domain Pfam Description: Myb-like DNA-binding domain
  misc_feature (1)..(241): Homolog of NCBI NO: 15219462 NR Description: myb family transcription factor(MYB54); protein
  misc_feature (1)..(241): Homolog of NCBI NO: 11358543 NR Description: myb-related transcription factor MYB54 [imported] Arabidopsis thaliana >gi|3941472|gb|AAC83612.1| putative
  misc_feature (1)..(241): Homolog of NCBI NO: 15220910 NR Description: myb family trnscription factor; protein id: supported by cDNA: 267121., supported by cDNA: gi_3941467
  misc_feature (1)..(241): Homolog of NCBI NO: 25513679 NR Description: F2H15.17 protein - Arabidopsis thaliana
  misc_feature (1)..(241): Homolog of NCBI NO: 11358541 NR Description: myb-related transcription factor MYB52 [imported] Arabidopsis thaliana >gi|3941468|gb|AAC83610.1| putative
  misc_feature (1)..(241): Homolog of NCBI NO: 21554916 NR Description: myb-like protein, putative [Arabidopsis thaliana]
  misc_feature (1)..(107): Homolog of NCBI NO: 21321780 NR Description: putative Myb/Myb-related protein [Oryza sativa
  misc_feature (1)..(141): Homolog of NCBI NO: 34903242 NR Description: unnamed protein product [Oryza sativa (japonica group)] >gi|6539552|dbj|BAA88169.1| unnamed protein product
  misc_feature (3)..(237): Homolog of NCBI NO: 15222362 NR Description: MYB-family transcription factor, putative; id: At1g69560.1, supported by cDNA: gi_7644365 [Arabidopsis
  misc_feature (2)..(122): Homolog of NCBI NO: 6979341 NR Description: myb-like protein [Oryza sativa]
MCSRGHWRPAEDEKLKDLVEQYGPHNWNAIALKLPGRSGKSCRLRWFNQLDPRINRNPFTEEEEERLLAAHRIHGNRWSIIARLFPGRTDNAVKNHWHVIMARRTRQTSKPRLLPSTTSSSSLMASEQIMMSSGGYNHNYSSDDRKKIFPADFINFPYKFSHINHLHFLKEFFTGKIALNHKANQSKKPMEFYNFLQVNTDSNKSEIIDQDSGQSKRSDSDTKHESHVPFFDFLSVGNSAS

SEQ ID NO: 91516 - protein, 141 aa, Arabidopsis thaliana
  peptide (1)..(141): Ceres Seq. ID no. 12728044
  misc_feature (1)..(141): Homolog of NCBI NO: 15219462 NR Description: myb family transcription factor(MYB54); protein
  misc_feature (1)..(141): Homolog of NCBI NO: 11358543 NR Description: myb-related transcription factor MYB54 [imported] Arabidopsis thaliana >gi|3941472|gb|AAC83612.1| putative
  misc_feature (1)..(141): Homolog of NCBI NO: 15220910 NR Description: myb family trnscription factor; protein id: supported by cDNA: 267121., supported by cDNA: gi_3941467
  misc_feature (1)..(141): Homolog of NCBI NO: 25513679 NR Description: F2H15.17 protein - Arabidopsis thaliana
  misc_feature (1)..(141): Homolog of NCBI NO: 11358541 NR Description: myb-related transcription factor MYB52 [imported] Arabidopsis thaliana >gi|3941468|gb|AAC83610.1| putative
  misc_feature (1)..(141): Homolog of NCBI NO: 21554916 NR Description: myb-like protein, putative [Arabidopsis thaliana]
  misc_feature (1)..(41): Homolog of NCBI NO: 34903242 NR Description: unnamed protein product [Oryza sativa (japonica group)] >gi|6539552|dbj|BAA88169.1| unnamed protein product
  misc_feature (1)..(137): Homolog of NCBI NO: 15222362 NR Description: MYB-family transcription factor, putative; id: At1g69560.1, supported by cDNA: gi_7644365 [Arabidopsis
  misc_feature (1)..(22): Homolog of NCBI NO: 6979341 NR Description: myb-like protein [Oryza sativa]
  misc_feature (1)..(44): Homolog of NCBI NO: 9759057 NR Description: Myb-like transcription factor-like protein
MARRTRQTSKPRLLPSTTSSSSLMASEQIMMSSGGYNHNYSSDDRKKIFPADFINFPYKFSHINHLHFLKEFFTGKIALNHKANQSKKPMEFYNFLQVNTDSNKSEIIDQDSGQSKRSDSDTKHESHVPFFDFLSVGNSAS

SEQ ID NO: 91517 - DNA, 546 bp, Arabidopsis thaliana
  misc_feature (1)..(546): Ceres Seq. ID no. 12728055
  misc_feature: MA Experiment ID: 20000180 Result: Up-regulated in Transcription
  misc_feature: MA Experiment 20000180 PARAMETER Experiment Name: At_Germinating_Seeds_P Parameter: Age (hr) Value: 24 vs. 0
  misc_feature: MA Experiment 20000180 PARAMETER Experiment Name: At_Germinating_Seeds_P Parameter: Tissue Value: Germinating Seeds
  misc_feature: MA Experiment ID: 20000185 Result: Down-regulated in Transcription
  misc_feature: MA Experiment 20000185 PARAMETER Experiment Name: At_Roots__P Parameter: Age (day) Value: 7 vs. 21
  misc_feature: MA Experiment 20000185 PARAMETER Experiment Name: At_Roots__P Parameter: Organism Value: A. thaliana
  misc_feature: MA Experiment 20000185 PARAMETER Experiment Name: At_Roots__P Parameter: Tissue Value: Roots vs. Whole Plant
  misc_feature: MA Experiment ID: 20000437 Result: Down-regulated in Transcription
  misc_feature: MA Experiment 20000437 PARAMETER Experiment Name: At_Drought_P Parameter: Age (day) Value: 8
  misc_feature: MA Experiment 20000437 PARAMETER Experiment Name: At_Drought_P Parameter: Organism Value: A. thaliana
  misc_feature: MA Experiment 20000437 PARAMETER Experiment Name: At_Drought_P Parameter: Plant Line Value: WS
  misc_feature: MA Experiment 20000437 PARAMETER Experiment Name: At_Drought_P Parameter: Timepoint (hr) Value: 24
  misc_feature: MA Experiment 20000437 PARAMETER Experiment Name: At_Drought_P Parameter: Tissue Value: Whole Plant
  misc_feature: MA Experiment 20000437 PARAMETER Experiment Name: At_Drought_P Parameter: Treatment Value: Drought vs. No Drought
  misc_feature: MA Experiment ID: 20000439 Result: Down-regulated in Transcription
  misc_feature: MA Experiment 20000439 PARAMETER Experiment Name: At_Roots__P Parameter: Age (day) Value: 14 vs. 21
  misc_feature: MA Experiment 20000439 PARAMETER Experiment Name: At_Roots__P Parameter: Organism Value: A. thaliana
  misc_feature: MA Experiment 20000439 PARAMETER Experiment Name: At_Roots__P Parameter: Tissue Value: Roots vs. Whole Plant
  misc_feature: MA Experiment ID: 20000794 Result: Down-regulated in Transcription
  misc_feature: MA Experiment 20000794 PARAMETER Experiment Name: At_Petals_P Parameter: Age (day) Value: 23-25 days
  misc_feature: MA Experiment 20000794 PARAMETER Experiment Name: At_Petals_P Parameter: Plant Line Value: WS
  misc_feature: MA Experiment 20000794 PARAMETER Experiment Name: At_Petals_P Parameter: Tissue Value: Petals vs. Whole plant
  misc_feature: MA Experiment ID: 20001248 Result: Down-regulated in Transcription
  misc_feature: MA Experiment 20001248 PARAMETER Experiment Name: At_Far-red-induction_P Parameter: Age (day) Value: 7
  misc_feature: MA Experiment 20001248 PARAMETER Experiment Name: At_Far-red-induction_P Parameter: Light Value: Far-red vs. White
  misc_feature: MA Experiment 20001248 PARAMETER Experiment Name: At_Far-red-induction_P Parameter: Organism Value: A. thaliana
  misc_feature: MA Experiment 20001248 PARAMETER Experiment Name: At_Far-red-induction_P Parameter: Plant Line Value: Columbia
  misc_feature: MA Experiment 20001248 PARAMETER Experiment Name: At_Far-red-induction_P Parameter: Timepoint (hr) Value: 4
  misc_feature: MA Experiment 20001248 PARAMETER Experiment Name: At_Far-red-induction_P Parameter: Tissue Value: Whole Plant
  misc_feature: MA Experiment ID: 20001450 Result: Down-regulated in Transcription
  misc_feature: MA Experiment 20001450 PARAMETER Experiment Name: At_Far-red-induction_P Parameter: Age (day) Value: 7
  misc_feature: MA Experiment 20001450 PARAMETER Experiment Name: At_Far-red-induction_P Parameter: Light Value: Far-red vs. White
  misc_feature: MA Experiment 20001450 PARAMETER Experiment Name: At_Far-red-induction_P Parameter: Organism Value: A. thaliana
  misc_feature: MA Experiment 20001450 PARAMETER Experiment Name: At_Far-red-induction_P Parameter: Plant Line Value: Columbia
  misc_feature: MA Experiment 20001450 PARAMETER Experiment Name: At_Far-red-induction_P Parameter: Timepoint (hr) Value: 8
  misc_feature: MA Experiment 20001450 PARAMETER Experiment Name: At_Far-red-induction_P Parameter: Tissue Value: Whole Plant
  misc_feature: MA Experiment ID: 20001905 Result: Down-regulated in Transcription
  misc_feature: MA Experiment 20001905 PARAMETER Experiment Name: At_Drought_Reproduction_P Parameter: Age (day) Value: 40
  misc_feature: MA Experiment 20001905 PARAMETER Experiment Name: At_Drought_Reproduction_P Parameter: Organism Value: A. thaliana
  misc_feature: MA Experiment 20001905 PARAMETER Experiment Name: At_Drought_Reproduction_P Parameter: Plant Line Value: WS
  misc_feature: MA Experiment 20001905 PARAMETER Experiment Name: At_Drought_Reproduction_P Parameter: Timepoint (day) Value: 10
  misc_feature: MA Experiment 20001905 PARAMETER Experiment Name: At_Drought_Reproduction_P Parameter: Tissue Value: Rosettes
  misc_feature: MA Experiment 20001905 PARAMETER Experiment Name: At_Drought_Reproduction_P Parameter: Treatment Value: Drought vs. No Drought
atggcaattagcttaggtagagtcgtcgttccgtcgtgtaccatttctggagatcggctcttcatacctaacttctcggccatctgcagcgtctcttgtggacgaatcaatgtcggaaccggcgtaatttctgctcgtcgacgccgtgacattggcggggttttaatatctagctgtctctctacggattcatcttcttctccaccgtcttcttcttctgggccgaagacgaaactctatgtcagtgggctttctttccgcacaactgaagataccttacgggatacatttgaacagtttgggaaccttatacacatgaacatggtgatggataaagtagctaatagaccaaaaggttttgctttcctacggtatgaaacagaggaggaggctatgaaagctattcaagggatgcacggaaagtttttggatggaagggtaatattcgtggaggaagctaaaaccagatcagatatgtccagagcaaaacccagacgagacttccccaaacctcaatccaaacctcgcacctttcgtacctggtag

SEQ ID NO: 91518 - protein, 181 aa, Arabidopsis thaliana
  peptide (1)..(181): Ceres Seq. ID no. 12728056
  misc_feature (79)..(150): Pfam Name: RNA recognition motif. (a.k.a. RRM, RBD, or RNP domain) Pfam Description: RNA recognition motif. (a.k.a. RRM, RBD, or RNP
  misc_feature (1)..(181): Homolog of NCBI NO: 15219486 NR Description: RRM-containing RNA-binding protein, putative;
  misc_feature (58)..(173): Homolog of NCBI NO: 38636774 NR Description: putative RNA recognition motif (RRM)-containing
  misc_feature (58)..(171): Homolog of NCBI NO: 15239676 NR Description: RRM-containing protein; protein id: At5g54580.1, by cDNA: 14044., supported by cDNA: gi_18175761, supported by gi_20465512 [Arabidopsis thaliana] >gi|9758950|dbj|BAB09337.1|
  misc_feature (61)..(164): Homolog of NCBI NO: 18402803 NR Description: expressed protein; protein id: At3g20930.1, by cDNA: 112006., supported by cDNA: gi_20466723 [Arabidopsis >gi|20466724|gb|AAM20679.1| unknown protein [Arabidopsis
  misc_feature (68)..(164): Homolog of NCBI NO: 34898598 NR Description: P0534A03.25 [Oryza sativa (japonica
  misc_feature (72)..(174): Homolog of NCBI NO: 38344030 NR Description: OJ991214_12.1 [Oryza sativa (japonica
  misc_feature (51)..(159): Homolog of NCBI NO: 15239958 NR Description: RRM-containing protein; protein id: At5g06210.1, by cDNA: 36764., supported by cDNA: gi_17065275, supported by gi_20260001 [Arabidopsis thaliana] >gi|9759319|dbj|BAB09686.1|
  misc_feature (61)..(146): Homolog of NCBI NO: 9293999 NR Description: gene_id:MFD22.4~unknown protein [Arabidopsis
  misc_feature (78)..(153): Homolog of NCBI NO: 28173040 NR Description: hyperosmotic glycine rich protein [Salmo salar]
  misc_feature (48)..(175): Homolog of NCBI NO: 15224298 NR Description: RRM-containing protein; protein id: At2g37510.1,
MAISLGRVVVPSCTISGDRLFIPNFSAICSVSCGRINVGTGVISARRRRDIGGVLISSCLSTDSSSSPPSSSSGPKTKLYVSGLSFRTTEDTLRDTFEQFGNLIHMNMVMDKVANRPKGFAFLRYETEEEAMKAIQGMHGKFLDGRVIFVEEAKTRSDMSRAKPRRDFPKPQSKPRTFRTW

SEQ ID NO: 91519 - DNA, 936 bp, Arabidopsis thaliana
  misc_feature (1)..(936): Ceres Seq. ID no. 12728057
  misc_feature: MA Experiment ID: 20000314 Result: Down-regulated in Transcription
  misc_feature: MA Experiment 20000314 PARAMETER Experiment Name: At_14day_Shoots-Roots_Sub_P Parameter: Age (day) Value: 14
  misc_feature: MA Experiment 20000314 PARAMETER Experiment Name: At_14day_Shoots-Roots_Sub_P Parameter: Organism Value: A. thaliana
  misc_feature: MA Experiment 20000314 PARAMETER Experiment Name: At_14day_Shoots-Roots_Sub_P Parameter: Plant Line Value: WS
  misc_feature: MA Experiment 20000314 PARAMETER Experiment Name: At_14day_Shoots-Roots_Sub_P Parameter: Tissue Value: Roots vs. Whole Plant
  misc_feature: MA Experiment ID: 20000315 Result: Down-regulated in Transcription
  misc_feature: MA Experiment 20000315 PARAMETER Experiment Name: At_14day_Shoots-Roots_Sub_P Parameter: Age (day) Value: 14
  misc_feature: MA Experiment 20000315 PARAMETER Experiment Name: At_14day_Shoots-Roots_Sub_P Parameter: Organism Value: A. thaliana
  misc_feature: MA Experiment 20000315 PARAMETER Experiment Name: At_14day_Shoots-Roots_Sub_P Parameter: Plant Line Value: WS
  misc_feature: MA Experiment 20000315 PARAMETER Experiment Name: At_14day_Shoots-Roots_Sub_P Parameter: Tissue Value: Shoots vs. Whole Plant
  misc_feature: MA Experiment ID: 20000327 Result: Down-regulated in Transcription
  misc_feature: MA Experiment 20000327 PARAMETER Experiment Name: At_42deg_Heat_Sub_P Parameter: Age (day) Value: 14
  misc_feature: MA Experiment 20000327 PARAMETER Experiment Name: At_42deg_Heat_Sub_P Parameter: Organism Value: A. thaliana
  misc_feature: MA Experiment 20000327 PARAMETER Experiment Name: At_42deg_Heat_Sub_P Parameter: Plant Line Value: WS
  misc_feature: MA Experiment 20000327 PARAMETER Experiment Name: At_42deg_Heat_Sub_P Parameter: Temperature (deg C) Value: 42 vs. 22
  misc_feature: MA Experiment 20000327 PARAMETER Experiment Name: At_42deg_Heat_Sub_P Parameter: Timepoint (hr) Value: 1
  misc_feature: MA Experiment 20000327 PARAMETER Experiment Name: At_42deg_Heat_Sub_P Parameter: Tissue Value: Aerial
  misc_feature: MA Experiment ID: 20000355 Result: Down-regulated in Transcription
  misc_feature: MA Experiment 20000355 PARAMETER Experiment Name: At_Siliques_Sub_P Parameter: Age (day) Value: 21
  misc_feature: MA Experiment 20000355 PARAMETER Experiment Name: At_Siliques_Sub_P Parameter: Organism Value: A. thaliana
  misc_feature: MA Experiment 20000355 PARAMETER Experiment Name: At_Siliques_Sub_P Parameter: Plant Line Value: WS
  misc_feature: MA Experiment 20000355 PARAMETER Experiment Name: At_Siliques_Sub_P Parameter: Tissue Value: Less Than 5mm Siliques vs. Whole Plant
  misc_feature: MA Experiment ID: 20000440 Result: Down-regulated in Transcription
  misc_feature: MA Experiment 20000440 PARAMETER Experiment Name: At_Closed-Flower__Sub_P Parameter: Tissue Value: Closed Flower vs. Whole Plant
  misc_feature: MA Experiment ID: 20000634 Result: Up-regulated in Transcription
  misc_feature: MA Experiment 20000634 PARAMETER Experiment Name: At_10percent_PEG_Sub_P Parameter: Age (day) Value: 12
  misc_feature: MA Experiment 20000634 PARAMETER Experiment Name: At_10percent_PEG_Sub_P Parameter: Organism Value: A. thaliana
  misc_feature: MA Experiment 20000634 PARAMETER Experiment Name: At_10percent_PEG_Sub_P Parameter: Plant Line Value: WS
  misc_feature: MA Experiment 20000634 PARAMETER Experiment Name: At_10percent_PEG_Sub_P Parameter: Timepoint (day) Value: 12
  misc_feature: MA Experiment 20000634 PARAMETER Experiment Name: At_10percent_PEG_Sub_P Parameter: Tissue Value: Whole Plant
  misc_feature: MA Experiment 20000634 PARAMETER Experiment Name: At_10percent_PEG_Sub_P Parameter: Treatment Value: 10% PEG vs. No Treatment
  misc_feature: MA Experiment ID: 20001807 Result: Down-regulated in Transcription
  misc_feature: MA Experiment 20001807 PARAMETER Experiment Name: At_50mM_NH4NO3_L-to-H_Sub_P Parameter: Timepoint (hr) Value: 6
  misc_feature: MA Experiment 20001807 PARAMETER Experiment Name: At_50mM_NH4NO3_L-to-H_Sub_P Parameter: Tissue Value: Leaf
  misc_feature: MA Experiment 20001807 PARAMETER Experiment Name: At_50mM_NH4NO3_L-to-H_Sub_P Parameter: Treatment Value: 50mM NH4NO3 vs 100mM Mannitol
acaaatcacaaatcacatctcttcatcttcctcggtttatccaaatcctcattcagacttcatcaaatcgtttcttgcttccgatccgaaatttgcggcgggaaaagaagataacatcaacaaaaaaatgatttctctattcatctcaaacttttcaaacttatcaaacttatctccgacctttgataacatgaacatgaacatcccatcgaagaagatcgtaccggtaccgacaccgagtgagaaagttgtctctttggtatctcgaaccggacgagatctccaacgttacaacaccgcagggtatcgtcaagtcgtcggatgtgtaccatatagatacaagaaacacggaggaggagaaattgaagtgcttttgataagtgcacagaagaaagggaaaggaatgttattaccaaaaggaggttgggagattgatgaatcaatagaagaagctgctttaagagagacaattgaagaagctggtgttacgggtcagcttgaagaatcacttgggaaatggcaatacaaaagcaaaagacatactatgattcatgatggtcatatgtttcctttgcttgttagtcagcagtttgagatatggcctgaatctgaattcagacaacgcaaatgggtttctttgtctgaagcgattgagttgtgtcagaattcgtggatgagagaagctttggaagctttcattaaccggaaatgccagacccaataaggataatgtagcatctctgggaacaaagagctcttcatttggaagcagatgcatataattgaagagcaggtcctcaagtttagtgttctgatttgattcattcatttgttaatgatgttagtagactaattgataataactgattgttctgaatgattgtcttcacaacatgtaatgtgtacatatataaaatggatcaatctcatagatgt

SEQ ID NO: 91520 - protein, 240 aa, Arabidopsis thaliana
  peptide (1)..(240): Ceres Seq. ID no. 12728058
  misc_feature (102)..(235): Pfam Name: NUDIX domain Pfam Description: NUDIX domain
  misc_feature (43)..(240): Homolog of NCBI NO: 22330598 NR Description: unknown protein; protein id: At1g73540.1, by cDNA: gi_18252868 [Arabidopsis thaliana] unknown protein [Arabidopsis thaliana]
  misc_feature (64)..(240): Homolog of NCBI NO: 25367539 NR Description: unknown protein [imported] - Arabidopsis thaliana
  misc_feature (44)..(237): Homolog of NCBI NO: 15221055 NR Description: unknown protein; protein id: At1g18300.1 thaliana] >gi|6714298|gb|AAF25994.1|AC013354_13 F15H18.18 thaliana] >gi|8671772|gb|AAF78378.1|AC069551_11 T10O22.27
  misc_feature (81)..(235): Homolog of NCBI NO: 18379275 NR Description: expressed protein; protein id: At2g01670.1, by cDNA: 8247., supported by cDNA: gi_13272382, supported by gi_15293192, supported by cDNA: gi_15724325 [Arabidopsis
  misc_feature (83)..(235): Homolog of NCBI NO: 21595695 NR Description: unknown [Arabidopsis thaliana]
  misc_feature (83)..(235): Homolog of NCBI NO: 15223919 NR Description: hypothetical protein; protein id: At1g14860.1
  misc_feature (105)..(235): Homolog of NCBI NO: 31747031 NR Description: MutT-like protein [Cucumis sativus]
  misc_feature (86)..(232): Homolog of NCBI NO: 18399682 NR Description: expressed protein; protein id: At3g12600.1 thaliana] >gi|9294354|dbj|BAB02251.1| to unknown protein [Arabidopsis thaliana]
  misc_feature (86)..(233): Homolog of NCBI NO: 18391450 NR Description: expressed protein; protein id: At1g12880.1, by cDNA: gi_15810278, supported by cDNA: gi_20258974 [Arabidopsis >gi|15810279|gb|AAL07027.1| unknown protein [Arabidopsis
  misc_feature (86)..(233): Homolog of NCBI NO: 25518008 NR Description: F13K23.14 protein - Arabidopsis thaliana
QITNHISSSSSVYPNPHSDFIKSFLASDPKFAAGKEDNINKKMISLFISNFSNLSNLSPTFDNMNMNIPSKKIVPVPTPSEKVVSLVSRTGRDLQRYNTAGYRQVVGCVPYRYKKHGGGEIEVLLISAQKKGKGMLLPKGGWEIDESIEEAALRETIEEAGVTGQLEESLGKWQYKSKRHTMIHDGHMFPLLVSQQFEIWPESEFRQRKWVSLSEAIELCQNSWMREALEAFINRKCQTQ

SEQ ID NO: 91521 - protein, 198 aa, Arabidopsis thaliana
  peptide (1)..(198): Ceres Seq. ID no. 12728059
  misc_feature (60)..(193): Pfam Name: NUDIX domain Pfam Description: NUDIX domain
  misc_feature (1)..(198): Homolog of NCBI NO: 22330598 NR Description: unknown protein; protein id: At1g73540.1, by cDNA: gi_18252868 [Arabidopsis thaliana] unknown protein [Arabidopsis thaliana]
  misc_feature (22)..(198): Homolog of NCBI NO: 25367539 NR Description: unknown protein [imported] - Arabidopsis thaliana
  misc_feature (2)..(195): Homolog of NCBI NO: 15221055 NR Description: unknown protein; protein id: At1g18300.1 thaliana] >gi|6714298|gb|AAF25994.1|AC013354_13 F15H18.18 thaliana] >gi|8671772|gb|AAF78378.1|AC069551_11 T10O22.27
  misc_feature (39)..(193): Homolog of NCBI NO: 18379275 NR Description: expressed protein; protein id: At2g01670.1, by cDNA: 8247., supported by cDNA: gi_13272382, supported by gi_15293192, supported by cDNA: gi_15724325 [Arabidopsis
  misc_feature (41)..(193): Homolog of NCBI NO: 21595695 NR Description: unknown [Arabidopsis thaliana]
  misc_feature (41)..(193): Homolog of NCBI NO: 15223919 NR Description: hypothetical protein; protein id: At1g14860.1
  misc_feature (63)..(193): Homolog of NCBI NO: 31747031 NR Description: MutT-like protein [Cucumis sativus]
  misc_feature (44)..(190): Homolog of NCBI NO: 18399682 NR Description: expressed protein; protein id: At3g12600.1 thaliana] >gi|9294354|dbj|BAB02251.1| to unknown protein [Arabidopsis thaliana]
  misc_feature (44)..(191): Homolog of NCBI NO: 18391450 NR Description: expressed protein; protein id: At1g12880.1, by cDNA: gi_15810278, supported by cDNA: gi_20258974 [Arabidopsis >gi|15810279|gb|AAL07027.1| unknown protein [Arabidopsis
  misc_feature (44)..(191): Homolog of NCBI NO: 25518008 NR Description: F13K23.14 protein - Arabidopsis thaliana
MISLFISNFSNLSNLSPTFDNMNMNIPSKKIVPVPTPSEKVVSLVSRTGRDLQRYNTAGYRQVVGCVPYRYKKHGGGEIEVLLISAQKKGKGMLLPKGGWEIDESIEEAALRETIEEAGVTGQLEESLGKWQYKSKRHTMIHDGHMFPLLVSQQFEIWPESEFRQRKWVSLSEAIELCQNSWMREALEAFINRKCQTQ

SEQ ID NO: 91522 - protein, 177 aa, Arabidopsis thaliana
  peptide (1)..(177): Ceres Seq. ID no. 12728060
  misc_feature (39)..(172): Pfam Name: NUDIX domain Pfam Description: NUDIX domain
  misc_feature (1)..(177): Homolog of NCBI NO: 22330598 NR Description: unknown protein; protein id: At1g73540.1, by cDNA: gi_18252868 [Arabidopsis thaliana] unknown protein [Arabidopsis thaliana]
  misc_feature (1)..(177): Homolog of NCBI NO: 25367539 NR Description: unknown protein [imported] - Arabidopsis thaliana
  misc_feature (1)..(174): Homolog of NCBI NO: 15221055 NR Description: unknown protein; protein id: At1g18300.1 thaliana] >gi|6714298|gb|AAF25994.1|AC013354_13 F15H18.18 thaliana] >gi|8671772|gb|AAF78378.1|AC069551_11 T10O22.27
  misc_feature (18)..(172): Homolog of NCBI NO: 18379275 NR Description: expressed protein; protein id: At2g01670.1, by cDNA: 8247., supported by cDNA: gi_13272382, supported by gi_15293192, supported by cDNA: gi_15724325 [Arabidopsis
  misc_feature (20)..(172): Homolog of NCBI NO: 21595695 NR Description: unknown [Arabidopsis thaliana]
  misc_feature (20)..(172): Homolog of NCBI NO: 15223919 NR Description: hypothetical protein; protein id: At1g14860.1
  misc_feature (42)..(172): Homolog of NCBI NO: 31747031 NR Description: MutT-like protein [Cucumis sativus]
  misc_feature (23)..(169): Homolog of NCBI NO: 18399682 NR Description: expressed protein; protein id: At3g12600.1 thaliana] >gi|9294354|dbj|BAB02251.1| to unknown protein [Arabidopsis thaliana]
  misc_feature (23)..(170): Homolog of NCBI NO: 18391450 NR Description: expressed protein; protein id: At1g12880.1, by cDNA: gi_15810278, supported by cDNA: gi_20258974 [Arabidopsis >gi|15810279|gb|AAL07027.1| unknown protein [Arabidopsis
  misc_feature (23)..(170): Homolog of NCBI NO: 25518008 NR Description: F13K23.14 protein - Arabidopsis thaliana
MNMNIPSKKIVPVPTPSEKVVSLVSRTGRDLQRYNTAGYRQVVGCVPYRYKKHGGGEIEVLLISAQKKGKGMLLPKGGWEIDESIEEAALRETIEEAGVTGQLEESLGKWQYKSKRHTMIHDGHMFPLLVSQQFEIWPESEFRQRKWVSLSEAIELCQNSWMREALEAFINRKCQTQ

SEQ ID NO: 91523 - DNA, 507 bp, Arabidopsis thaliana
  misc_feature (1)..(507): Ceres Seq. ID no. 12728061
  misc_feature: MA Experiment ID: 20000349 Result: Down-regulated in Transcription
  misc_feature: MA Experiment 20000349 PARAMETER Experiment Name: At_100uM_ABA_Sub_P Parameter: Age (day) Value: 14
  misc_feature: MA Experiment 20000349 PARAMETER Experiment Name: At_100uM_ABA_Sub_P Parameter: Organism Value: A. thaliana
  misc_feature: MA Experiment 20000349 PARAMETER Experiment Name: At_100uM_ABA_Sub_P Parameter: Plant Line Value: WS
  misc_feature: MA Experiment 20000349 PARAMETER Experiment Name: At_100uM_ABA_Sub_P Parameter: Timepoint (hr) Value: 6
  misc_feature: MA Experiment 20000349 PARAMETER Experiment Name: At_100uM_ABA_Sub_P Parameter: Tissue Value: Aerial
  misc_feature: MA Experiment 20000349 PARAMETER Experiment Name: At_100uM_ABA_Sub_P Parameter: Treatment Value: 100uM ABA vs. No Treatment
  misc_feature: MA Experiment ID: 20001807 Result: Up-regulated in Transcription
  misc_feature: MA Experiment 20001807 PARAMETER Experiment Name: At_50mM_NH4NO3_L-to-H_Sub_P Parameter: Timepoint (hr) Value: 6
  misc_feature: MA Experiment 20001807 PARAMETER Experiment Name: At_50mM_NH4NO3_L-to-H_Sub_P Parameter: Tissue Value: Leaf
  misc_feature: MA Experiment 20001807 PARAMETER Experiment Name: At_50mM_NH4NO3_L-to-H_Sub_P Parameter: Treatment Value: 50mM NH4NO3 vs 100mM Mannitol
atgtcgcttatggataatctgttaggtatcctccgcgttcgtgtccaacgcggtgtcaacctcgccgtacgtgatgtttccagcagcgatccttacgtcgtcctcaagctaggtcgtcagaaactcaaaaccaaagtggtgaagcaaaacgtaaacccacaatggcaagaagatttgtcattcacagtaaccgaccctaatctcccgcttactctgattgtgtacgatcacgacttcttcagcaaagacgacaaaatgggagacgcagagatcgatttgaaaccgtacatcgaagccttacgaatggaactctccggtttaccagacggaaccatcatatcgaccatcggtccaagccgtggcaactgcttagccgaggaaagctacatccgttggatcaacgatcgaatcgttcagcacatttgtctccgactccgtaacgtcgagcgtggtgaagttgagattgaactccaatggattgatcttcccggttctaaaggcttgtaa

SEQ ID NO: 91524 - protein, 168 aa, Arabidopsis thaliana
  peptide (1)..(168): Ceres Seq. ID no. 12728062
  misc_feature (11)..(90): Pfam Name: C2 domain Pfam Description: C2 domain
  misc_feature (1)..(168): Homolog of NCBI NO: 15219500 NR Description: hypothetical protein; protein id: At1g73580.1
  misc_feature (2)..(168): Homolog of NCBI NO: 30684739 NR Description: C2 domain-containing protein [Arabidopsis
  misc_feature (2)..(168): Homolog of NCBI NO: 15221907 NR Description: unknown protein; protein id: At1g48590.1
  misc_feature (2)..(168): Homolog of NCBI NO: 25405940 NR Description: protein T1N15.21 [imported] - Arabidopsis >gi|8778695|gb|AAF79703.1|AC020889_11 T1N15.21 [Arabidopsis
  misc_feature (4)..(168): Homolog of NCBI NO: 15240322 NR Description: putative protein; protein id: At5g37740.1, by cDNA: gi_18377800, supported by cDNA: gi_21281220 [Arabidopsis
  misc_feature (4)..(165): Homolog of NCBI NO: 18408493 NR Description: expressed protein; protein id: At1g66360.1, by cDNA: 19307. [Arabidopsis thaliana] >gi|25404615|pir||H96688
  misc_feature (4)..(168): Homolog of NCBI NO: 18409682 NR Description: expressed protein; protein id: At1g70810.1, by cDNA: 23322., supported by cDNA: gi_13430459 [Arabidopsis
  misc_feature (4)..(168): Homolog of NCBI NO: 13430460 NR Description: unknown protein [Arabidopsis thaliana]
  misc_feature (4)..(164): Homolog of NCBI NO: 33146442 NR Description: zinc finger and C2 domain protein-like [Oryza
  misc_feature (5)..(168): Homolog of NCBI NO: 18409675 NR Description: zinc finger and C2 domain protein, putative; id: At1g70790.1, supported by cDNA: 148076. [Arabidopsis
MSLMDNLLGILRVRVQRGVNLAVRDVSSSDPYVVLKLGRQKLKTKVVKQNVNPQWQEDLSFTVTDPNLPLTLIVYDHDFFSKDDKMGDAEIDLKPYIEALRMELSGLPDGTIISTIGPSRGNCLAEESYIRWINDRIVQHICLRLRNVERGEVEIELQWIDLPGSKGL

SEQ ID NO: 91525 - protein, 165 aa, Arabidopsis thaliana
  peptide (1)..(165): Ceres Seq. ID no. 12728063
  misc_feature (8)..(87): Pfam Name: C2 domain Pfam Description: C2 domain
  misc_feature (1)..(165): Homolog of NCBI NO: 15219500 NR Description: hypothetical protein; protein id: At1g73580.1
  misc_feature (1)..(165): Homolog of NCBI NO: 30684739 NR Description: C2 domain-containing protein [Arabidopsis
  misc_feature (1)..(165): Homolog of NCBI NO: 15221907 NR Description: unknown protein; protein id: At1g48590.1
  misc_feature (1)..(165): Homolog of NCBI NO: 25405940 NR Description: protein T1N15.21 [imported] - Arabidopsis >gi|8778695|gb|AAF79703.1|AC020889_11 T1N15.21 [Arabidopsis
  misc_feature (1)..(165): Homolog of NCBI NO: 15240322 NR Description: putative protein; protein id: At5g37740.1, by cDNA: gi_18377800, supported by cDNA: gi_21281220 [Arabidopsis
  misc_feature (1)..(162): Homolog of NCBI NO: 18408493 NR Description: expressed protein; protein id: At1g66360.1, by cDNA: 19307. [Arabidopsis thaliana] >gi|25404615|pir||H96688
  misc_feature (1)..(165): Homolog of NCBI NO: 18409682 NR Description: expressed protein; protein id: At1g70810.1, by cDNA: 23322., supported by cDNA: gi_13430459 [Arabidopsis
  misc_feature (1)..(165): Homolog of NCBI NO: 13430460 NR Description: unknown protein [Arabidopsis thaliana]
  misc_feature (1)..(161): Homolog of NCBI NO: 33146442 NR Description: zinc finger and C2 domain protein-like [Oryza
  misc_feature (2)..(165): Homolog of NCBI NO: 18409675 NR Description: zinc finger and C2 domain protein, putative; id: At1g70790.1, supported by cDNA: 148076. [Arabidopsis
MDNLLGILRVRVQRGVNLAVRDVSSSDPYVVLKLGRQKLKTKVVKQNVNPQWQEDLSFTVTDPNLPLTLIVYDHDFFSKDDKMGDAEIDLKPYIEALRMELSGLPDGTIISTIGPSRGNCLAEESYIRWINDRIVQHICLRLRNVERGEVEIELQWIDLPGSKGL

SEQ ID NO: 91526 - DNA, 1668 bp, Arabidopsis thaliana
  misc_feature (1)..(1668): Ceres Seq. ID no. 12728064
  misc_feature: MA Experiment ID: 20000306 Result: Up-regulated in Transcription
  misc_feature: MA Experiment 20000306 PARAMETER Experiment Name: At_Germinating_Seeds_Sub_P Parameter: Age (hr) Value: 6 vs. 0
  misc_feature: MA Experiment 20000306 PARAMETER Experiment Name: At_Germinating_Seeds_Sub_P Parameter: Organism Value: A. thaliana
  misc_feature: MA Experiment 20000306 PARAMETER Experiment Name: At_Germinating_Seeds_Sub_P Parameter: Plant Line Value: WS
  misc_feature: MA Experiment 20000306 PARAMETER Experiment Name: At_Germinating_Seeds_Sub_P Parameter: Tissue Value: Germinating Seeds
  misc_feature: MA Experiment ID: 20000307 Result: Up-regulated in Transcription
  misc_feature: MA Experiment 20000307 PARAMETER Experiment Name: At_Germinating_Seeds_Sub_P Parameter: Age (hr) Value: 24 vs. 0
  misc_feature: MA Experiment 20000307 PARAMETER Experiment Name: At_Germinating_Seeds_Sub_P Parameter: Organism Value: A. thaliana
  misc_feature: MA Experiment 20000307 PARAMETER Experiment Name: At_Germinating_Seeds_Sub_P Parameter: Plant Line Value: WS
  misc_feature: MA Experiment 20000307 PARAMETER Experiment Name: At_Germinating_Seeds_Sub_P Parameter: Tissue Value: Germinating Seeds
  misc_feature: MA Experiment ID: 20000329 Result: Up-regulated in Transcription
  misc_feature: MA Experiment 20000329 PARAMETER Experiment Name: At_4deg_Cold_Sub_P Parameter: Age (day) Value: 14
  misc_feature: MA Experiment 20000329 PARAMETER Experiment Name: At_4deg_Cold_Sub_P Parameter: Organism Value: A. thaliana
  misc_feature: MA Experiment 20000329 PARAMETER Experiment Name: At_4deg_Cold_Sub_P Parameter: Plant Line Value: WS
  misc_feature: MA Experiment 20000329 PARAMETER Experiment Name: At_4deg_Cold_Sub_P Parameter: Temperature (deg C) Value: 4 vs. 22
  misc_feature: MA Experiment 20000329 PARAMETER Experiment Name: At_4deg_Cold_Sub_P Parameter: Timepoint (hr) Value: 6
  misc_feature: MA Experiment 20000329 PARAMETER Experiment Name: At_4deg_Cold_Sub_P Parameter: Tissue Value: Aerial
  misc_feature: MA Experiment ID: 20000332 Result: Up-regulated in Transcription
  misc_feature: MA Experiment 20000332 PARAMETER Experiment Name: At_4deg_Cold_Sub_P Parameter: Age (day) Value: 14
  misc_feature: MA Experiment 20000332 PARAMETER Experiment Name: At_4deg_Cold_Sub_P Parameter: Organism Value: A. thaliana
  misc_feature: MA Experiment 20000332 PARAMETER Experiment Name: At_4deg_Cold_Sub_P Parameter: Plant Line Value: WS
  misc_feature: MA Experiment 20000332 PARAMETER Experiment Name: At_4deg_Cold_Sub_P Parameter: Temperature (deg C) Value: 4 vs. 22
  misc_feature: MA Experiment 20000332 PARAMETER Experiment Name: At_4deg_Cold_Sub_P Parameter: Timepoint (hr) Value: 2
  misc_feature: MA Experiment 20000332 PARAMETER Experiment Name: At_4deg_Cold_Sub_P Parameter: Tissue Value: Aerial
  misc_feature: MA Experiment ID: 20000349 Result: Down-regulated in Transcription
  misc_feature: MA Experiment 20000349 PARAMETER Experiment Name: At_100uM_ABA_Sub_P Parameter: Age (day) Value: 14
  misc_feature: MA Experiment 20000349 PARAMETER Experiment Name: At_100uM_ABA_Sub_P Parameter: Organism Value: A. thaliana
  misc_feature: MA Experiment 20000349 PARAMETER Experiment Name: At_100uM_ABA_Sub_P Parameter: Plant Line Value: WS
  misc_feature: MA Experiment 20000349 PARAMETER Experiment Name: At_100uM_ABA_Sub_P Parameter: Timepoint (hr) Value: 6
  misc_feature: MA Experiment 20000349 PARAMETER Experiment Name: At_100uM_ABA_Sub_P Parameter: Tissue Value: Aerial
  misc_feature: MA Experiment 20000349 PARAMETER Experiment Name: At_100uM_ABA_Sub_P Parameter: Treatment Value: 100uM ABA vs. No Treatment
  misc_feature: MA Experiment ID: 20000440 Result: Up-regulated in Transcription
  misc_feature: MA Experiment 20000440 PARAMETER Experiment Name: At_Closed-Flower__Sub_P Parameter: Tissue Value: Closed Flower vs. Whole Plant
atggtcggcgaagaagatagcgagagagctcagtccagtaagatggagatcgagcgagaatcgaatttgggatctgcgagtgtgctgatgcagtcgaaggtcatctccgtctcgaatttcttctctattcatagatttcattaccctcgtgaaaaaatcgtctcttttttgtttcctagtgtgttctcaaggataatggcttcgtatggcgaggagcgtgaaatccaaaagaattactggaaagagcattcagtgggattgagtgttgaagctatgatgcttgattccaaagcttctgacctcgacaaagaagaacgtcctgagatacttgcgtttcttccacctattgaagggacaacagtgctagagtttggtgctggaattggtcgttttactactgaattagctcagaaggccggccaggtcattgcggttgacttcattgaaagtgttatcaaaaagaatgagaacattaacggtcactacaagaacgtcaaatttctgtgcgctgatgtcacatcaccaaatatgaactttccaaatgagtctatggatctgatattctccaactggctgctaatgtatctctctgatcaagaggttgaagatttggcgaaaaagatgttacaatggacaaaggttggcgggtatattttctttcgggagtcttgtttccatcagtctggtgataacaagcggaagtacaacccaacacactaccgtgaacctaaattttacacaaagcttttcaaagaatgccatatgaatgacgaagatgggaattcgtatgaactctctttggttagctgtaaatgcattggagcttatgtgagaaacaaaaagaaccagaaccagatatgctggctttggcagaaagtcagttcggataatgataggggcttccaacgcttcttggacaatgtccagtataagtctagtggtatcttacgctatgagcgtgtctttggagaagggtttgttagcacagggggactcgagacaacaaaggaattcgtggatatgctggatctgaaacctggccaaaaagttctagacgttgggtgcggaataggaggaggggacttctacatggctgagaactttgacgtggatgttgtgggcattgatctatctgtaaacatgatctcttttgcgcttgaacacgcaataggactcaaatgctctgtagaattcgaagtagctgattgcaccaagaaggagtatcctgataacacctttgatgttatttatagcagagacaccattctacatatccaagacaagccagcattgttcagaagattctacaaatggttgaagccgggagggaaagttctcatcactgattactgcagaagccccaaaaccccatctccagactttgcaatctacatcaagaaacgaggttatgatcttcatgatgtacaagcatacggtcagatgctgagagatgctggtttcgaggaggtaatcgcggaggatagaaccgatcagttcatgaaagtcctgaaacgggaactggatgcagtggagaaggagaaggaagaattcatcagtgacttctcgaaagaggattacgaggatattataggcgggtggaagtcaaagctacttaggagctcaagtggtgagcagaagtggggtttgttcatcgccaagagaaactga

SEQ ID NO: 91527 - protein, 555 aa, Arabidopsis thaliana
  peptide (1)..(555): Ceres Seq. ID no. 12728065
  misc_feature (1)..(555): Homolog of NCBI NO: 15219502 NR Description: phosphoethanolamine N-methyltransferase, protein id: At1g73600.1 [Arabidopsis thaliana]
  misc_feature (66)..(555): Homolog of NCBI NO: 24212080 NR Description: Putative phosphoethanolamine N-methyltransferase 3
  misc_feature (67)..(555): Homolog of NCBI NO: 30684743 NR Description: phosphoethanolamine N-methyltransferase, putative
  misc_feature (67)..(555): Homolog of NCBI NO: 20260388 NR Description: unknown protein [Arabidopsis thaliana]
  misc_feature (67)..(555): Homolog of NCBI NO: 9294501 NR Description: methyl transferase-like protein [Arabidopsis
  misc_feature (70)..(554): Homolog of NCBI NO: 28804509 NR Description: phosphoethanolamine N-methyltransferase [Aster
  misc_feature (82)..(554): Homolog of NCBI NO: 15221909 NR Description: phosphoethanolamine N-methyltransferase, protein id: At1g48600.1, supported by cDNA: gi_16226648, by cDNA: gi_17380783 [Arabidopsis thaliana]
  misc_feature (71)..(554): Homolog of NCBI NO: 24212082 NR Description: Phosphoethanolamine N-methyltransferase
  misc_feature (67)..(554): Homolog of NCBI NO: 12584943 NR Description: phosphoethanolamine N-methyltransferase
  misc_feature (71)..(554): Homolog of NCBI NO: 28436074 NR Description: phosphoethanolamine N-methyltransferase [Suaeda
MVGEEDSERAQSSKMEIERESNLGSASVLMQSKVISVSNFFSIHRFHYPREKIVSFLFPSVFSRIMASYGEEREIQKNYWKEHSVGLSVEAMMLDSKASDLDKEERPEILAFLPPIEGTTVLEFGAGIGRFTTELAQKAGQVIAVDFIESVIKKNENINGHYKNVKFLCADVTSPNMNFPNESMDLIFSNWLLMYLSDQEVEDLAKKMLQWTKVGGYIFFRESCFHQSGDNKRKYNPTHYREPKFYTKLFKECHMNDEDGNSYELSLVSCKCIGAYVRNKKNQNQICWLWQKVSSDNDRGFQRFLDNVQYKSSGILRYERVFGEGFVSTGGLETTKEFVDMLDLKPGQKVLDVGCGIGGGDFYMAENFDVDVVGIDLSVNMISFALEHAIGLKCSVEFEVADCTKKEYPDNTFDVIYSRDTILHIQDKPALFRRFYKWLKPGGKVLITDYCRSPKTPSPDFAIYIKKRGYDLHDVQAYGQMLRDAGFEEVIAEDRTDQFMKVLKRELDAVEKEKEEFISDFSKEDYEDIIGGWKSKLLRSSSGEQKWGLFIAKRN

SEQ ID NO: 91528 - protein, 541 aa, Arabidopsis thaliana
  peptide (1)..(541): Ceres Seq. ID no. 12728066
  misc_feature (1)..(541): Homolog of NCBI NO: 15219502 NR Description: phosphoethanolamine N-methyltransferase, protein id: At1g73600.1 [Arabidopsis thaliana]
  misc_feature (52)..(541): Homolog of NCBI NO: 24212080 NR Description: Putative phosphoethanolamine N-methyltransferase 3
  misc_feature (53)..(541): Homolog of NCBI NO: 30684743 NR Description: phosphoethanolamine N-methyltransferase, putative
  misc_feature (53)..(541): Homolog of NCBI NO: 20260388 NR Description: unknown protein [Arabidopsis thaliana]
  misc_feature (53)..(541): Homolog of NCBI NO: 9294501 NR Description: methyl transferase-like protein [Arabidopsis
  misc_feature (56)..(540): Homolog of NCBI NO: 28804509 NR Description: phosphoethanolamine N-methyltransferase [Aster
  misc_feature (68)..(540): Homolog of NCBI NO: 15221909 NR Description: phosphoethanolamine N-methyltransferase, protein id: At1g48600.1, supported by cDNA: gi_16226648, by cDNA: gi_17380783 [Arabidopsis thaliana]
  misc_feature (57)..(540): Homolog of NCBI NO: 24212082 NR Description: Phosphoethanolamine N-methyltransferase
  misc_feature (53)..(540): Homolog of NCBI NO: 12584943 NR Description: phosphoethanolamine N-methyltransferase
  misc_feature (57)..(540): Homolog of NCBI NO: 28436074 NR Description: phosphoethanolamine N-methyltransferase [Suaeda
MEIERESNLGSASVLMQSKVISVSNFFSIHRFHYPREKIVSFLFPSVFSRIMASYGEEREIQKNYWKEHSVGLSVEAMMLDSKASDLDKEERPEILAFLPPIEGTTVLEFGAGIGRFTTELAQKAGQVIAVDFIESVIKKNENINGHYKNVKFLCADVTSPNMNFPNESMDLIFSNWLLMYLSDQEVEDLAKKMLQWTKVGGYIFFRESCFHQSGDNKRKYNPTHYREPKFYTKLFKECHMNDEDGNSYELSLVSCKCIGAYVRNKKNQNQICWLWQKVSSDNDRGFQRFLDNVQYKSSGILRYERVFGEGFVSTGGLETTKEFVDMLDLKPGQKVLDVGCGIGGGDFYMAENFDVDVVGIDLSVNMISFALEHAIGLKCSVEFEVADCTKKEYPDNTFDVIYSRDTILHIQDKPALFRRFYKWLKPGGKVLITDYCRSPKTPSPDFAIYIKKRGYDLHDVQAYGQMLRDAGFEEVIAEDRTDQFMKVLKRELDAVEKEKEEFISDFSKEDYEDIIGGWKSKLLRSSSGEQKWGLFIAKRN

SEQ ID NO: 91529 - protein, 526 aa, Arabidopsis thaliana
  peptide (1)..(526): Ceres Seq. ID no. 12728067
  misc_feature (1)..(526): Homolog of NCBI NO: 15219502 NR Description: phosphoethanolamine N-methyltransferase, protein id: At1g73600.1 [Arabidopsis thaliana]
  misc_feature (37)..(526): Homolog of NCBI NO: 24212080 NR Description: Putative phosphoethanolamine N-methyltransferase 3
  misc_feature (38)..(526): Homolog of NCBI NO: 30684743 NR Description: phosphoethanolamine N-methyltransferase, putative
  misc_feature (38)..(526): Homolog of NCBI NO: 20260388 NR Description: unknown protein [Arabidopsis thaliana]
  misc_feature (38)..(526): Homolog of NCBI NO: 9294501 NR Description: methyl transferase-like protein [Arabidopsis
  misc_feature (41)..(525): Homolog of NCBI NO: 28804509 NR Description: phosphoethanolamine N-methyltransferase [Aster
  misc_feature (53)..(525): Homolog of NCBI NO: 15221909 NR Description: phosphoethanolamine N-methyltransferase, protein id: At1g48600.1, supported by cDNA: gi_16226648, by cDNA: gi_17380783 [Arabidopsis thaliana]
  misc_feature (42)..(525): Homolog of NCBI NO: 24212082 NR Description: Phosphoethanolamine N-methyltransferase
  misc_feature (38)..(525): Homolog of NCBI NO: 12584943 NR Description: phosphoethanolamine N-methyltransferase
  misc_feature (42)..(525): Homolog of NCBI NO: 28436074 NR Description: phosphoethanolamine N-methyltransferase [Suaeda
MQSKVISVSNFFSIHRFHYPREKIVSFLFPSVFSRIMASYGEEREIQKNYWKEHSVGLSVEAMMLDSKASDLDKEERPEILAFLPPIEGTTVLEFGAGIGRFTTELAQKAGQVIAVDFIESVIKKNENINGHYKNVKFLCADVTSPNMNFPNESMDLIFSNWLLMYLSDQEVEDLAKKMLQWTKVGGYIFFRESCFHQSGDNKRKYNPTHYREPKFYTKLFKECHMNDEDGNSYELSLVSCKCIGAYVRNKKNQNQICWLWQKVSSDNDRGFQRFLDNVQYKSSGILRYERVFGEGFVSTGGLETTKEFVDMLDLKPGQKVLDVGCGIGGGDFYMAENFDVDVVGIDLSVNMISFALEHAIGLKCSVEFEVADCTKKEYPDNTFDVIYSRDTILHIQDKPALFRRFYKWLKPGGKVLITDYCRSPKTPSPDFAIYIKKRGYDLHDVQAYGQMLRDAGFEEVIAEDRTDQFMKVLKRELDAVEKEKEEFISDFSKEDYEDIIGGWKSKLLRSSSGEQKWGLFIAKRN

SEQ ID NO: 91530 - DNA, 1842 bp, Arabidopsis thaliana
  misc_feature (1)..(1842): Ceres Seq. ID no. 12728096
  misc_feature: MA Experiment ID: 20000171 Result: Up-regulated in Transcription
  misc_feature: MA Experiment 20000171 PARAMETER Experiment Name: At_42deg_Heat_P Parameter: Age (day) Value: 14
  misc_feature: MA Experiment 20000171 PARAMETER Experiment Name: At_42deg_Heat_P Parameter: Organism Value: A. thaliana
  misc_feature: MA Experiment 20000171 PARAMETER Experiment Name: At_42deg_Heat_P Parameter: Plant Line Value: WS
  misc_feature: MA Experiment 20000171 PARAMETER Experiment Name: At_42deg_Heat_P Parameter: Temperature (deg C) Value: 42 vs. 22
  misc_feature: MA Experiment 20000171 PARAMETER Experiment Name: At_42deg_Heat_P Parameter: Timepoint (hr) Value: 1
  misc_feature: MA Experiment 20000171 PARAMETER Experiment Name: At_42deg_Heat_P Parameter: Tissue Value: Aerial
  misc_feature: MA Experiment ID: 20000180 Result: Down-regulated in Transcription
  misc_feature: MA Experiment 20000180 PARAMETER Experiment Name: At_Germinating_Seeds_P Parameter: Age (hr) Value: 24 vs. 0
  misc_feature: MA Experiment 20000180 PARAMETER Experiment Name: At_Germinating_Seeds_P Parameter: Tissue Value: Germinating Seeds
atgataaacctaacgagacagagataccgagtctcgaatctcgtgaccggtggaacttcgctggatgtgattttgtctcactctcctaacaagttcacattcccgcctcttcttaaatcatgcgcgaagcttggagatgttgtacaaggtcggattctgcatgcccaagtcgtcaaaactgggtttttcgttgatgtgttcacggcaacggctttggtgagtatgtatatgaaggtgaagcaggtgacggatgctcttaaggtgctcgatgaaatgcctgagaggggtattgcgagtgttaatgcagcggtttctgggcttttggagaatgggttttgtagagatgcgtttaggatgtttggggatgctagggtttctgggtctgggatgaattcggttaccgttgctagtgttttgggtggttgtggggatattgaaggagggatgcaattgcattgtttggcgatgaaatcaggttttgagatggaagtttacgttggaacctctcttgtttcaatgtattcgagatgtggagagtgggttttggctgcgagaatgttcgaaaaggttcctcataagagtgttgttacctacaatgcttttatctctggattgatggagaatggagttatgaatttggttcctagtgttttcaatctcatgaggaagttttcaagtgaagaaccaaatgatgttacttttgttaatgcaataactgcttgcgctagtcttttgaatctccagtatggtaggcaacttcatggtcttgtcatgaaaaaagagtttcagtttgagacaatggttggtactgctctcattgatatgtattcgaaatgtcggtgttggaaatcagcttacattgttttcaccgagctgaaagataccaggaacttgatatcttggaactctgttatctctggaatgatgattaatggacagcatgagacagcagttgagttgtttgaaaagttggattccgagggacttaagcctgattcagcgacgtggaattcactgatcagtggcttttcacaattagggaaagtaattgaagctttcaagttctttgagagaatgctatcagtagttatggttcctagtttgaaatgtctcactagccttttatctgcttgttcagatatttggactttgaagaacggcaaagagatccatgggcatgtcattaaagctgcagcggaaagggatatatttgttttaacgtctctcattgacatgtacatgaaatgtgggctctcctcgtgggcacgccggatctttgatcgatttgaaccgaaacccaaggatcccgtgttctggaacgttatgatatctggatatggtaaacatggagagtgtgagtctgcaattgaaatattcgaactattacgagaggagaaagtagaaccgagtttagcaacctttactgctgttctatctgcgtgtagtcactgtggcaatgtcgagaagggttctcaaatatttaggttgatgcaggaagaatatggatataaacctagtacagagcacataggttgtatgattgatcttttgggtcggtctgggagattaagagaggccaaggaggtaatagatcaaatgtcagaaccatcgtcttcggtttactcttccttgctcggttcatgtaggcaacacctagatccagttcttggagaggaagcggcaatgaagctagcagagttagagccagagaatccagctccatttgtgatcttgtccagtatatatgctgcattagaaagatgggaagatgtggaaagtatcaggcaggtaatagatcagaagcaactggtgaaacttccaggtcttagtttgtctggttaa

SEQ ID NO: 91531 - protein, 613 aa, Arabidopsis thaliana
  peptide (1)..(613): Ceres Seq. ID no. 12728097
  misc_feature (472)..(506): Pfam Name: PPR repeat Pfam Description: PPR repeat
  misc_feature (33)..(340): Homolog of NCBI NO: 15232006 NR Description: hypothetical protein; protein id: At3g09040.1 thaliana] >gi|5923669|gb|AAD56320.1|AC009326_7 hypothetical
  misc_feature (307)..(610): Homolog of NCBI NO: 15232006 NR Description: hypothetical protein; protein id: At3g09040.1 thaliana] >gi|5923669|gb|AAD56320.1|AC009326_7 hypothetical
  misc_feature (23)..(610): Homolog of NCBI NO: 15225445 NR Description: hypothetical protein; protein id: At2g13600.1
  misc_feature (33)..(386): Homolog of NCBI NO: 15231798 NR Description: putative protein; protein id: At3g53360.1
  misc_feature (332)..(610): Homolog of NCBI NO: 15231798 NR Description: putative protein; protein id: At3g53360.1
  misc_feature (28)..(610): Homolog of NCBI NO: 9279687 NR Description: gb|AAC35225.1~gene_id:MWI23.6~strong similarity
  misc_feature (28)..(610): Homolog of NCBI NO: 15228829 NR Description: hypothetical protein; protein id: At3g22690.1
  misc_feature (291)..(610): Homolog of NCBI NO: 15228590 NR Description: hypothetical protein; protein id: At3g03580.1 thaliana] >gi|6091764|gb|AAF03474.1|AC009327_13 hypothetical [Arabidopsis thaliana] >gi|28393735|gb|AAO42278.1| unknown
  misc_feature (28)..(346): Homolog of NCBI NO: 15228590 NR Description: hypothetical protein; protein id: At3g03580.1 thaliana] >gi|6091764|gb|AAF03474.1|AC009327_13 hypothetical [Arabidopsis thaliana] >gi|28393735|gb|AAO42278.1| unknown
  misc_feature (32)..(610): Homolog of NCBI NO: 21740490 NR Description: OSJNBa0006B20.5 [Oryza sativa (japonica
MINLTRQRYRVSNLVTGGTSLDVILSHSPNKFTFPPLLKSCAKLGDVVQGRILHAQVVKTGFFVDVFTATALVSMYMKVKQVTDALKVLDEMPERGIASVNAAVSGLLENGFCRDAFRMFGDARVSGSGMNSVTVASVLGGCGDIEGGMQLHCLAMKSGFEMEVYVGTSLVSMYSRCGEWVLAARMFEKVPHKSVVTYNAFISGLMENGVMNLVPSVFNLMRKFSSEEPNDVTFVNAITACASLLNLQYGRQLHGLVMKKEFQFETMVGTALIDMYSKCRCWKSAYIVFTELKDTRNLISWNSVISGMMINGQHETAVELFEKLDSEGLKPDSATWNSLISGFSQLGKVIEAFKFFERMLSVVMVPSLKCLTSLLSACSDIWTLKNGKEIHGHVIKAAAERDIFVLTSLIDMYMKCGLSSWARRIFDRFEPKPKDPVFWNVMISGYGKHGECESAIEIFELLREEKVEPSLATFTAVLSACSHCGNVEKGSQIFRLMQEEYGYKPSTEHIGCMIDLLGRSGRLREAKEVIDQMSEPSSSVYSSLLGSCRQHLDPVLGEEAAMKLAELEPENPAPFVILSSIYAALERWEDVESIRQVIDQKQLVKLPGLSLSG

SEQ ID NO: 91532 - protein, 539 aa, Arabidopsis thaliana
  peptide (1)..(539): Ceres Seq. ID no. 12728098
  misc_feature (398)..(432): Pfam Name: PPR repeat Pfam Description: PPR repeat
  misc_feature (1)..(266): Homolog of NCBI NO: 15232006 NR Description: hypothetical protein; protein id: At3g09040.1 thaliana] >gi|5923669|gb|AAD56320.1|AC009326_7 hypothetical
  misc_feature (233)..(536): Homolog of NCBI NO: 15232006 NR Description: hypothetical protein; protein id: At3g09040.1 thaliana] >gi|5923669|gb|AAD56320.1|AC009326_7 hypothetical
  misc_feature (1)..(536): Homolog of NCBI NO: 15225445 NR Description: hypothetical protein; protein id: At2g13600.1
  misc_feature (1)..(312): Homolog of NCBI NO: 15231798 NR Description: putative protein; protein id: At3g53360.1
  misc_feature (258)..(536): Homolog of NCBI NO: 15231798 NR Description: putative protein; protein id: At3g53360.1
  misc_feature (1)..(536): Homolog of NCBI NO: 9279687 NR Description: gb|AAC35225.1~gene_id:MWI23.6~strong similarity
  misc_feature (1)..(536): Homolog of NCBI NO: 15228829 NR Description: hypothetical protein; protein id: At3g22690.1
  misc_feature (217)..(536): Homolog of NCBI NO: 15228590 NR Description: hypothetical protein; protein id: At3g03580.1 thaliana] >gi|6091764|gb|AAF03474.1|AC009327_13 hypothetical [Arabidopsis thaliana] >gi|28393735|gb|AAO42278.1| unknown
  misc_feature (1)..(272): Homolog of NCBI NO: 15228590 NR Description: hypothetical protein; protein id: At3g03580.1 thaliana] >gi|6091764|gb|AAF03474.1|AC009327_13 hypothetical [Arabidopsis thaliana] >gi|28393735|gb|AAO42278.1| unknown
  misc_feature (1)..(536): Homolog of NCBI NO: 21740490 NR Description: OSJNBa0006B20.5 [Oryza sativa (japonica
MYMKVKQVTDALKVLDEMPERGIASVNAAVSGLLENGFCRDAFRMFGDARVSGSGMNSVTVASVLGGCGDIEGGMQLHCLAMKSGFEMEVYVGTSLVSMYSRCGEWVLAARMFEKVPHKSVVTYNAFISGLMENGVMNLVPSVFNLMRKFSSEEPNDVTFVNAITACASLLNLQYGRQLHGLVMKKEFQFETMVGTALIDMYSKCRCWKSAYIVFTELKDTRNLISWNSVISGMMINGQHETAVELFEKLDSEGLKPDSATWNSLISGFSQLGKVIEAFKFFERMLSVVMVPSLKCLTSLLSACSDIWTLKNGKEIHGHVIKAAAERDIFVLTSLIDMYMKCGLSSWARRIFDRFEPKPKDPVFWNVMISGYGKHGECESAIEIFELLREEKVEPSLATFTAVLSACSHCGNVEKGSQIFRLMQEEYGYKPSTEHIGCMIDLLGRSGRLREAKEVIDQMSEPSSSVYSSLLGSCRQHLDPVLGEEAAMKLAELEPENPAPFVILSSIYAALERWEDVESIRQVIDQKQLVKLPGLSLSG

SEQ ID NO: 91533 - protein, 537 aa, Arabidopsis thaliana
  peptide (1)..(537): Ceres Seq. ID no. 12728099
  misc_feature (396)..(430): Pfam Name: PPR repeat Pfam Description: PPR repeat
  misc_feature (1)..(264): Homolog of NCBI NO: 15232006 NR Description: hypothetical protein; protein id: At3g09040.1 thaliana] >gi|5923669|gb|AAD56320.1|AC009326_7 hypothetical
  misc_feature (231)..(534): Homolog of NCBI NO: 15232006 NR Description: hypothetical protein; protein id: At3g09040.1 thaliana] >gi|5923669|gb|AAD56320.1|AC009326_7 hypothetical
  misc_feature (1)..(534): Homolog of NCBI NO: 15225445 NR Description: hypothetical protein; protein id: At2g13600.1
  misc_feature (1)..(310): Homolog of NCBI NO: 15231798 NR Description: putative protein; protein id: At3g53360.1
  misc_feature (256)..(534): Homolog of NCBI NO: 15231798 NR Description: putative protein; protein id: At3g53360.1
  misc_feature (1)..(534): Homolog of NCBI NO: 9279687 NR Description: gb|AAC35225.1~gene_id:MWI23.6~strong similarity
  misc_feature (1)..(534): Homolog of NCBI NO: 15228829 NR Description: hypothetical protein; protein id: At3g22690.1
  misc_feature (215)..(534): Homolog of NCBI NO: 15228590 NR Description: hypothetical protein; protein id: At3g03580.1 thaliana] >gi|6091764|gb|AAF03474.1|AC009327_13 hypothetical [Arabidopsis thaliana] >gi|28393735|gb|AAO42278.1| unknown
  misc_feature (1)..(270): Homolog of NCBI NO: 15228590 NR Description: hypothetical protein; protein id: At3g03580.1 thaliana] >gi|6091764|gb|AAF03474.1|AC009327_13 hypothetical [Arabidopsis thaliana] >gi|28393735|gb|AAO42278.1| unknown
  misc_feature (1)..(534): Homolog of NCBI NO: 21740490 NR Description: OSJNBa0006B20.5 [Oryza sativa (japonica
MKVKQVTDALKVLDEMPERGIASVNAAVSGLLENGFCRDAFRMFGDARVSGSGMNSVTVASVLGGCGDIEGGMQLHCLAMKSGFEMEVYVGTSLVSMYSRCGEWVLAARMFEKVPHKSVVTYNAFISGLMENGVMNLVPSVFNLMRKFSSEEPNDVTFVNAITACASLLNLQYGRQLHGLVMKKEFQFETMVGTALIDMYSKCRCWKSAYIVFTELKDTRNLISWNSVISGMMINGQHETAVELFEKLDSEGLKPDSATWNSLISGFSQLGKVIEAFKFFERMLSVVMVPSLKCLTSLLSACSDIWTLKNGKEIHGHVIKAAAERDIFVLTSLIDMYMKCGLSSWARRIFDRFEPKPKDPVFWNVMISGYGKHGECESAIEIFELLREEKVEPSLATFTAVLSACSHCGNVEKGSQIFRLMQEEYGYKPSTEHIGCMIDLLGRSGRLREAKEVIDQMSEPSSSVYSSLLGSCRQHLDPVLGEEAAMKLAELEPENPAPFVILSSIYAALERWEDVESIRQVIDQKQLVKLPGLSLSG

SEQ ID NO: 91534 - DNA, 1062 bp, Arabidopsis thaliana
  misc_feature (1)..(1062): Ceres Seq. ID no. 12728163
  misc_feature: MA Experiment ID: 20000185 Result: Up-regulated in Transcription
  misc_feature: MA Experiment 20000185 PARAMETER Experiment Name: At_Roots__P Parameter: Age (day) Value: 7 vs. 21
  misc_feature: MA Experiment 20000185 PARAMETER Experiment Name: At_Roots__P Parameter: Organism Value: A. thaliana
  misc_feature: MA Experiment 20000185 PARAMETER Experiment Name: At_Roots__P Parameter: Tissue Value: Roots vs. Whole Plant
  misc_feature: MA Experiment ID: 20000227 Result: Down-regulated in Transcription
  misc_feature: MA Experiment 20000227 PARAMETER Experiment Name: At_Root-Tips-vs-Tops_P Parameter: Tissue Value: Root Tips vs. Root Tops
  misc_feature: MA Experiment ID: 20000235 Result: Up-regulated in Transcription
  misc_feature: MA Experiment 20000235 PARAMETER Experiment Name: At_Siliques_P Parameter: Age (day) Value: 21
  misc_feature: MA Experiment 20000235 PARAMETER Experiment Name: At_Siliques_P Parameter: Organism Value: A. thaliana
  misc_feature: MA Experiment 20000235 PARAMETER Experiment Name: At_Siliques_P Parameter: Plant Line Value: WS
  misc_feature: MA Experiment 20000235 PARAMETER Experiment Name: At_Siliques_P Parameter: Tissue Value: 5-10mm Siliques vs. Whole Plant
  misc_feature: MA Experiment ID: 20000436 Result: Up-regulated in Transcription
  misc_feature: MA Experiment 20000436 PARAMETER Experiment Name: At_Drought_P Parameter: Age (day) Value: 7
  misc_feature: MA Experiment 20000436 PARAMETER Experiment Name: At_Drought_P Parameter: Organism Value: A. thaliana
  misc_feature: MA Experiment 20000436 PARAMETER Experiment Name: At_Drought_P Parameter: Plant Line Value: WS
  misc_feature: MA Experiment 20000436 PARAMETER Experiment Name: At_Drought_P Parameter: Timepoint (hr) Value: 12
  misc_feature: MA Experiment 20000436 PARAMETER Experiment Name: At_Drought_P Parameter: Tissue Value: Whole Plant
  misc_feature: MA Experiment 20000436 PARAMETER Experiment Name: At_Drought_P Parameter: Treatment Value: Drought vs. No Drought
  misc_feature: MA Experiment ID: 20000438 Result: Down-regulated in Transcription
  misc_feature: MA Experiment 20000438 PARAMETER Experiment Name: At_Shoots__P Parameter: Age (day) Value: 14
  misc_feature: MA Experiment 20000438 PARAMETER Experiment Name: At_Shoots__P Parameter: Tissue Value: Shoots vs. Whole Plant
  misc_feature: MA Experiment ID: 20000439 Result: Up-regulated in Transcription
  misc_feature: MA Experiment 20000439 PARAMETER Experiment Name: At_Roots__P Parameter: Age (day) Value: 14 vs. 21
  misc_feature: MA Experiment 20000439 PARAMETER Experiment Name: At_Roots__P Parameter: Organism Value: A. thaliana
  misc_feature: MA Experiment 20000439 PARAMETER Experiment Name: At_Roots__P Parameter: Tissue Value: Roots vs. Whole Plant
  misc_feature: MA Experiment ID: 20000453 Result: Up-regulated in Transcription
  misc_feature: MA Experiment 20000453 PARAMETER Experiment Name: At_100uM_ABA_P Parameter: Age (day) Value: 15
  misc_feature: MA Experiment 20000453 PARAMETER Experiment Name: At_100uM_ABA_P Parameter: Organism Value: A. thaliana
  misc_feature: MA Experiment 20000453 PARAMETER Experiment Name: At_100uM_ABA_P Parameter: Plant Line Value: WS
  misc_feature: MA Experiment 20000453 PARAMETER Experiment Name: At_100uM_ABA_P Parameter: Timepoint (hr) Value: 24
  misc_feature: MA Experiment 20000453 PARAMETER Experiment Name: At_100uM_ABA_P Parameter: Tissue Value: Aerial
  misc_feature: MA Experiment 20000453 PARAMETER Experiment Name: At_100uM_ABA_P Parameter: Treatment Value: 100uM ABA vs. No Treatment
  misc_feature: MA Experiment ID: 20000460 Result: Down-regulated in Transcription
  misc_feature: MA Experiment 20000460 PARAMETER Experiment Name: At_10percent_PEG_P Parameter: Age (day) Value: 12
  misc_feature: MA Experiment 20000460 PARAMETER Experiment Name: At_10percent_PEG_P Parameter: Organism Value: A. thaliana
  misc_feature: MA Experiment 20000460 PARAMETER Experiment Name: At_10percent_PEG_P Parameter: Plant Line Value: WS
  misc_feature: MA Experiment 20000460 PARAMETER Experiment Name: At_10percent_PEG_P Parameter: Timepoint (day) Value: 12
  misc_feature: MA Experiment 20000460 PARAMETER Experiment Name: At_10percent_PEG_P Parameter: Tissue Value: Whole Plant
  misc_feature: MA Experiment 20000460 PARAMETER Experiment Name: At_10percent_PEG_P Parameter: Treatment Value: 10percent PEG vs. No Treatment
  misc_feature: MA Experiment ID: 20000794 Result: Up-regulated in Transcription
  misc_feature: MA Experiment 20000794 PARAMETER Experiment Name: At_Petals_P Parameter: Age (day) Value: 23-25 days
  misc_feature: MA Experiment 20000794 PARAMETER Experiment Name: At_Petals_P Parameter: Plant Line Value: WS
  misc_feature: MA Experiment 20000794 PARAMETER Experiment Name: At_Petals_P Parameter: Tissue Value: Petals vs. Whole plant
  misc_feature: MA Experiment ID: 20001248 Result: Down-regulated in Transcription
  misc_feature: MA Experiment 20001248 PARAMETER Experiment Name: At_Far-red-induction_P Parameter: Age (day) Value: 7
  misc_feature: MA Experiment 20001248 PARAMETER Experiment Name: At_Far-red-induction_P Parameter: Light Value: Far-red vs. White
  misc_feature: MA Experiment 20001248 PARAMETER Experiment Name: At_Far-red-induction_P Parameter: Organism Value: A. thaliana
  misc_feature: MA Experiment 20001248 PARAMETER Experiment Name: At_Far-red-induction_P Parameter: Plant Line Value: Columbia
  misc_feature: MA Experiment 20001248 PARAMETER Experiment Name: At_Far-red-induction_P Parameter: Timepoint (hr) Value: 4
  misc_feature: MA Experiment 20001248 PARAMETER Experiment Name: At_Far-red-induction_P Parameter: Tissue Value: Whole Plant
  misc_feature: MA Experiment ID: 20001556 Result: Down-regulated in Transcription
  misc_feature: MA Experiment 20001556 PARAMETER Experiment Name: At_Drought_Soil_Dry_P Parameter: Age (day) Value: 26
  misc_feature: MA Experiment 20001556 PARAMETER Experiment Name: At_Drought_Soil_Dry_P Parameter: Organism Value: A. thaliana
  misc_feature: MA Experiment 20001556 PARAMETER Experiment Name: At_Drought_Soil_Dry_P Parameter: Plant Line Value: WS
  misc_feature: MA Experiment 20001556 PARAMETER Experiment Name: At_Drought_Soil_Dry_P Parameter: Post Timepoint (hr) Value: None
  misc_feature: MA Experiment 20001556 PARAMETER Experiment Name: At_Drought_Soil_Dry_P Parameter: Post-Treatment Value: None
  misc_feature: MA Experiment 20001556 PARAMETER Experiment Name: At_Drought_Soil_Dry_P Parameter: Timepoint (day) Value: 12
  misc_feature: MA Experiment 20001556 PARAMETER Experiment Name: At_Drought_Soil_Dry_P Parameter: Treatment Value: Drought vs. No Drought
  misc_feature: MA Experiment ID: 20001558 Result: Down-regulated in Transcription
  misc_feature: MA Experiment 20001558 PARAMETER Experiment Name: At_Drought_Soil_Dry_P Parameter: Age (day) Value: 27
  misc_feature: MA Experiment 20001558 PARAMETER Experiment Name: At_Drought_Soil_Dry_P Parameter: Organism Value: A. thaliana
  misc_feature: MA Experiment 20001558 PARAMETER Experiment Name: At_Drought_Soil_Dry_P Parameter: Plant Line Value: WS
  misc_feature: MA Experiment 20001558 PARAMETER Experiment Name: At_Drought_Soil_Dry_P Parameter: Post Timepoint (hr) Value: 6
  misc_feature: MA Experiment 20001558 PARAMETER Experiment Name: At_Drought_Soil_Dry_P Parameter: Post-Treatment Value: Re-Water vs. No Drought
  misc_feature: MA Experiment 20001558 PARAMETER Experiment Name: At_Drought_Soil_Dry_P Parameter: Timepoint (day) Value: 13
  misc_feature: MA Experiment 20001558 PARAMETER Experiment Name: At_Drought_Soil_Dry_P Parameter: Treatment Value: Drought vs. No Drought
  misc_feature: MA Experiment ID: 20001773 Result: Up-regulated in Transcription
  misc_feature: MA Experiment 20001773 PARAMETER Experiment Name: At_Far-red-enriched-adult_P Parameter: Age (day) Value: 30
  misc_feature: MA Experiment 20001773 PARAMETER Experiment Name: At_Far-red-enriched-adult_P Parameter: Light Value: Far-red enriched vs. White
  misc_feature: MA Experiment 20001773 PARAMETER Experiment Name: At_Far-red-enriched-adult_P Parameter: Organism Value: A. thaliana
  misc_feature: MA Experiment 20001773 PARAMETER Experiment Name: At_Far-red-enriched-adult_P Parameter: Plant Line Value: Columbia
  misc_feature: MA Experiment 20001773 PARAMETER Experiment Name: At_Far-red-enriched-adult_P Parameter: Timepoint (hr) Value: 48
  misc_feature: MA Experiment 20001773 PARAMETER Experiment Name: At_Far-red-enriched-adult_P Parameter: Tissue Value: Aerial
  misc_feature: MA Experiment ID: 20001904 Result: Up-regulated in Transcription
  misc_feature: MA Experiment 20001904 PARAMETER Experiment Name: At_Drought_Reproduction_P Parameter: Age (day) Value: 37
  misc_feature: MA Experiment 20001904 PARAMETER Experiment Name: At_Drought_Reproduction_P Parameter: Organism Value: A. thaliana
  misc_feature: MA Experiment 20001904 PARAMETER Experiment Name: At_Drought_Reproduction_P Parameter: Plant Line Value: WS
  misc_feature: MA Experiment 20001904 PARAMETER Experiment Name: At_Drought_Reproduction_P Parameter: Timepoint (day) Value: 7
  misc_feature: MA Experiment 20001904 PARAMETER Experiment Name: At_Drought_Reproduction_P Parameter: Tissue Value: Rosettes
  misc_feature: MA Experiment 20001904 PARAMETER Experiment Name: At_Drought_Reproduction_P Parameter: Treatment Value: Drought vs. No Drought
  misc_feature: MA Experiment ID: 20001905 Result: Up-regulated in Transcription
  misc_feature: MA Experiment 20001905 PARAMETER Experiment Name: At_Drought_Reproduction_P Parameter: Age (day) Value: 40
  misc_feature: MA Experiment 20001905 PARAMETER Experiment Name: At_Drought_Reproduction_P Parameter: Organism Value: A. thaliana
  misc_feature: MA Experiment 20001905 PARAMETER Experiment Name: At_Drought_Reproduction_P Parameter: Plant Line Value: WS
  misc_feature: MA Experiment 20001905 PARAMETER Experiment Name: At_Drought_Reproduction_P Parameter: Timepoint (day) Value: 10
  misc_feature: MA Experiment 20001905 PARAMETER Experiment Name: At_Drought_Reproduction_P Parameter: Tissue Value: Rosettes
  misc_feature: MA Experiment 20001905 PARAMETER Experiment Name: At_Drought_Reproduction_P Parameter: Treatment Value: Drought vs. No Drought
  misc_feature: MA Experiment ID: 20001906 Result: Down-regulated in Transcription
  misc_feature: MA Experiment 20001906 PARAMETER Experiment Name: At_Drought_Reproduction_P Parameter: Age (day) Value: 35
  misc_feature: MA Experiment 20001906 PARAMETER Experiment Name: At_Drought_Reproduction_P Parameter: Organism Value: A. thaliana
  misc_feature: MA Experiment 20001906 PARAMETER Experiment Name: At_Drought_Reproduction_P Parameter: Plant Line Value: WS
  misc_feature: MA Experiment 20001906 PARAMETER Experiment Name: At_Drought_Reproduction_P Parameter: Timepoint (day) Value: 5
  misc_feature: MA Experiment 20001906 PARAMETER Experiment Name: At_Drought_Reproduction_P Parameter: Tissue Value: Siliques
  misc_feature: MA Experiment 20001906 PARAMETER Experiment Name: At_Drought_Reproduction_P Parameter: Treatment Value: Drought vs. No Drought
  misc_feature: MA Experiment ID: 20001908 Result: Down-regulated in Transcription
  misc_feature: MA Experiment 20001908 PARAMETER Experiment Name: At_Drought_Reproduction_P Parameter: Age (day) Value: 40
  misc_feature: MA Experiment 20001908 PARAMETER Experiment Name: At_Drought_Reproduction_P Parameter: Organism Value: A. thaliana
  misc_feature: MA Experiment 20001908 PARAMETER Experiment Name: At_Drought_Reproduction_P Parameter: Plant Line Value: WS
  misc_feature: MA Experiment 20001908 PARAMETER Experiment Name: At_Drought_Reproduction_P Parameter: Timepoint (day) Value: 10
  misc_feature: MA Experiment 20001908 PARAMETER Experiment Name: At_Drought_Reproduction_P Parameter: Tissue Value: Siliques
  misc_feature: MA Experiment 20001908 PARAMETER Experiment Name: At_Drought_Reproduction_P Parameter: Treatment Value: Drought vs. No Drought
atggagttgtctattggaaacccggcggttaaatactctgctattgttgataccggaagtgaccttatttggactcaatgcaagccttgcactgaatgttttgatcaaccaactccgatttttgacccggagaaatcttcctcttactcgaaagtaggatgctcttctggtctttgtaacgcattgcctcgatcaaactgtaacgaagataaagatgcttgtgagtatttgtatacttatggagattactcatctacaagagggctcttggccacggaaacgttcactttcgaggacgagaactcgatttctggtatcgggtttgggtgtggggttgagaacgaaggcgacgggttctctcaagggtcaggtcttgtaggtcttggtcgcggaccgctctcgcttatttctcagctcaaagagactaagttttcttattgcttgacctcgattgaggatagtgaagcatctagctcgttgtttattggatctttagcctcgggtatcgtcaacaaaacaggtgcaagtttagatggtgaagtcaccaaaacgatgtctttgctacgaaatccagatcagccttcgttctattaccttgagttacaaggcatcaccgttggagcaaaacgcctttctgttgaaaagtctacttttgaactagccgaagatggaaccggaggtatgatcatagactcaggcacgaccatcacgtatctcgaggagaccgcgtttaaagtgttgaaagaggagtttacttctcggatgagtttaccagtagatgactctggatccacgggacttgacttgtgcttcaagttacctgatgctgccaagaatattgctgttcctaagatgatttttcattttaaaggtgctgatttggagcttcccggagagaactacatggtggcggattcaagcaccggcgttttgtgtttggccatgggaagttctaatgggatgtctattttcggaaatgttcaacagcagaattttaatgtacttcatgatcttgagaaagaaacggtgtcgtttgttcccactgaatgtggaaaattgtag

SEQ ID NO: 91535 - protein, 353 aa, Arabidopsis thaliana
  peptide (1)..(353): Ceres Seq. ID no. 12728164
  misc_feature (1)..(348): Pfam Name: Eukaryotic aspartyl protease Pfam Description: Eukaryotic aspartyl protease
  misc_feature (1)..(353): Homolog of NCBI NO: 20197342 NR Description: putative chloroplast nucleoid DNA binding protein
  misc_feature (1)..(353): Homolog of NCBI NO: 30678047 NR Description: chloroplast nucleoid DNA binding protein -related
  misc_feature (1)..(353): Homolog of NCBI NO: 38344829 NR Description: OSJNBa0064H22.10 [Oryza sativa (japonica
  misc_feature (1)..(353): Homolog of NCBI NO: 34898756 NR Description: OJ1131_E05.2 [Oryza sativa (japonica
  misc_feature (1)..(353): Homolog of NCBI NO: 34898762 NR Description: OJ1131_E05.5 [Oryza sativa (japonica
  misc_feature (3)..(350): Homolog of NCBI NO: 34895664 NR Description: nucleoid DNA-binding protein cnd41-like protein
  misc_feature (3)..(350): Homolog of NCBI NO: 15223368 NR Description: chloroplast nucleoid DNA binding protein, protein id: At1g01300.1, supported by cDNA: 7567. [Arabidopsis
  misc_feature (3)..(350): Homolog of NCBI NO: 21594980 NR Description: chloroplast nucleoid DNA binding protein,
  misc_feature (1)..(353): Homolog of NCBI NO: 15242803 NR Description: putative protein; protein id: At5g33340.1
  misc_feature (1)..(353): Homolog of NCBI NO: 15217764 NR Description: hypothetical protein; protein id: At1g64830.1
MELSIGNPAVKYSAIVDTGSDLIWTQCKPCTECFDQPTPIFDPEKSSSYSKVGCSSGLCNALPRSNCNEDKDACEYLYTYGDYSSTRGLLATETFTFEDENSISGIGFGCGVENEGDGFSQGSGLVGLGRGPLSLISQLKETKFSYCLTSIEDSEASSSLFIGSLASGIVNKTGASLDGEVTKTMSLLRNPDQPSFYYLELQGITVGAKRLSVEKSTFELAEDGTGGMIIDSGTTITYLEETAFKVLKEEFTSRMSLPVDDSGSTGLDLCFKLPDAAKNIAVPKMIFHFKGADLELPGENYMVADSSTGVLCLAMGSSNGMSIFGNVQQQNFNVLHDLEKETVSFVPTECGKL

SEQ ID NO: 91536 - DNA, 1870 bp, Arabidopsis thaliana
  misc_feature (1)..(1870): Ceres Seq. ID no. 12728176
  misc_feature: MA Experiment ID: 20000171 Result: Down-regulated in Transcription
  misc_feature: MA Experiment 20000171 PARAMETER Experiment Name: At_42deg_Heat_P Parameter: Age (day) Value: 14
  misc_feature: MA Experiment 20000171 PARAMETER Experiment Name: At_42deg_Heat_P Parameter: Organism Value: A. thaliana
  misc_feature: MA Experiment 20000171 PARAMETER Experiment Name: At_42deg_Heat_P Parameter: Plant Line Value: WS
  misc_feature: MA Experiment 20000171 PARAMETER Experiment Name: At_42deg_Heat_P Parameter: Temperature (deg C) Value: 42 vs. 22
  misc_feature: MA Experiment 20000171 PARAMETER Experiment Name: At_42deg_Heat_P Parameter: Timepoint (hr) Value: 1
  misc_feature: MA Experiment 20000171 PARAMETER Experiment Name: At_42deg_Heat_P Parameter: Tissue Value: Aerial
  misc_feature: MA Experiment ID: 20000173 Result: Down-regulated in Transcription
  misc_feature: MA Experiment 20000173 PARAMETER Experiment Name: At_42deg_Heat_P Parameter: Age (day) Value: 14
  misc_feature: MA Experiment 20000173 PARAMETER Experiment Name: At_42deg_Heat_P Parameter: Organism Value: A. thaliana
  misc_feature: MA Experiment 20000173 PARAMETER Experiment Name: At_42deg_Heat_P Parameter: Plant Line Value: WS
  misc_feature: MA Experiment 20000173 PARAMETER Experiment Name: At_42deg_Heat_P Parameter: Temperature (deg C) Value: 42 vs. 22
  misc_feature: MA Experiment 20000173 PARAMETER Experiment Name: At_42deg_Heat_P Parameter: Timepoint (hr) Value: 6
  misc_feature: MA Experiment 20000173 PARAMETER Experiment Name: At_42deg_Heat_P Parameter: Tissue Value: Aerial
  misc_feature: MA Experiment ID: 20000184 Result: Down-regulated in Transcription
  misc_feature: MA Experiment 20000184 PARAMETER Experiment Name: At_Shoots__P Parameter: Age (day) Value: 7
  misc_feature: MA Experiment 20000184 PARAMETER Experiment Name: At_Shoots__P Parameter: Tissue Value: Shoots vs. Whole Plant
  misc_feature: MA Experiment ID: 20001560 Result: Down-regulated in Transcription
  misc_feature: MA Experiment 20001560 PARAMETER Experiment Name: At_Drought_Soil_Dry_P Parameter: Age (day) Value: 28
  misc_feature: MA Experiment 20001560 PARAMETER Experiment Name: At_Drought_Soil_Dry_P Parameter: Organism Value: A. thaliana
  misc_feature: MA Experiment 20001560 PARAMETER Experiment Name: At_Drought_Soil_Dry_P Parameter: Plant Line Value: WS
  misc_feature: MA Experiment 20001560 PARAMETER Experiment Name: At_Drought_Soil_Dry_P Parameter: Post Timepoint (hr) Value: None
  misc_feature: MA Experiment 20001560 PARAMETER Experiment Name: At_Drought_Soil_Dry_P Parameter: Post-Treatment Value: None
  misc_feature: MA Experiment 20001560 PARAMETER Experiment Name: At_Drought_Soil_Dry_P Parameter: Timepoint (day) Value: 14
  misc_feature: MA Experiment 20001560 PARAMETER Experiment Name: At_Drought_Soil_Dry_P Parameter: Treatment Value: Drought vs. No Drought
atggcggagaaggaagaaaaagaaccatcgaagttaaaatcatccaccggagtttcacggccaacgatttcactacctcctcgaccgtttggtgaaatgttttttagcggtggcgttggatttagtcctggaccaatgactctcgtctcaaatttattctctgatcctgatgagttcaagtctttctctcagcttttagctggagctatggcttctccggcggcagctgctgttgccgccgctgctgtggttgctactgctcatcatcagacacctgtgagctctgtcggtgatggcggtggaagcggtggtgatgttgacccgaggtttaagcagagtagaccaacgggattgatgataactcaaccaccggggatgtttactgtaccgccggggttaagtccggctactcttttggattctccgagcttctttggtcttttttcacctcttcagggaacatttggtatgacacatcaacaagctttagcacaagtcactgcacaagcagttcaaggcaataatgttcatatgcagcaatcacaacaatctgaatatccttcttctacacaacaacaacaacaacaacaacaacaagcttcattgactgagattccatcattttcttctgcacctaggtctcagattcgagcctcggttcaagaaacatcgcagggtcagagagagacttcggaaatatctgtctttgagcatcggtcacagcctcaaaatgctgacaaaccagctgatgatggatacaactggcggaaatatgggcagaagcaagtgaaggggagcgattttcctcggagttattacaaatgtacgcatccagcttgtcctgtcaagaagaaagtggagaggtcactcgatggacaagtaacggaaatcatctacaagggtcaacacaatcatgagcttcctcaaaagcgcggtaacaataacgggagttgtaaaagttctgatattgcaaatcagtttcaaacaagtaatagcagtctcaacaagagtaagagggaccaggaaacaagccaagttacaacaacagagcagatgtctgaagcaagtgatagcgaggaggttgggaatgcagagactagtgtgggagaaagacatgaggatgagcctgatcccaagcgaagaaatacagaagttcgggtttcagaaccagttgcttcatcgcatagaactgtgacagagcctaggattattgtccaaacgacgagtgaagttgacctcttagatgatggatataggtggcgcaagtatggtcagaaagtagtcaaaggaaatccttatccgaggagctactataagtgtacaacaccagattgcggagtaaggaaacatgtagagagagcagcaactgacccaaaagctgttgtaacaacatatgaaggtaaacataaccatgatgttccagctgctagaaccagcagccatcagttaagaccaaacaatcaacacaacacctcaacggttaacttcaatcatcaacagcctgttgcacgtttaaggcttaaagaagagcaaatcacttgacagagaagaagaatacgacggcgcttgagcttttgtgagtttaatgaatcttctttttggttaatgaacctgtttttgttgcctcaaaacaccacaggtttctctggacagaatctctgatattacagtttcaaaaggtatgttcttttatttcatgttggaatcttctgtgtaatcttaagaagctttaggaggtaatgtaaaaaaccagattcaaagttatgcccttatgtgaattcttttgtacatgggataaacaaaatttacaggtatcctttttgttcttgttgtaataggttacatttgtggatgtatgtttcttttagtc

SEQ ID NO: 91537 - protein, 513 aa, Arabidopsis thaliana
  peptide (1)..(513): Ceres Seq. ID no. 12728177
  misc_feature (414)..(473): Pfam Name: WRKY DNA -binding domain Pfam Description: WRKY DNA -binding domain
  misc_feature (1)..(513): Homolog of NCBI NO: 15227612 NR Description: WRKY family transcription factor; protein id: supported by cDNA: gi_13506736 [Arabidopsis thaliana]
  misc_feature (1)..(513): Homolog of NCBI NO: 15223004 NR Description: WRKY family transcription factor; protein id: supported by cDNA: gi_15010749, supported by cDNA: gi_15991741 thaliana] >gi|20978796|sp|Q9XI90|WRK4_ARATH Probable
  misc_feature (130)..(513): Homolog of NCBI NO: 8778394 NR Description: F16A14.18 [Arabidopsis thaliana]
  misc_feature (1)..(152): Homolog of NCBI NO: 8778394 NR Description: F16A14.18 [Arabidopsis thaliana]
  misc_feature (151)..(513): Homolog of NCBI NO: 30683544 NR Description: WRKY family transcription factor [Arabidopsis
  misc_feature (1)..(119): Homolog of NCBI NO: 30683544 NR Description: WRKY family transcription factor [Arabidopsis
  misc_feature (10)..(513): Homolog of NCBI NO: 25348323 NR Description: DNA-binding protein WRKY2 [imported] - common
  misc_feature (18)..(513): Homolog of NCBI NO: 7484759 NR Description: SP8 binding protein homolog - cucumber
  misc_feature (118)..(482): Homolog of NCBI NO: 14530683 NR Description: WRKY DNA-binding protein [Nicotiana tabacum]
  misc_feature (137)..(435): Homolog of NCBI NO: 30681996 NR Description: disease resistance protein -related [Arabidopsis
MAEKEEKEPSKLKSSTGVSRPTISLPPRPFGEMFFSGGVGFSPGPMTLVSNLFSDPDEFKSFSQLLAGAMASPAAAAVAAAAVVATAHHQTPVSSVGDGGGSGGDVDPRFKQSRPTGLMITQPPGMFTVPPGLSPATLLDSPSFFGLFSPLQGTFGMTHQQALAQVTAQAVQGNNVHMQQSQQSEYPSSTQQQQQQQQQASLTEIPSFSSAPRSQIRASVQETSQGQRETSEISVFEHRSQPQNADKPADDGYNWRKYGQKQVKGSDFPRSYYKCTHPACPVKKKVERSLDGQVTEIIYKGQHNHELPQKRGNNNGSCKSSDIANQFQTSNSSLNKSKRDQETSQVTTTEQMSEASDSEEVGNAETSVGERHEDEPDPKRRNTEVRVSEPVASSHRTVTEPRIIVQTTSEVDLLDDGYRWRKYGQKVVKGNPYPRSYYKCTTPDCGVRKHVERAATDPKAVVTTYEGKHNHDVPAARTSSHQLRPNNQHNTSTVNFNHQQPVARLRLKEEQIT

SEQ ID NO: 91538 - protein, 481 aa, Arabidopsis thaliana
  peptide (1)..(481): Ceres Seq. ID no. 12728178
  misc_feature (382)..(441): Pfam Name: WRKY DNA -binding domain Pfam Description: WRKY DNA -binding domain
  misc_feature (1)..(481): Homolog of NCBI NO: 15227612 NR Description: WRKY family transcription factor; protein id: supported by cDNA: gi_13506736 [Arabidopsis thaliana]
  misc_feature (1)..(481): Homolog of NCBI NO: 15223004 NR Description: WRKY family transcription factor; protein id: supported by cDNA: gi_15010749, supported by cDNA: gi_15991741 thaliana] >gi|20978796|sp|Q9XI90|WRK4_ARATH Probable
  misc_feature (98)..(481): Homolog of NCBI NO: 8778394 NR Description: F16A14.18 [Arabidopsis thaliana]
  misc_feature (1)..(120): Homolog of NCBI NO: 8778394 NR Description: F16A14.18 [Arabidopsis thaliana]
  misc_feature (119)..(481): Homolog of NCBI NO: 30683544 NR Description: WRKY family transcription factor [Arabidopsis
  misc_feature (1)..(87): Homolog of NCBI NO: 30683544 NR Description: WRKY family transcription factor [Arabidopsis
  misc_feature (1)..(481): Homolog of NCBI NO: 25348323 NR Description: DNA-binding protein WRKY2 [imported] - common
  misc_feature (1)..(481): Homolog of NCBI NO: 7484759 NR Description: SP8 binding protein homolog - cucumber
  misc_feature (86)..(450): Homolog of NCBI NO: 14530683 NR Description: WRKY DNA-binding protein [Nicotiana tabacum]
  misc_feature (105)..(403): Homolog of NCBI NO: 30681996 NR Description: disease resistance protein -related [Arabidopsis
MFFSGGVGFSPGPMTLVSNLFSDPDEFKSFSQLLAGAMASPAAAAVAAAAVVATAHHQTPVSSVGDGGGSGGDVDPRFKQSRPTGLMITQPPGMFTVPPGLSPATLLDSPSFFGLFSPLQGTFGMTHQQALAQVTAQAVQGNNVHMQQSQQSEYPSSTQQQQQQQQQASLTEIPSFSSAPRSQIRASVQETSQGQRETSEISVFEHRSQPQNADKPADDGYNWRKYGQKQVKGSDFPRSYYKCTHPACPVKKKVERSLDGQVTEIIYKGQHNHELPQKRGNNNGSCKSSDIANQFQTSNSSLNKSKRDQETSQVTTTEQMSEASDSEEVGNAETSVGERHEDEPDPKRRNTEVRVSEPVASSHRTVTEPRIIVQTTSEVDLLDDGYRWRKYGQKVVKGNPYPRSYYKCTTPDCGVRKHVERAATDPKAVVTTYEGKHNHDVPAARTSSHQLRPNNQHNTSTVNFNHQQPVARLRLKEEQIT

SEQ ID NO: 91539 - protein, 468 aa, Arabidopsis thaliana
  peptide (1)..(468): Ceres Seq. ID no. 12728179
  misc_feature (369)..(428): Pfam Name: WRKY DNA -binding domain Pfam Description: WRKY DNA -binding domain
  misc_feature (1)..(468): Homolog of NCBI NO: 15227612 NR Description: WRKY family transcription factor; protein id: supported by cDNA: gi_13506736 [Arabidopsis thaliana]
  misc_feature (1)..(468): Homolog of NCBI NO: 15223004 NR Description: WRKY family transcription factor; protein id: supported by cDNA: gi_15010749, supported by cDNA: gi_15991741 thaliana] >gi|20978796|sp|Q9XI90|WRK4_ARATH Probable
  misc_feature (85)..(468): Homolog of NCBI NO: 8778394 NR Description: F16A14.18 [Arabidopsis thaliana]
  misc_feature (1)..(107): Homolog of NCBI NO: 8778394 NR Description: F16A14.18 [Arabidopsis thaliana]
  misc_feature (106)..(468): Homolog of NCBI NO: 30683544 NR Description: WRKY family transcription factor [Arabidopsis
  misc_feature (1)..(74): Homolog of NCBI NO: 30683544 NR Description: WRKY family transcription factor [Arabidopsis
  misc_feature (1)..(468): Homolog of NCBI NO: 25348323 NR Description: DNA-binding protein WRKY2 [imported] - common
  misc_feature (1)..(468): Homolog of NCBI NO: 7484759 NR Description: SP8 binding protein homolog - cucumber
  misc_feature (73)..(437): Homolog of NCBI NO: 14530683 NR Description: WRKY DNA-binding protein [Nicotiana tabacum]
  misc_feature (92)..(390): Homolog of NCBI NO: 30681996 NR Description: disease resistance protein -related [Arabidopsis
MTLVSNLFSDPDEFKSFSQLLAGAMASPAAAAVAAAAVVATAHHQTPVSSVGDGGGSGGDVDPRFKQSRPTGLMITQPPGMFTVPPGLSPATLLDSPSFFGLFSPLQGTFGMTHQQALAQVTAQAVQGNNVHMQQSQQSEYPSSTQQQQQQQQQASLTEIPSFSSAPRSQIRASVQETSQGQRETSEISVFEHRSQPQNADKPADDGYNWRKYGQKQVKGSDFPRSYYKCTHPACPVKKKVERSLDGQVTEIIYKGQHNHELPQKRGNNNGSCKSSDIANQFQTSNSSLNKSKRDQETSQVTTTEQMSEASDSEEVGNAETSVGERHEDEPDPKRRNTEVRVSEPVASSHRTVTEPRIIVQTTSEVDLLDDGYRWRKYGQKVVKGNPYPRSYYKCTTPDCGVRKHVERAATDPKAVVTTYEGKHNHDVPAARTSSHQLRPNNQHNTSTVNFNHQQPVARLRLKEEQIT

SEQ ID NO: 91540 - DNA, 2070 bp, Arabidopsis thaliana
  misc_feature (1)..(2070): Ceres Seq. ID no. 12728188
  misc_feature: MA Experiment ID: 20000180 Result: Down-regulated in Transcription
  misc_feature: MA Experiment 20000180 PARAMETER Experiment Name: At_Germinating_Seeds_P Parameter: Age (hr) Value: 24 vs. 0
  misc_feature: MA Experiment 20000180 PARAMETER Experiment Name: At_Germinating_Seeds_P Parameter: Tissue Value: Germinating Seeds
atgctacgctctatcactctttctccgactagaagattcgggtttccaccgagatgcgtctcttttacgactatcaaagaattgattttgactgaagagaatgatgggtcttctctgcattacgccgcttcgagcccgtgctttctccttctaagtaagtgcacgaacattgattctctaaggcaatctcacggagttttaacgggaaatggactcatgggtgatatctcgattgccaccaagctcgttagtctatatggtttctttgggtatactaaagatgcacgcttggtgttcgatcaaattcctgaaccagatttttatttatggaaagtcatgctcagatgttattgcttgaataaagagagtgtagaagtcgtaaagttgtatgatttattgatgaagcatggattcagatatgatgatattgttttctcgaaagctttgaaagcgtgtactgagcttcaggatttagacaatgggaagaagatacattgccagctcgttaaggtgccgagtttcgataatgttgtgttgacaggtcttctagatatgtatgctaagtgtggagaaatcaagagtgctcataaggtgtttaacgatattactttgaggaatgtggtttgttggacttcgatgattgctgggtatgttaagaacgacttgtgcgaagaagggttggttctgtttaatcggatgagggaaaacaatgttttgggtaatgaatatacttacggtactctaataatggcttgtacaaagcttagtgctttacatcaaggaaagtggtttcatggttgtttggttaagagtggtatagagctcagctcatgtttggtgacatctcttctcgatatgtatgttaagtgtggtgacataagcaatgcacgtcgggtgtttaatgagcattctcatgtggatcttgtcatgtggacagctatgattgtggggtatacccataacggaagtgtgaatgaggcgctgagcttgtttcagaaaatgaagggggttgaaatcaagcctaattgtgttaccattgcaagtgtcttatcgggttgcggtctgattgagaatcttgaactgggaagatcagttcatggcctctccatcaaagttggtatttgggatacaaatgttgcaaatgctctggttcacatgtacgccaagtgttaccagaatagagatgctaaatatgtgtttgaaatggagtcagagaaagatatagttgcttggaattctataatttccgggttttcacaaaacggctctatccatgaagctttgtttcttttccatcgcatgaattcagaatctgtgacgcctaatggtgtaacagttgcgagtcttttttcagcctgtgcttcccttgggtctctagctgtaggttcatcacttcatgcctattccgtgaaattgggtttcctggcatcatccagtgttcatgttggtactgcactcctggacttctatgccaaatgtggggatccccaatctgcccgtctcatcttcgatactatagaggagaaaaacacaatcacatggagtgctatgatcggaggctatggaaagcaaggggatacaatagggtcccttgagctatttgaggagatgctgaaaaagcaacaaaaacccaacgaatcaaccttcacatctattttatcagcttgtggccacacagggatggttaatgaagggaagaagtacttcagctcaatgtacaaagattataacttcacgccttcaacaaaacactacacatgtatggttgatatgttagctcgagcaggtgagcttgagcaagccttagatatcatcgaaaagatgccaatccaaccagacgtgagatgtttcggggcatttctacacggatgtggaatgcattcaagatttgatcttggggagattgtgattaagaagatgcttgatttacatcctgatgatgcctcttattatgttctcgtctctaatttgtatgcatcggatggacggtggaatcaggctaaagaagtgagaaatctgatgaagcaaagaggtctgagcaagattgcaggccatagcacaatggaatag

SEQ ID NO: 91541 - protein, 689 aa, Arabidopsis thaliana
  peptide (1)..(689): Ceres Seq. ID no. 12728189
  misc_feature (108)..(142): Pfam Name: PPR repeat Pfam Description: PPR repeat
  misc_feature (46)..(689): Homolog of NCBI NO: 15220337 NR Description: hypothetical protein; protein id: At1g11290.1
  misc_feature (64)..(689): Homolog of NCBI NO: 18409250 NR Description: PPR-repeat protein, putative; protein id: [Arabidopsis thaliana] >gi|12325094|gb|AAG52503.1|AC018364_21
  misc_feature (302)..(689): Homolog of NCBI NO: 21741755 NR Description: OSJNBa0060B20.9 [Oryza sativa (japonica
  misc_feature (77)..(352): Homolog of NCBI NO: 21741755 NR Description: OSJNBa0060B20.9 [Oryza sativa (japonica
  misc_feature (78)..(689): Homolog of NCBI NO: 15233590 NR Description: putative protein; protein id: At4g21300.1
  misc_feature (50)..(689): Homolog of NCBI NO: 15234006 NR Description: putative protein; protein id: At4g18750.1
  misc_feature (61)..(689): Homolog of NCBI NO: 15226737 NR Description: unknown protein; protein id: At2g40720.1
  misc_feature (50)..(689): Homolog of NCBI NO: 18418348 NR Description: putative protein; protein id: At4g33990.1
  misc_feature (62)..(686): Homolog of NCBI NO: 15235115 NR Description: putative protein; protein id: At4g39530.1
  misc_feature (76)..(689): Homolog of NCBI NO: 15218216 NR Description: hypothetical protein; protein id: At1g15510.1
MLRSITLSPTRRFGFPPRCVSFTTIKELILTEENDGSSLHYAASSPCFLLLSKCTNIDSLRQSHGVLTGNGLMGDISIATKLVSLYGFFGYTKDARLVFDQIPEPDFYLWKVMLRCYCLNKESVEVVKLYDLLMKHGFRYDDIVFSKALKACTELQDLDNGKKIHCQLVKVPSFDNVVLTGLLDMYAKCGEIKSAHKVFNDITLRNVVCWTSMIAGYVKNDLCEEGLVLFNRMRENNVLGNEYTYGTLIMACTKLSALHQGKWFHGCLVKSGIELSSCLVTSLLDMYVKCGDISNARRVFNEHSHVDLVMWTAMIVGYTHNGSVNEALSLFQKMKGVEIKPNCVTIASVLSGCGLIENLELGRSVHGLSIKVGIWDTNVANALVHMYAKCYQNRDAKYVFEMESEKDIVAWNSIISGFSQNGSIHEALFLFHRMNSESVTPNGVTVASLFSACASLGSLAVGSSLHAYSVKLGFLASSSVHVGTALLDFYAKCGDPQSARLIFDTIEEKNTITWSAMIGGYGKQGDTIGSLELFEEMLKKQQKPNESTFTSILSACGHTGMVNEGKKYFSSMYKDYNFTPSTKHYTCMVDMLARAGELEQALDIIEKMPIQPDVRCFGAFLHGCGMHSRFDLGEIVIKKMLDLHPDDASYYVLVSNLYASDGRWNQAKEVRNLMKQRGLSKIAGHSTME

SEQ ID NO: 91542 - protein, 617 aa, Arabidopsis thaliana
  peptide (1)..(617): Ceres Seq. ID no. 12728190
  misc_feature (36)..(70): Pfam Name: PPR repeat Pfam Description: PPR repeat
  misc_feature (1)..(617): Homolog of NCBI NO: 15220337 NR Description: hypothetical protein; protein id: At1g11290.1
  misc_feature (1)..(617): Homolog of NCBI NO: 18409250 NR Description: PPR-repeat protein, putative; protein id: [Arabidopsis thaliana] >gi|12325094|gb|AAG52503.1|AC018364_21
  misc_feature (230)..(617): Homolog of NCBI NO: 21741755 NR Description: OSJNBa0060B20.9 [Oryza sativa (japonica
  misc_feature (5)..(280): Homolog of NCBI NO: 21741755 NR Description: OSJNBa0060B20.9 [Oryza sativa (japonica
  misc_feature (6)..(617): Homolog of NCBI NO: 15233590 NR Description: putative protein; protein id: At4g21300.1
  misc_feature (1)..(617): Homolog of NCBI NO: 15234006 NR Description: putative protein; protein id: At4g18750.1
  misc_feature (1)..(617): Homolog of NCBI NO: 15226737 NR Description: unknown protein; protein id: At2g40720.1
  misc_feature (1)..(617): Homolog of NCBI NO: 18418348 NR Description: putative protein; protein id: At4g33990.1
  misc_feature (1)..(614): Homolog of NCBI NO: 15235115 NR Description: putative protein; protein id: At4g39530.1
  misc_feature (4)..(617): Homolog of NCBI NO: 15218216 NR Description: hypothetical protein; protein id: At1g15510.1
MGDISIATKLVSLYGFFGYTKDARLVFDQIPEPDFYLWKVMLRCYCLNKESVEVVKLYDLLMKHGFRYDDIVFSKALKACTELQDLDNGKKIHCQLVKVPSFDNVVLTGLLDMYAKCGEIKSAHKVFNDITLRNVVCWTSMIAGYVKNDLCEEGLVLFNRMRENNVLGNEYTYGTLIMACTKLSALHQGKWFHGCLVKSGIELSSCLVTSLLDMYVKCGDISNARRVFNEHSHVDLVMWTAMIVGYTHNGSVNEALSLFQKMKGVEIKPNCVTIASVLSGCGLIENLELGRSVHGLSIKVGIWDTNVANALVHMYAKCYQNRDAKYVFEMESEKDIVAWNSIISGFSQNGSIHEALFLFHRMNSESVTPNGVTVASLFSACASLGSLAVGSSLHAYSVKLGFLASSSVHVGTALLDFYAKCGDPQSARLIFDTIEEKNTITWSAMIGGYGKQGDTIGSLELFEEMLKKQQKPNESTFTSILSACGHTGMVNEGKKYFSSMYKDYNFTPSTKHYTCMVDMLARAGELEQALDIIEKMPIQPDVRCFGAFLHGCGMHSRFDLGEIVIKKMLDLHPDDASYYVLVSNLYASDGRWNQAKEVRNLMKQRGLSKIAGHSTME

SEQ ID NO: 91543 - protein, 577 aa, Arabidopsis thaliana
  peptide (1)..(577): Ceres Seq. ID no. 12728191
  misc_feature (1)..(30): Pfam Name: PPR repeat Pfam Description: PPR repeat
  misc_feature (1)..(577): Homolog of NCBI NO: 15220337 NR Description: hypothetical protein; protein id: At1g11290.1
  misc_feature (1)..(577): Homolog of NCBI NO: 18409250 NR Description: PPR-repeat protein, putative; protein id: [Arabidopsis thaliana] >gi|12325094|gb|AAG52503.1|AC018364_21
  misc_feature (190)..(577): Homolog of NCBI NO: 21741755 NR Description: OSJNBa0060B20.9 [Oryza sativa (japonica
  misc_feature (1)..(240): Homolog of NCBI NO: 21741755 NR Description: OSJNBa0060B20.9 [Oryza sativa (japonica
  misc_feature (1)..(577): Homolog of NCBI NO: 15233590 NR Description: putative protein; protein id: At4g21300.1
  misc_feature (1)..(577): Homolog of NCBI NO: 15234006 NR Description: putative protein; protein id: At4g18750.1
  misc_feature (1)..(577): Homolog of NCBI NO: 15226737 NR Description: unknown protein; protein id: At2g40720.1
  misc_feature (1)..(577): Homolog of NCBI NO: 18418348 NR Description: putative protein; protein id: At4g33990.1
  misc_feature (1)..(574): Homolog of NCBI NO: 15235115 NR Description: putative protein; protein id: At4g39530.1
  misc_feature (1)..(577): Homolog of NCBI NO: 15218216 NR Description: hypothetical protein; protein id: At1g15510.1
MLRCYCLNKESVEVVKLYDLLMKHGFRYDDIVFSKALKACTELQDLDNGKKIHCQLVKVPSFDNVVLTGLLDMYAKCGEIKSAHKVFNDITLRNVVCWTSMIAGYVKNDLCEEGLVLFNRMRENNVLGNEYTYGTLIMACTKLSALHQGKWFHGCLVKSGIELSSCLVTSLLDMYVKCGDISNARRVFNEHSHVDLVMWTAMIVGYTHNGSVNEALSLFQKMKGVEIKPNCVTIASVLSGCGLIENLELGRSVHGLSIKVGIWDTNVANALVHMYAKCYQNRDAKYVFEMESEKDIVAWNSIISGFSQNGSIHEALFLFHRMNSESVTPNGVTVASLFSACASLGSLAVGSSLHAYSVKLGFLASSSVHVGTALLDFYAKCGDPQSARLIFDTIEEKNTITWSAMIGGYGKQGDTIGSLELFEEMLKKQQKPNESTFTSILSACGHTGMVNEGKKYFSSMYKDYNFTPSTKHYTCMVDMLARAGELEQALDIIEKMPIQPDVRCFGAFLHGCGMHSRFDLGEIVIKKMLDLHPDDASYYVLVSNLYASDGRWNQAKEVRNLMKQRGLSKIAGHSTME

SEQ ID NO: 91544 - DNA, 507 bp, Arabidopsis thaliana
  misc_feature (1)..(507): Ceres Seq. ID no. 12728204
  misc_feature: MA Experiment ID: 20000234 Result: Up-regulated in Transcription
  misc_feature: MA Experiment 20000234 PARAMETER Experiment Name: At_Siliques_P Parameter: Age (day) Value: 21
  misc_feature: MA Experiment 20000234 PARAMETER Experiment Name: At_Siliques_P Parameter: Organism Value: A. thaliana
  misc_feature: MA Experiment 20000234 PARAMETER Experiment Name: At_Siliques_P Parameter: Plant Line Value: WS
  misc_feature: MA Experiment 20000234 PARAMETER Experiment Name: At_Siliques_P Parameter: Tissue Value: Less Than 5mm Siliques vs. Whole Plant
  misc_feature: MA Experiment ID: 20000235 Result: Up-regulated in Transcription
  misc_feature: MA Experiment 20000235 PARAMETER Experiment Name: At_Siliques_P Parameter: Age (day) Value: 21
  misc_feature: MA Experiment 20000235 PARAMETER Experiment Name: At_Siliques_P Parameter: Organism Value: A. thaliana
  misc_feature: MA Experiment 20000235 PARAMETER Experiment Name: At_Siliques_P Parameter: Plant Line Value: WS
  misc_feature: MA Experiment 20000235 PARAMETER Experiment Name: At_Siliques_P Parameter: Tissue Value: 5-10mm Siliques vs. Whole Plant
atgagattgcttcttagtctcttgtttctcttggctttaaccacctactcaagtgcaacttattgtctatgtagagatggtgttggagagaaagatcttcaaacatcgatagattatgcatgtggagttttaaaagattgtaatcctattcatgagaaaggtccttgttatcaaccaaacaccatcaagagtcattgtgattgggcggttaatacttatttccaaagatttggtcaaatctctggaagctgtaatttctcaggaactgctactaccagccaaaatcttccttcaactgtggttactggttgcttatatccttcaagtccaggaagtgcagggacaactcccacgacaggtactccttcaggaacacagacgtttccgggacctcctgcgtttggtccggccggagattttgatccttcaggcaataatggtgctccgagtttgttcatttcaatcgctctctcacttggtttctccgtcgtcattgcgtttctataa

SEQ ID NO: 91545 - protein, 168 aa, Arabidopsis thaliana
  peptide (1)..(168): Ceres Seq. ID no. 12728205
  misc_feature (1)..(168): Homolog of NCBI NO: 22325443 NR Description: similar to glycosyl hydrolase family 17; protein
  misc_feature (1)..(164): Homolog of NCBI NO: 30683485 NR Description: expressed protein [Arabidopsis thaliana] unknown protein [Arabidopsis thaliana]
  misc_feature (12)..(164): Homolog of NCBI NO: 8778409 NR Description: F16A14.5 [Arabidopsis thaliana]
  misc_feature (1)..(146): Homolog of NCBI NO: 18394637 NR Description: glycosyl hydrolase family 17; protein id: supported by cDNA: 32195. [Arabidopsis thaliana]
  misc_feature (3)..(147): Homolog of NCBI NO: 30697478 NR Description: glycosyl hydrolase family 17 [Arabidopsis >gi|9759459|dbj|BAB10375.1| to unknown protein [Arabidopsis thaliana]
  misc_feature (1)..(150): Homolog of NCBI NO: 18409239 NR Description: unknown protein; protein id: At1g69295.1, by cDNA: 16467., supported by cDNA: gi_13877780, supported by gi_15724275, supported by cDNA: gi_15912196, supported by cDNA:
  misc_feature (1)..(150): Homolog of NCBI NO: 21553768 NR Description: unknown [Arabidopsis thaliana]
  misc_feature (3)..(150): Homolog of NCBI NO: 21592859 NR Description: unknown [Arabidopsis thaliana]
  misc_feature (3)..(150): Homolog of NCBI NO: 15241485 NR Description: glycosyl hydrolase family 17; protein id: supported by cDNA: 33347. [Arabidopsis thaliana]
  misc_feature (1)..(150): Homolog of NCBI NO: 25404810 NR Description: unknown protein, 45065-49536 [imported] -
MRLLLSLLFLLALTTYSSATYCLCRDGVGEKDLQTSIDYACGVLKDCNPIHEKGPCYQPNTIKSHCDWAVNTYFQRFGQISGSCNFSGTATTSQNLPSTVVTGCLYPSSPGSAGTTPTTGTPSGTQTFPGPPAFGPAGDFDPSGNNGAPSLFISIALSLGFSVVIAFL

SEQ ID NO: 91546 - protein, 118 aa, Arabidopsis thaliana
  peptide (1)..(118): Ceres Seq. ID no. 12728206
MRKVLVINQTPSRVIVIGRLILISKDLVKSLEAVISQELLLPAKIFLQLWLLVAYILQVQEVQGQLPRQVLLQEHRRFRDLLRLVRPEILILQAIMVLRVCSFQSLSHLVSPSSLRFY

SEQ ID NO: 91547 - DNA, 1336 bp, Arabidopsis thaliana
  misc_feature (1)..(1336): Ceres Seq. ID no. 12728215
  misc_feature: MA Experiment ID: 20000184 Result: Down-regulated in Transcription
  misc_feature: MA Experiment 20000184 PARAMETER Experiment Name: At_Shoots__P Parameter: Age (day) Value: 7
  misc_feature: MA Experiment 20000184 PARAMETER Experiment Name: At_Shoots__P Parameter: Tissue Value: Shoots vs. Whole Plant
  misc_feature: MA Experiment ID: 20000185 Result: Down-regulated in Transcription
  misc_feature: MA Experiment 20000185 PARAMETER Experiment Name: At_Roots__P Parameter: Age (day) Value: 7 vs. 21
  misc_feature: MA Experiment 20000185 PARAMETER Experiment Name: At_Roots__P Parameter: Organism Value: A. thaliana
  misc_feature: MA Experiment 20000185 PARAMETER Experiment Name: At_Roots__P Parameter: Tissue Value: Roots vs. Whole Plant
  misc_feature: MA Experiment ID: 20000286 Result: Down-regulated in Transcription
  misc_feature: MA Experiment 20000286 PARAMETER Experiment Name: At_Open_Flower_P Parameter: Age (day) Value: 21
  misc_feature: MA Experiment 20000286 PARAMETER Experiment Name: At_Open_Flower_P Parameter: Plant Line Value: WS
  misc_feature: MA Experiment 20000286 PARAMETER Experiment Name: At_Open_Flower_P Parameter: Tissue Value: Half Open vs. Whole Plant
  misc_feature: MA Experiment ID: 20000439 Result: Down-regulated in Transcription
  misc_feature: MA Experiment 20000439 PARAMETER Experiment Name: At_Roots__P Parameter: Age (day) Value: 14 vs. 21
  misc_feature: MA Experiment 20000439 PARAMETER Experiment Name: At_Roots__P Parameter: Organism Value: A. thaliana
  misc_feature: MA Experiment 20000439 PARAMETER Experiment Name: At_Roots__P Parameter: Tissue Value: Roots vs. Whole Plant
  misc_feature: MA Experiment ID: 20000573 Result: Down-regulated in Transcription
  misc_feature: MA Experiment 20000573 PARAMETER Experiment Name: At_100uM_ABA_Mutants__P Parameter: Organism Value: A. thaliana
  misc_feature: MA Experiment 20000573 PARAMETER Experiment Name: At_100uM_ABA_Mutants__P Parameter: Plant Line Value: CS22 vs. Ler wt
  misc_feature: MA Experiment 20000573 PARAMETER Experiment Name: At_100uM_ABA_Mutants__P Parameter: Timepoint (hr) Value: N/A
  misc_feature: MA Experiment 20000573 PARAMETER Experiment Name: At_100uM_ABA_Mutants__P Parameter: Tissue Value: Whole Plant
  misc_feature: MA Experiment 20000573 PARAMETER Experiment Name: At_100uM_ABA_Mutants__P Parameter: Treatment Value: None
  misc_feature: MA Experiment ID: 20000574 Result: Down-regulated in Transcription
  misc_feature: MA Experiment 20000574 PARAMETER Experiment Name: At_100uM_ABA_Mutants__P Parameter: Organism Value: A. thaliana
  misc_feature: MA Experiment 20000574 PARAMETER Experiment Name: At_100uM_ABA_Mutants__P Parameter: Plant Line Value: CS23 vs. Ler wt
  misc_feature: MA Experiment 20000574 PARAMETER Experiment Name: At_100uM_ABA_Mutants__P Parameter: Timepoint (hr) Value: N/A
  misc_feature: MA Experiment 20000574 PARAMETER Experiment Name: At_100uM_ABA_Mutants__P Parameter: Tissue Value: Whole Plant
  misc_feature: MA Experiment 20000574 PARAMETER Experiment Name: At_100uM_ABA_Mutants__P Parameter: Treatment Value: None
  misc_feature: MA Experiment ID: 20000794 Result: Down-regulated in Transcription
  misc_feature: MA Experiment 20000794 PARAMETER Experiment Name: At_Petals_P Parameter: Age (day) Value: 23-25 days
  misc_feature: MA Experiment 20000794 PARAMETER Experiment Name: At_Petals_P Parameter: Plant Line Value: WS
  misc_feature: MA Experiment 20000794 PARAMETER Experiment Name: At_Petals_P Parameter: Tissue Value: Petals vs. Whole plant
  misc_feature: MA Experiment ID: 20001554 Result: Up-regulated in Transcription
  misc_feature: MA Experiment 20001554 PARAMETER Experiment Name: At_Drought_Soil_Dry_P Parameter: Age (day) Value: 21
  misc_feature: MA Experiment 20001554 PARAMETER Experiment Name: At_Drought_Soil_Dry_P Parameter: Organism Value: A. thaliana
  misc_feature: MA Experiment 20001554 PARAMETER Experiment Name: At_Drought_Soil_Dry_P Parameter: Plant Line Value: WS
  misc_feature: MA Experiment 20001554 PARAMETER Experiment Name: At_Drought_Soil_Dry_P Parameter: Post Timepoint (hr) Value: None
  misc_feature: MA Experiment 20001554 PARAMETER Experiment Name: At_Drought_Soil_Dry_P Parameter: Post-Treatment Value: None
  misc_feature: MA Experiment 20001554 PARAMETER Experiment Name: At_Drought_Soil_Dry_P Parameter: Timepoint (day) Value: 7
  misc_feature: MA Experiment 20001554 PARAMETER Experiment Name: At_Drought_Soil_Dry_P Parameter: Treatment Value: Drought vs. No Drought
  misc_feature: MA Experiment ID: 20001555 Result: Up-regulated in Transcription
  misc_feature: MA Experiment 20001555 PARAMETER Experiment Name: At_Drought_Soil_Dry_P Parameter: Age (day) Value: 24
  misc_feature: MA Experiment 20001555 PARAMETER Experiment Name: At_Drought_Soil_Dry_P Parameter: Organism Value: A. thaliana
  misc_feature: MA Experiment 20001555 PARAMETER Experiment Name: At_Drought_Soil_Dry_P Parameter: Plant Line Value: WS
  misc_feature: MA Experiment 20001555 PARAMETER Experiment Name: At_Drought_Soil_Dry_P Parameter: Post Timepoint (hr) Value: None
  misc_feature: MA Experiment 20001555 PARAMETER Experiment Name: At_Drought_Soil_Dry_P Parameter: Post-Treatment Value: None
  misc_feature: MA Experiment 20001555 PARAMETER Experiment Name: At_Drought_Soil_Dry_P Parameter: Timepoint (day) Value: 10
  misc_feature: MA Experiment 20001555 PARAMETER Experiment Name: At_Drought_Soil_Dry_P Parameter: Treatment Value: Drought vs. No Drought
agaatggcttagcatctctgcaaaaccaacacaaagctatattctcttaaaaatcagttcaacaaaagaagaacctgaacacagttggcccaccaccaccactaccacaatctcctcctccaccaccaccacctagtcaccggaaaccaattcatgccctagattaagaaccagaatccttttgagacaagatctatatatacactctacacatttacttatacactttatctagatatagatgtgtgtgtgtataaaggttctttttcattacttgttggtttagtgataaaaaggaggagagttttcagttgggttttggtttcttggtgagagaagagagaaaaagagaggatgggaagagggaaagttgagctgaagaggatagagaacaagatcaatagacaagttacttttgcaaagagaagaaatggtttgctcaagaaggcttatgagctttctgtcctttgtgatgctgagattgctcttctcattttctctaaccgtggcaagctctacgaattctgcagcagccctagtggtatggcgaggacggttgataagtatagaaaacatagttatgcaacaatggatccaaatcaatcagctaaagacttgcaggataagtatcaagactacttgaagcttaaatcaagagttgagatccttcaacattcacaaaggcatttgctaggtgaagagctatccgagatggatgtgaatgagcttgagcatctcgaacgccaagtagatgcatcactaagacaaataagatctaccaaggctcggtctatgcttgatcaactatctgacctcaaaactaaggaggaaatgttattggaaaccaatagagatcttaggagaaagttggaggacagtgatgcagcacttactcaatcgttttggggaagttctgctgcagaacaacaacaacaacatcaacaacagcaacaaggcatgagctcttatcaatcaaaccctccaattcaggaagcaggtttcttcaagcctctacaaggcaatgtagcattgcaaatgagcagtcattacaatcacaatcctgcaaatgcaaccaactctgcaacaacatcacagaatgttaatggattcttccctggatggatggtctgaaaacaatacatatctatatatgtacacatatgtgtgttttatagatcaaagatcattgcttgtgtcatttgatttttgccagagaaacatagttcattattacaaaactttgttatataatcaaggctctaatgtcaaacaccagattattacttttttgttctttgttttttggctctcttgaaatataaaatattgttttggg

SEQ ID NO: 91548 - protein, 258 aa, Arabidopsis thaliana
  peptide (1)..(258): Ceres Seq. ID no. 12728216
  misc_feature (76)..(174): Pfam Name: K-box region Pfam Description: K-box region
  misc_feature (1)..(258): Homolog of NCBI NO: 15227694 NR Description: MADS-box protein (AGL3); protein id: At2g03710.1, by cDNA: gi_1737494 [Arabidopsis thaliana]
  misc_feature (1)..(258): Homolog of NCBI NO: 30678072 NR Description: MADS-box protein (AGL3) [Arabidopsis thaliana]
  misc_feature (1)..(258): Homolog of NCBI NO: 23304686 NR Description: MADS-box protein AGL3-a [Brassica oleracea var.
  misc_feature (1)..(172): Homolog of NCBI NO: 32402422 NR Description: MADS-box protein AGL3-II [Arabidopsis thaliana]
  misc_feature (1)..(258): Homolog of NCBI NO: 13384050 NR Description: MADS-box transcription factor FBP9 [Petunia x
  misc_feature (1)..(258): Homolog of NCBI NO: 8567991 NR Description: MADS-box protein MADS4 [Nicotiana tabacum]
  misc_feature (1)..(258): Homolog of NCBI NO: 6651033 NR Description: MADS box transcription factor MADS1 [Capsicum
  misc_feature (1)..(258): Homolog of NCBI NO: 13384060 NR Description: MADS-box transcription factor FBP23 [Petunia x
  misc_feature (1)..(258): Homolog of NCBI NO: 7446512 NR Description: MADS box protein DEFH49 - garden snapdragon
  misc_feature (1)..(258): Homolog of NCBI NO: 7488622 NR Description: MADS box protein 1 - apple tree
MGRGKVELKRIENKINRQVTFAKRRNGLLKKAYELSVLCDAEIALLIFSNRGKLYEFCSSPSGMARTVDKYRKHSYATMDPNQSAKDLQDKYQDYLKLKSRVEILQHSQRHLLGEELSEMDVNELEHLERQVDASLRQIRSTKARSMLDQLSDLKTKEEMLLETNRDLRRKLEDSDAALTQSFWGSSAAEQQQQHQQQQQGMSSYQSNPPIQEAGFFKPLQGNVALQMSSHYNHNPANATNSATTSQNVNGFFPGWMV

SEQ ID NO: 91549 - protein, 195 aa, Arabidopsis thaliana
  peptide (1)..(195): Ceres Seq. ID no. 12728217
  misc_feature (13)..(111): Pfam Name: K-box region Pfam Description: K-box region
  misc_feature (1)..(195): Homolog of NCBI NO: 15227694 NR Description: MADS-box protein (AGL3); protein id: At2g03710.1, by cDNA: gi_1737494 [Arabidopsis thaliana]
  misc_feature (1)..(195): Homolog of NCBI NO: 30678072 NR Description: MADS-box protein (AGL3) [Arabidopsis thaliana]
  misc_feature (1)..(195): Homolog of NCBI NO: 23304686 NR Description: MADS-box protein AGL3-a [Brassica oleracea var.
  misc_feature (1)..(109): Homolog of NCBI NO: 32402422 NR Description: MADS-box protein AGL3-II [Arabidopsis thaliana]
  misc_feature (1)..(195): Homolog of NCBI NO: 13384050 NR Description: MADS-box transcription factor FBP9 [Petunia x
  misc_feature (1)..(195): Homolog of NCBI NO: 8567991 NR Description: MADS-box protein MADS4 [Nicotiana tabacum]
  misc_feature (1)..(195): Homolog of NCBI NO: 6651033 NR Description: MADS box transcription factor MADS1 [Capsicum
  misc_feature (1)..(195): Homolog of NCBI NO: 13384060 NR Description: MADS-box transcription factor FBP23 [Petunia x
  misc_feature (1)..(195): Homolog of NCBI NO: 7446512 NR Description: MADS box protein DEFH49 - garden snapdragon
  misc_feature (1)..(195): Homolog of NCBI NO: 7488622 NR Description: MADS box protein 1 - apple tree
MARTVDKYRKHSYATMDPNQSAKDLQDKYQDYLKLKSRVEILQHSQRHLLGEELSEMDVNELEHLERQVDASLRQIRSTKARSMLDQLSDLKTKEEMLLETNRDLRRKLEDSDAALTQSFWGSSAAEQQQQHQQQQQGMSSYQSNPPIQEAGFFKPLQGNVALQMSSHYNHNPANATNSATTSQNVNGFFPGWMV

SEQ ID NO: 91550 - protein, 180 aa, Arabidopsis thaliana
  peptide (1)..(180): Ceres Seq. ID no. 12728218
  misc_feature (1)..(96): Pfam Name: K-box region Pfam Description: K-box region
  misc_feature (1)..(180): Homolog of NCBI NO: 15227694 NR Description: MADS-box protein (AGL3); protein id: At2g03710.1, by cDNA: gi_1737494 [Arabidopsis thaliana]
  misc_feature (1)..(180): Homolog of NCBI NO: 30678072 NR Description: MADS-box protein (AGL3) [Arabidopsis thaliana]
  misc_feature (1)..(180): Homolog of NCBI NO: 23304686 NR Description: MADS-box protein AGL3-a [Brassica oleracea var.
  misc_feature (1)..(94): Homolog of NCBI NO: 32402422 NR Description: MADS-box protein AGL3-II [Arabidopsis thaliana]
  misc_feature (1)..(180): Homolog of NCBI NO: 13384050 NR Description: MADS-box transcription factor FBP9 [Petunia x
  misc_feature (1)..(180): Homolog of NCBI NO: 8567991 NR Description: MADS-box protein MADS4 [Nicotiana tabacum]
  misc_feature (1)..(180): Homolog of NCBI NO: 6651033 NR Description: MADS box transcription factor MADS1 [Capsicum
  misc_feature (1)..(180): Homolog of NCBI NO: 13384060 NR Description: MADS-box transcription factor FBP23 [Petunia x
  misc_feature (1)..(180): Homolog of NCBI NO: 7446512 NR Description: MADS box protein DEFH49 - garden snapdragon
  misc_feature (1)..(180): Homolog of NCBI NO: 7488622 NR Description: MADS box protein 1 - apple tree
MDPNQSAKDLQDKYQDYLKLKSRVEILQHSQRHLLGEELSEMDVNELEHLERQVDASLRQIRSTKARSMLDQLSDLKTKEEMLLETNRDLRRKLEDSDAALTQSFWGSSAAEQQQQHQQQQQGMSSYQSNPPIQEAGFFKPLQGNVALQMSSHYNHNPANATNSATTSQNVNGFFPGWMV

SEQ ID NO: 91551 - DNA, 975 bp, Arabidopsis thaliana
  misc_feature (1)..(975): Ceres Seq. ID no. 12728219
  misc_feature: MA Experiment ID: 20000347 Result: Up-regulated in Transcription
  misc_feature: MA Experiment 20000347 PARAMETER Experiment Name: At_2mM_SA_Sub_P Parameter: Age (day) Value: 14
  misc_feature: MA Experiment 20000347 PARAMETER Experiment Name: At_2mM_SA_Sub_P Parameter: Organism Value: A. thaliana
  misc_feature: MA Experiment 20000347 PARAMETER Experiment Name: At_2mM_SA_Sub_P Parameter: Plant Line Value: WS
  misc_feature: MA Experiment 20000347 PARAMETER Experiment Name: At_2mM_SA_Sub_P Parameter: Timepoint (hr) Value: 6
  misc_feature: MA Experiment 20000347 PARAMETER Experiment Name: At_2mM_SA_Sub_P Parameter: Tissue Value: Aerial
  misc_feature: MA Experiment 20000347 PARAMETER Experiment Name: At_2mM_SA_Sub_P Parameter: Treatment Value: 2mM SA vs. No Treatment
  misc_feature: MA Experiment ID: 20000355 Result: Up-regulated in Transcription
  misc_feature: MA Experiment 20000355 PARAMETER Experiment Name: At_Siliques_Sub_P Parameter: Age (day) Value: 21
  misc_feature: MA Experiment 20000355 PARAMETER Experiment Name: At_Siliques_Sub_P Parameter: Organism Value: A. thaliana
  misc_feature: MA Experiment 20000355 PARAMETER Experiment Name: At_Siliques_Sub_P Parameter: Plant Line Value: WS
  misc_feature: MA Experiment 20000355 PARAMETER Experiment Name: At_Siliques_Sub_P Parameter: Tissue Value: Less Than 5mm Siliques vs. Whole Plant
atgacaaaatccgaaaccactctttcgaagttattggtagaatctgagttagtccaagaatgcgaggagttgctgtcttctcttccgagagacagaagcgtttttgcagagtatctctatcaataccagggattttggtatccaccaaatcttttagaaggtgttctatatagccagaagcattttcaggccagagattcagacatcgtccttgcaagcattcctaagtcaggtacaacttggttgaaatcacttgtctttgctttgattcataggcaagaattccaaacccctctagtatcccatcctctgctcgataacaacccgcataccctcgtgacctttatcgaaggtttccaccttcacactcaagatacttctcctaggatcttctctacacacattcctgtagggtcactccctgagtcagttaaggactcgtcctgtaaagttgtgtattgctgcaggaacccgaaggacgcgtttgtctcactttggcatttcatgaaaaatttgattgttaaggagatggttggatgcacaatggaggaaatggtgaggtttttttgccgagggtctagtatatacggacccttttgggatcatgtattacagtattggaaagaaagccgagaaaacccgaaaaaggttatgtttgtaatgtatgaagagatgagagagcagcctcaggagtgggtgatgcggatcgccgagttcttgggatattcttttacagaagaagagatagagaatggagtattggaagatatcataaagctgtgtagtcttgagaatctgagtaaattggaggttaatgagaagggtaagttactgaatggaatggagactaaggcattttttaggaaaggagagattggtggatggagagatactttaactcctttgttagcagaggaaattgataaaaccactaaggagaaactaattggttctgattttagattcttttgctaa

SEQ ID NO: 91552 - protein, 324 aa, Arabidopsis thaliana
  peptide (1)..(324): Ceres Seq. ID no. 12728220
  misc_feature (66)..(319): Pfam Name: Sulfotransferase domain Pfam Description: Sulfotransferase domain
  misc_feature (1)..(324): Homolog of NCBI NO: 15227704 NR Description: putative steroid sulfotransferase; protein id:
  misc_feature (9)..(324): Homolog of NCBI NO: 38230552 NR Description: steroid sulfotransferase 4 [Brassica napus]
  misc_feature (4)..(324): Homolog of NCBI NO: 7434974 NR Description: probable steroid sulfotransferase (EC 2.8.2.15) 3 rape >gi|3420008|gb|AAC63113.1| steroid sulfotransferase 3
  misc_feature (4)..(322): Homolog of NCBI NO: 15227699 NR Description: putative steroid sulfotransferase; protein id: supported by cDNA: gi_14030734, supported by cDNA: gi_599639 thaliana] >gi|27735199|sp|P52839|FSTL_ARATH Flavonol
  misc_feature (12)..(322): Homolog of NCBI NO: 7434981 NR Description: probable steroid sulfotransferase (EC 2.8.2.15) 1 rape >gi|3420004|gb|AAC63111.1| steroid sulfotransferase 1
  misc_feature (4)..(324): Homolog of NCBI NO: 7434973 NR Description: probable steroid sulfotransferase (EC 2.8.2.15) 2 rape >gi|3420006|gb|AAC63112.1| steroid sulfotransferase 2
  misc_feature (4)..(298): Homolog of NCBI NO: 2129586 NR Description: probable flavonol sulfotransferase (EC 2.8.2.-) - thaliana >gi|833767|emb|CAA86850.1| Flavonol sulfotransferase
  misc_feature (11)..(322): Homolog of NCBI NO: 15230602 NR Description: sulfotransferase-like protein; protein id:
  misc_feature (16)..(322): Homolog of NCBI NO: 15230603 NR Description: sulfotransferase-like protein; protein id:
  misc_feature (14)..(322): Homolog of NCBI NO: 15239947 NR Description: steroid sulfotransferase-like; protein id:
MTKSETTLSKLLVESELVQECEELLSSLPRDRSVFAEYLYQYQGFWYPPNLLEGVLYSQKHFQARDSDIVLASIPKSGTTWLKSLVFALIHRQEFQTPLVSHPLLDNNPHTLVTFIEGFHLHTQDTSPRIFSTHIPVGSLPESVKDSSCKVVYCCRNPKDAFVSLWHFMKNLIVKEMVGCTMEEMVRFFCRGSSIYGPFWDHVLQYWKESRENPKKVMFVMYEEMREQPQEWVMRIAEFLGYSFTEEEIENGVLEDIIKLCSLENLSKLEVNEKGKLLNGMETKAFFRKGEIGGWRDTLTPLLAEEIDKTTKEKLIGSDFRFFC

SEQ ID NO: 91553 - DNA, 1098 bp, Arabidopsis thaliana
  misc_feature (1)..(1098): Ceres Seq. ID no. 12728241
  misc_feature: MA Experiment ID: 20000328 Result: Down-regulated in Transcription
  misc_feature: MA Experiment 20000328 PARAMETER Experiment Name: At_42deg_Heat_Sub_P Parameter: Age (day) Value: 14
  misc_feature: MA Experiment 20000328 PARAMETER Experiment Name: At_42deg_Heat_Sub_P Parameter: Organism Value: A. thaliana
  misc_feature: MA Experiment 20000328 PARAMETER Experiment Name: At_42deg_Heat_Sub_P Parameter: Plant Line Value: WS
  misc_feature: MA Experiment 20000328 PARAMETER Experiment Name: At_42deg_Heat_Sub_P Parameter: Temperature (deg C) Value: 42 vs. 22
  misc_feature: MA Experiment 20000328 PARAMETER Experiment Name: At_42deg_Heat_Sub_P Parameter: Timepoint (hr) Value: 6
  misc_feature: MA Experiment 20000328 PARAMETER Experiment Name: At_42deg_Heat_Sub_P Parameter: Tissue Value: Aerial
  misc_feature: MA Experiment ID: 20000355 Result: Up-regulated in Transcription
  misc_feature: MA Experiment 20000355 PARAMETER Experiment Name: At_Siliques_Sub_P Parameter: Age (day) Value: 21
  misc_feature: MA Experiment 20000355 PARAMETER Experiment Name: At_Siliques_Sub_P Parameter: Organism Value: A. thaliana
  misc_feature: MA Experiment 20000355 PARAMETER Experiment Name: At_Siliques_Sub_P Parameter: Plant Line Value: WS
  misc_feature: MA Experiment 20000355 PARAMETER Experiment Name: At_Siliques_Sub_P Parameter: Tissue Value: Less Than 5mm Siliques vs. Whole Plant
atggcttattctaaagcatgttataaactcaccaccattacaattcttcttctatccttcacattaccctctcttgccggtaacgctgaaaacgcagatgtaagtgaatgcaaagctgaatctggagatctatcatgtcacaacaacaaagaagcacaaaagcttaaaatcattgcaatcccatctatcttagtggcgagcatgatcggtgtttctttaccgttgttttctcgttccattcctgctttaggacccgatcgagaaatgtctgtgatcgttaagactttagcttcgggtgtaattctggcaaccggttttatgcatgtgttaccggactctttcgatgatctcacatccaaatgtttgcctgaagacccgtggcagaagtttcctttcgccactttcatcacgatgatctcggctttgctcgttttaatgattgaatcgtttgcgatgtgtgcgtatgcgaggagaactagtaagcgtgaaggagaagtcgtaccgttagaaaatggatctaattctgtggatacacaaaacgacatccaaaccctagaaaatggatctagttatgtggagaaacaagaaaaggtcaacgaagataagacaagtgaacttcttaggaataaagtcattgctcagatattggaactaggtatcgtagttcactcggttgtgatcggtcttgctatgggggcttctgataacaaatgtaccgtacaatcactcatcgcagcgctttgtttccatcaactctttgaaggaatgggactcggtggttccatcttacaagcgcaatttaaaagcaaaacaaattggacaatggtgtttttcttttcggtcacaacaccatttgggattgttttagggatggccatacaaaagatatatgatgagacaagtccaactgcgttgatcgttgtgggggtcttgaatgcgtgctctgcaggattgttgatttatatggcccttgttaatctcttggctcatgaattcttcggaccaaagatacaagggaatattaaacttcatgtcctcggttatgttgctaccttcacaggtgccgcaggaatgtctttgatggctaagtgggcatag

SEQ ID NO: 91554 - protein, 365 aa, Arabidopsis thaliana
  peptide (1)..(365): Ceres Seq. ID no. 12728242
  misc_feature (53)..(362): Pfam Name: ZIP Zinc transporter Pfam Description: ZIP Zinc transporter
  misc_feature (1)..(365): Homolog of NCBI NO: 15228062 NR Description: putative root iron transporter protein; protein At2g04032.1 [Arabidopsis thaliana] putative metal transporter ZIP7 [Arabidopsis thaliana] iron
  misc_feature (8)..(365): Homolog of NCBI NO: 4836773 NR Description: iron-regulated transporter 2 [Lycopersicon
  misc_feature (1)..(365): Homolog of NCBI NO: 27549575 NR Description: root iron transporter protein IRT1 [Malus
  misc_feature (8)..(365): Homolog of NCBI NO: 4836771 NR Description: iron-regulated transporter 1 [Lycopersicon
  misc_feature (13)..(365): Homolog of NCBI NO: 18700309 NR Description: iron regulated metal transporter [Oryza sativa]
  misc_feature (46)..(365): Homolog of NCBI NO: 40888850 NR Description: TPA: iron regulated transporter-like protein
  misc_feature (10)..(365): Homolog of NCBI NO: 32966055 NR Description: iron transporter Fe3 [Oryza sativa (japonica
  misc_feature (34)..(365): Homolog of NCBI NO: 7488829 NR Description: probable Fe(II) transport protein, root - garden >gi|3153889|gb|AAC17441.1| root iron transporter protein [Pisum
  misc_feature (13)..(365): Homolog of NCBI NO: 40538928 NR Description: putative metal transporter (with alternative
  misc_feature (14)..(365): Homolog of NCBI NO: 16304676 NR Description: putative Fe(II) transporter [Thlaspi caerulescens]
MAYSKACYKLTTITILLLSFTLPSLAGNAENADVSECKAESGDLSCHNNKEAQKLKIIAIPSILVASMIGVSLPLFSRSIPALGPDREMSVIVKTLASGVILATGFMHVLPDSFDDLTSKCLPEDPWQKFPFATFITMISALLVLMIESFAMCAYARRTSKREGEVVPLENGSNSVDTQNDIQTLENGSSYVEKQEKVNEDKTSELLRNKVIAQILELGIVVHSVVIGLAMGASDNKCTVQSLIAALCFHQLFEGMGLGGSILQAQFKSKTNWTMVFFFSVTTPFGIVLGMAIQKIYDETSPTALIVVGVLNACSAGLLIYMALVNLLAHEFFGPKIQGNIKLHVLGYVATFTGAAGMSLMAKWA

SEQ ID NO: 91555 - protein, 298 aa, Arabidopsis thaliana
  peptide (1)..(298): Ceres Seq. ID no. 12728243
  misc_feature (1)..(295): Pfam Name: ZIP Zinc transporter Pfam Description: ZIP Zinc transporter
  misc_feature (1)..(298): Homolog of NCBI NO: 15228062 NR Description: putative root iron transporter protein; protein At2g04032.1 [Arabidopsis thaliana] putative metal transporter ZIP7 [Arabidopsis thaliana] iron
  misc_feature (1)..(298): Homolog of NCBI NO: 4836773 NR Description: iron-regulated transporter 2 [Lycopersicon
  misc_feature (1)..(298): Homolog of NCBI NO: 27549575 NR Description: root iron transporter protein IRT1 [Malus
  misc_feature (1)..(298): Homolog of NCBI NO: 4836771 NR Description: iron-regulated transporter 1 [Lycopersicon
  misc_feature (1)..(298): Homolog of NCBI NO: 18700309 NR Description: iron regulated metal transporter [Oryza sativa]
  misc_feature (1)..(298): Homolog of NCBI NO: 40888850 NR Description: TPA: iron regulated transporter-like protein
  misc_feature (1)..(298): Homolog of NCBI NO: 32966055 NR Description: iron transporter Fe3 [Oryza sativa (japonica
  misc_feature (1)..(298): Homolog of NCBI NO: 7488829 NR Description: probable Fe(II) transport protein, root - garden >gi|3153889|gb|AAC17441.1| root iron transporter protein [Pisum
  misc_feature (1)..(298): Homolog of NCBI NO: 40538928 NR Description: putative metal transporter (with alternative
  misc_feature (1)..(298): Homolog of NCBI NO: 16304676 NR Description: putative Fe(II) transporter [Thlaspi caerulescens]
MIGVSLPLFSRSIPALGPDREMSVIVKTLASGVILATGFMHVLPDSFDDLTSKCLPEDPWQKFPFATFITMISALLVLMIESFAMCAYARRTSKREGEVVPLENGSNSVDTQNDIQTLENGSSYVEKQEKVNEDKTSELLRNKVIAQILELGIVVHSVVIGLAMGASDNKCTVQSLIAALCFHQLFEGMGLGGSILQAQFKSKTNWTMVFFFSVTTPFGIVLGMAIQKIYDETSPTALIVVGVLNACSAGLLIYMALVNLLAHEFFGPKIQGNIKLHVLGYVATFTGAAGMSLMAKWA

SEQ ID NO: 91556 - protein, 277 aa, Arabidopsis thaliana
  peptide (1)..(277): Ceres Seq. ID no. 12728244
  misc_feature (1)..(274): Pfam Name: ZIP Zinc transporter Pfam Description: ZIP Zinc transporter
  misc_feature (1)..(277): Homolog of NCBI NO: 15228062 NR Description: putative root iron transporter protein; protein At2g04032.1 [Arabidopsis thaliana] putative metal transporter ZIP7 [Arabidopsis thaliana] iron
  misc_feature (1)..(277): Homolog of NCBI NO: 4836773 NR Description: iron-regulated transporter 2 [Lycopersicon
  misc_feature (1)..(277): Homolog of NCBI NO: 27549575 NR Description: root iron transporter protein IRT1 [Malus
  misc_feature (1)..(277): Homolog of NCBI NO: 4836771 NR Description: iron-regulated transporter 1 [Lycopersicon
  misc_feature (1)..(277): Homolog of NCBI NO: 18700309 NR Description: iron regulated metal transporter [Oryza sativa]
  misc_feature (1)..(277): Homolog of NCBI NO: 40888850 NR Description: TPA: iron regulated transporter-like protein
  misc_feature (1)..(277): Homolog of NCBI NO: 32966055 NR Description: iron transporter Fe3 [Oryza sativa (japonica
  misc_feature (1)..(277): Homolog of NCBI NO: 7488829 NR Description: probable Fe(II) transport protein, root - garden >gi|3153889|gb|AAC17441.1| root iron transporter protein [Pisum
  misc_feature (1)..(277): Homolog of NCBI NO: 40538928 NR Description: putative metal transporter (with alternative
  misc_feature (1)..(277): Homolog of NCBI NO: 16304676 NR Description: putative Fe(II) transporter [Thlaspi caerulescens]
MSVIVKTLASGVILATGFMHVLPDSFDDLTSKCLPEDPWQKFPFATFITMISALLVLMIESFAMCAYARRTSKREGEVVPLENGSNSVDTQNDIQTLENGSSYVEKQEKVNEDKTSELLRNKVIAQILELGIVVHSVVIGLAMGASDNKCTVQSLIAALCFHQLFEGMGLGGSILQAQFKSKTNWTMVFFFSVTTPFGIVLGMAIQKIYDETSPTALIVVGVLNACSAGLLIYMALVNLLAHEFFGPKIQGNIKLHVLGYVATFTGAAGMSLMAKWA

SEQ ID NO: 91557 - DNA, 1431 bp, Arabidopsis thaliana
  misc_feature (1)..(1431): Ceres Seq. ID no. 12728249
  misc_feature: MA Experiment ID: 20000327 Result: Up-regulated in Transcription
  misc_feature: MA Experiment 20000327 PARAMETER Experiment Name: At_42deg_Heat_Sub_P Parameter: Age (day) Value: 14
  misc_feature: MA Experiment 20000327 PARAMETER Experiment Name: At_42deg_Heat_Sub_P Parameter: Organism Value: A. thaliana
  misc_feature: MA Experiment 20000327 PARAMETER Experiment Name: At_42deg_Heat_Sub_P Parameter: Plant Line Value: WS
  misc_feature: MA Experiment 20000327 PARAMETER Experiment Name: At_42deg_Heat_Sub_P Parameter: Temperature (deg C) Value: 42 vs. 22
  misc_feature: MA Experiment 20000327 PARAMETER Experiment Name: At_42deg_Heat_Sub_P Parameter: Timepoint (hr) Value: 1
  misc_feature: MA Experiment 20000327 PARAMETER Experiment Name: At_42deg_Heat_Sub_P Parameter: Tissue Value: Aerial
atggaggagccatttcttctgagagacgagcttctagtcccttctcaagtcacatggcatacaaatccattaaccgtcgagctaaagagagtgagccgcttggccgctcctatggccactgtgaccattgctcagtacttattgcctgtcatctcggtcatggtcgctggccacaacggcgagctccagctctccggtgtcgctcttgcaaactccttcacaaacgtcaccggttttagcattatgtgtggattagtgggtgcacttgaaactctttgtggccaagcttatggagccaaacaatatgaaaaaatcggaacttacgcatactctgctattgcttccaacataccaatttgtttcctcatatcaattctctggctttacatcgaaaagatcttgatttctctcggacaagaccctgaaatttcaagaatcgctggctcctacgccttttggcttataccggctttatttggccaagcgattgtcataccactgtcccggtttctgctaacacaagggttggttattcctctgctcttcactgccgtgaccacccttttgttccacgttttggtttgttggactttggttttcttgtttggtctgggatgtaatggacctgccatggctacaagtgtgtctttctggttttacgctgtgatactctcatgttatgtgagattctccagctcttgcgagaagactcgcggatttgtatcccgagattttgtgtcttctatcaagcagttcttccaatacggaatcccatcagctgcaatgatttgtctagaatggtggctatttgagatactcatactctgctcaggtcttctccctaacccgaaactcgagacctctgttctttcaatttgtcttacaatagaaactttgcactatgtgatttcagctggagtcgccgcggctgtgagcacacgtgtatcaaacaatttgggagctgggaatcctcaagttgctagggtttcagtattagcagggctttgtctctggatagtagagtcagctttctttagcatacttctattcacctgcaggaacatcataggatacgcattcagcaacagcaaagaagttttggactatgtagctgacctaactcctttgctctgcctctcctttatcctcgacggcttcacagcagttctaaatggagttgctaggggaagtggttggcaacacattggagcttggaacaatactgtttcttattatcttgtaggagctcctgttggaatttacttagctttcagtcgtgagttgaacggaaaaggactgtggtgcggtgttgtggttggatctactgtgcaagccactatactggctattgtcacagcttccataaattggaaggaacaggctgagaaggcaaggaagagaattgtctcaactgaaaacagattggcttaa

SEQ ID NO: 91558 - protein, 476 aa, Arabidopsis thaliana
  peptide (1)..(476): Ceres Seq. ID no. 12728250
  misc_feature (1)..(476): Homolog of NCBI NO: 15228071 NR Description: hypothetical protein; protein id: At2g04040.1
  misc_feature (1)..(476): Homolog of NCBI NO: 15228073 NR Description: hypothetical protein; protein id: At2g04050.1
  misc_feature (1)..(475): Homolog of NCBI NO: 30678096 NR Description: MATE efflux protein - related [Arabidopsis >gi|26451343|dbj|BAC42772.1| unknown protein [Arabidopsis >gi|28973213|gb|AAO63931.1| unknown protein [Arabidopsis
  misc_feature (1)..(460): Homolog of NCBI NO: 25411053 NR Description: hypothetical protein At2g04080 [imported] - thaliana >gi|4734007|gb|AAD28684.1| hypothetical protein
  misc_feature (1)..(460): Homolog of NCBI NO: 15228081 NR Description: hypothetical protein; protein id: At2g04070.1
  misc_feature (1)..(469): Homolog of NCBI NO: 22325453 NR Description: hypothetical protein; protein id: At2g04100.1, by cDNA: gi_20260453 [Arabidopsis thaliana]
  misc_feature (1)..(468): Homolog of NCBI NO: 15228085 NR Description: hypothetical protein; protein id: At2g04090.1
  misc_feature (1)..(460): Homolog of NCBI NO: 25411056 NR Description: hypothetical protein At2g04100 [imported] - thaliana >gi|4734005|gb|AAD28682.1| hypothetical protein
  misc_feature (27)..(472): Homolog of NCBI NO: 15223961 NR Description: hypothetical protein; protein id: At1g71140.1
  misc_feature (27)..(468): Homolog of NCBI NO: 13430684 NR Description: putative MATE efflux family protein [Arabidopsis
MEEPFLLRDELLVPSQVTWHTNPLTVELKRVSRLAAPMATVTIAQYLLPVISVMVAGHNGELQLSGVALANSFTNVTGFSIMCGLVGALETLCGQAYGAKQYEKIGTYAYSAIASNIPICFLISILWLYIEKILISLGQDPEISRIAGSYAFWLIPALFGQAIVIPLSRFLLTQGLVIPLLFTAVTTLLFHVLVCWTLVFLFGLGCNGPAMATSVSFWFYAVILSCYVRFSSSCEKTRGFVSRDFVSSIKQFFQYGIPSAAMICLEWWLFEILILCSGLLPNPKLETSVLSICLTIETLHYVISAGVAAAVSTRVSNNLGAGNPQVARVSVLAGLCLWIVESAFFSILLFTCRNIIGYAFSNSKEVLDYVADLTPLLCLSFILDGFTAVLNGVARGSGWQHIGAWNNTVSYYLVGAPVGIYLAFSRELNGKGLWCGVVVGSTVQATILAIVTASINWKEQAEKARKRIVSTENRLA

SEQ ID NO: 91559 - protein, 439 aa, Arabidopsis thaliana
  peptide (1)..(439): Ceres Seq. ID no. 12728251
  misc_feature (1)..(439): Homolog of NCBI NO: 15228071 NR Description: hypothetical protein; protein id: At2g04040.1
  misc_feature (1)..(439): Homolog of NCBI NO: 15228073 NR Description: hypothetical protein; protein id: At2g04050.1
  misc_feature (1)..(438): Homolog of NCBI NO: 30678096 NR Description: MATE efflux protein - related [Arabidopsis >gi|26451343|dbj|BAC42772.1| unknown protein [Arabidopsis >gi|28973213|gb|AAO63931.1| unknown protein [Arabidopsis
  misc_feature (1)..(423): Homolog of NCBI NO: 25411053 NR Description: hypothetical protein At2g04080 [imported] - thaliana >gi|4734007|gb|AAD28684.1| hypothetical protein
  misc_feature (1)..(423): Homolog of NCBI NO: 15228081 NR Description: hypothetical protein; protein id: At2g04070.1
  misc_feature (1)..(432): Homolog of NCBI NO: 22325453 NR Description: hypothetical protein; protein id: At2g04100.1, by cDNA: gi_20260453 [Arabidopsis thaliana]
  misc_feature (1)..(431): Homolog of NCBI NO: 15228085 NR Description: hypothetical protein; protein id: At2g04090.1
  misc_feature (1)..(423): Homolog of NCBI NO: 25411056 NR Description: hypothetical protein At2g04100 [imported] - thaliana >gi|4734005|gb|AAD28682.1| hypothetical protein
  misc_feature (1)..(435): Homolog of NCBI NO: 15223961 NR Description: hypothetical protein; protein id: At1g71140.1
  misc_feature (1)..(431): Homolog of NCBI NO: 13430684 NR Description: putative MATE efflux family protein [Arabidopsis
MATVTIAQYLLPVISVMVAGHNGELQLSGVALANSFTNVTGFSIMCGLVGALETLCGQAYGAKQYEKIGTYAYSAIASNIPICFLISILWLYIEKILISLGQDPEISRIAGSYAFWLIPALFGQAIVIPLSRFLLTQGLVIPLLFTAVTTLLFHVLVCWTLVFLFGLGCNGPAMATSVSFWFYAVILSCYVRFSSSCEKTRGFVSRDFVSSIKQFFQYGIPSAAMICLEWWLFEILILCSGLLPNPKLETSVLSICLTIETLHYVISAGVAAAVSTRVSNNLGAGNPQVARVSVLAGLCLWIVESAFFSILLFTCRNIIGYAFSNSKEVLDYVADLTPLLCLSFILDGFTAVLNGVARGSGWQHIGAWNNTVSYYLVGAPVGIYLAFSRELNGKGLWCGVVVGSTVQATILAIVTASINWKEQAEKARKRIVSTENRLA

SEQ ID NO: 91560 - protein, 423 aa, Arabidopsis thaliana
  peptide (1)..(423): Ceres Seq. ID no. 12728252
  misc_feature (1)..(423): Homolog of NCBI NO: 15228071 NR Description: hypothetical protein; protein id: At2g04040.1
  misc_feature (1)..(423): Homolog of NCBI NO: 15228073 NR Description: hypothetical protein; protein id: At2g04050.1
  misc_feature (1)..(422): Homolog of NCBI NO: 30678096 NR Description: MATE efflux protein - related [Arabidopsis >gi|26451343|dbj|BAC42772.1| unknown protein [Arabidopsis >gi|28973213|gb|AAO63931.1| unknown protein [Arabidopsis
  misc_feature (1)..(407): Homolog of NCBI NO: 25411053 NR Description: hypothetical protein At2g04080 [imported] - thaliana >gi|4734007|gb|AAD28684.1| hypothetical protein
  misc_feature (1)..(407): Homolog of NCBI NO: 15228081 NR Description: hypothetical protein; protein id: At2g04070.1
  misc_feature (1)..(416): Homolog of NCBI NO: 22325453 NR Description: hypothetical protein; protein id: At2g04100.1, by cDNA: gi_20260453 [Arabidopsis thaliana]
  misc_feature (1)..(415): Homolog of NCBI NO: 15228085 NR Description: hypothetical protein; protein id: At2g04090.1
  misc_feature (1)..(407): Homolog of NCBI NO: 25411056 NR Description: hypothetical protein At2g04100 [imported] - thaliana >gi|4734005|gb|AAD28682.1| hypothetical protein
  misc_feature (1)..(419): Homolog of NCBI NO: 15223961 NR Description: hypothetical protein; protein id: At1g71140.1
  misc_feature (1)..(415): Homolog of NCBI NO: 13430684 NR Description: putative MATE efflux family protein [Arabidopsis
MVAGHNGELQLSGVALANSFTNVTGFSIMCGLVGALETLCGQAYGAKQYEKIGTYAYSAIASNIPICFLISILWLYIEKILISLGQDPEISRIAGSYAFWLIPALFGQAIVIPLSRFLLTQGLVIPLLFTAVTTLLFHVLVCWTLVFLFGLGCNGPAMATSVSFWFYAVILSCYVRFSSSCEKTRGFVSRDFVSSIKQFFQYGIPSAAMICLEWWLFEILILCSGLLPNPKLETSVLSICLTIETLHYVISAGVAAAVSTRVSNNLGAGNPQVARVSVLAGLCLWIVESAFFSILLFTCRNIIGYAFSNSKEVLDYVADLTPLLCLSFILDGFTAVLNGVARGSGWQHIGAWNNTVSYYLVGAPVGIYLAFSRELNGKGLWCGVVVGSTVQATILAIVTASINWKEQAEKARKRIVSTENRLA

SEQ ID NO: 91561 - DNA, 1431 bp, Arabidopsis thaliana
  misc_feature (1)..(1431): Ceres Seq. ID no. 12728253
  misc_feature: MA Experiment ID: 20000306 Result: Down-regulated in Transcription
  misc_feature: MA Experiment 20000306 PARAMETER Experiment Name: At_Germinating_Seeds_Sub_P Parameter: Age (hr) Value: 6 vs. 0
  misc_feature: MA Experiment 20000306 PARAMETER Experiment Name: At_Germinating_Seeds_Sub_P Parameter: Organism Value: A. thaliana
  misc_feature: MA Experiment 20000306 PARAMETER Experiment Name: At_Germinating_Seeds_Sub_P Parameter: Plant Line Value: WS
  misc_feature: MA Experiment 20000306 PARAMETER Experiment Name: At_Germinating_Seeds_Sub_P Parameter: Tissue Value: Germinating Seeds
  misc_feature: MA Experiment ID: 20000307 Result: Down-regulated in Transcription
  misc_feature: MA Experiment 20000307 PARAMETER Experiment Name: At_Germinating_Seeds_Sub_P Parameter: Age (hr) Value: 24 vs. 0
  misc_feature: MA Experiment 20000307 PARAMETER Experiment Name: At_Germinating_Seeds_Sub_P Parameter: Organism Value: A. thaliana
  misc_feature: MA Experiment 20000307 PARAMETER Experiment Name: At_Germinating_Seeds_Sub_P Parameter: Plant Line Value: WS
  misc_feature: MA Experiment 20000307 PARAMETER Experiment Name: At_Germinating_Seeds_Sub_P Parameter: Tissue Value: Germinating Seeds
atggaagagccctttcttctgcaagatgagcaccttgtcccctgtaaagacacatggaaaagtggtcaggttaccgtcgagctgaagaaagtgagcagcttggccgctcctatggccgccgtgaccattgctcagtacttattgcctgtcatttcagtcatggtcgctggccacaatggtgagctccagctctccggcgtcgctcttgcaacctccttcacaaacgtttccgggttcagtattttgtttgggttagcgggtgcactagaaactctttgtggccaagcttatggagccaaacaatacgaaaaaatcggaacctacacatactctgcaactgcctctaacatccctatatgtgtcctcatatcagttctctggatttacatcgaaaagctcttaatctctctcggtcaagaccctgacatctctagagtcgctggctcctatgccttgtggctcataccggctttgttcgcccatgcgtttttcatcccactgactcggtttctgctagcacaagggttggttcttccactgctctactgtaccctgaccactcttttgttccacatccctgtttgctgggcttttgtttacgcgtttggtctgggaagcaatggagctgccatggctattagtgtgtctttctggttctatgttgtgattctctcatgttatgtgaggtactccagctcctgcgacaagactcgcgtatttgtatccagtgatttcgtgtcttgtatcaagcagttcttccacttcggagtcccatcagcggcaatggtttgcctagaatggtggctatttgagctactcatactctgttcaggtcttctcccaaacccgaaactcgagacctctgttctttcaatttgtcttacaacagcaagtttgcactatgtgattccaggtggagtcgcggcggctgtgagcacacgcgtgtcaaacaaattgggagctgggattcctcaagttgctagggtttcagtattggcagggctttgtctctggcttgtagagtcagctttctttagcacacttctcttcacatgccgaaacattataggctacgcattcagcaacagcaaagaagttgtggactatgtggctaacctaactcctttgctctgcctctcctttatcctcgacggtttcacagcagttctgaatggggttgcaaggggaagtggttggcaacacattggagctttgaacaacgtggtagcttattatcttgtaggagctcctgttggagtatacttagctttcaatcgtgagttgaacggaaaaggactttggtgtggtgttgtggtcggatccgctgtgcaagccataatattggcttttgtcacagcttccataaattggaaggaacaggctgagaaggctaggaagagaatggtctctagtgaaaatagattggcttaa

SEQ ID NO: 91562 - protein, 476 aa, Arabidopsis thaliana
  peptide (1)..(476): Ceres Seq. ID no. 12728254
  misc_feature (1)..(476): Homolog of NCBI NO: 15228073 NR Description: hypothetical protein; protein id: At2g04050.1
  misc_feature (1)..(475): Homolog of NCBI NO: 30678096 NR Description: MATE efflux protein - related [Arabidopsis >gi|26451343|dbj|BAC42772.1| unknown protein [Arabidopsis >gi|28973213|gb|AAO63931.1| unknown protein [Arabidopsis
  misc_feature (1)..(476): Homolog of NCBI NO: 15228071 NR Description: hypothetical protein; protein id: At2g04040.1
  misc_feature (1)..(460): Homolog of NCBI NO: 15228081 NR Description: hypothetical protein; protein id: At2g04070.1
  misc_feature (1)..(460): Homolog of NCBI NO: 25411053 NR Description: hypothetical protein At2g04080 [imported] - thaliana >gi|4734007|gb|AAD28684.1| hypothetical protein
  misc_feature (1)..(469): Homolog of NCBI NO: 22325453 NR Description: hypothetical protein; protein id: At2g04100.1, by cDNA: gi_20260453 [Arabidopsis thaliana]
  misc_feature (1)..(466): Homolog of NCBI NO: 15228085 NR Description: hypothetical protein; protein id: At2g04090.1
  misc_feature (1)..(460): Homolog of NCBI NO: 25411056 NR Description: hypothetical protein At2g04100 [imported] - thaliana >gi|4734005|gb|AAD28682.1| hypothetical protein
  misc_feature (27)..(472): Homolog of NCBI NO: 15223961 NR Description: hypothetical protein; protein id: At1g71140.1
  misc_feature (1)..(468): Homolog of NCBI NO: 13430684 NR Description: putative MATE efflux family protein [Arabidopsis
MEEPFLLQDEHLVPCKDTWKSGQVTVELKKVSSLAAPMAAVTIAQYLLPVISVMVAGHNGELQLSGVALATSFTNVSGFSILFGLAGALETLCGQAYGAKQYEKIGTYTYSATASNIPICVLISVLWIYIEKLLISLGQDPDISRVAGSYALWLIPALFAHAFFIPLTRFLLAQGLVLPLLYCTLTTLLFHIPVCWAFVYAFGLGSNGAAMAISVSFWFYVVILSCYVRYSSSCDKTRVFVSSDFVSCIKQFFHFGVPSAAMVCLEWWLFELLILCSGLLPNPKLETSVLSICLTTASLHYVIPGGVAAAVSTRVSNKLGAGIPQVARVSVLAGLCLWLVESAFFSTLLFTCRNIIGYAFSNSKEVVDYVANLTPLLCLSFILDGFTAVLNGVARGSGWQHIGALNNVVAYYLVGAPVGVYLAFNRELNGKGLWCGVVVGSAVQAIILAFVTASINWKEQAEKARKRMVSSENRLA

SEQ ID NO: 91563 - protein, 439 aa, Arabidopsis thaliana
  peptide (1)..(439): Ceres Seq. ID no. 12728255
  misc_feature (1)..(439): Homolog of NCBI NO: 15228073 NR Description: hypothetical protein; protein id: At2g04050.1
  misc_feature (1)..(438): Homolog of NCBI NO: 30678096 NR Description: MATE efflux protein - related [Arabidopsis >gi|26451343|dbj|BAC42772.1| unknown protein [Arabidopsis >gi|28973213|gb|AAO63931.1| unknown protein [Arabidopsis
  misc_feature (1)..(439): Homolog of NCBI NO: 15228071 NR Description: hypothetical protein; protein id: At2g04040.1
  misc_feature (1)..(423): Homolog of NCBI NO: 15228081 NR Description: hypothetical protein; protein id: At2g04070.1
  misc_feature (1)..(423): Homolog of NCBI NO: 25411053 NR Description: hypothetical protein At2g04080 [imported] - thaliana >gi|4734007|gb|AAD28684.1| hypothetical protein
  misc_feature (1)..(432): Homolog of NCBI NO: 22325453 NR Description: hypothetical protein; protein id: At2g04100.1, by cDNA: gi_20260453 [Arabidopsis thaliana]
  misc_feature (1)..(429): Homolog of NCBI NO: 15228085 NR Description: hypothetical protein; protein id: At2g04090.1
  misc_feature (1)..(423): Homolog of NCBI NO: 25411056 NR Description: hypothetical protein At2g04100 [imported] - thaliana >gi|4734005|gb|AAD28682.1| hypothetical protein
  misc_feature (1)..(435): Homolog of NCBI NO: 15223961 NR Description: hypothetical protein; protein id: At1g71140.1
  misc_feature (1)..(431): Homolog of NCBI NO: 13430684 NR Description: putative MATE efflux family protein [Arabidopsis
MAAVTIAQYLLPVISVMVAGHNGELQLSGVALATSFTNVSGFSILFGLAGALETLCGQAYGAKQYEKIGTYTYSATASNIPICVLISVLWIYIEKLLISLGQDPDISRVAGSYALWLIPALFAHAFFIPLTRFLLAQGLVLPLLYCTLTTLLFHIPVCWAFVYAFGLGSNGAAMAISVSFWFYVVILSCYVRYSSSCDKTRVFVSSDFVSCIKQFFHFGVPSAAMVCLEWWLFELLILCSGLLPNPKLETSVLSICLTTASLHYVIPGGVAAAVSTRVSNKLGAGIPQVARVSVLAGLCLWLVESAFFSTLLFTCRNIIGYAFSNSKEVVDYVANLTPLLCLSFILDGFTAVLNGVARGSGWQHIGALNNVVAYYLVGAPVGVYLAFNRELNGKGLWCGVVVGSAVQAIILAFVTASINWKEQAEKARKRMVSSENRLA

SEQ ID NO: 91564 - protein, 423 aa, Arabidopsis thaliana
  peptide (1)..(423): Ceres Seq. ID no. 12728256
  misc_feature (1)..(423): Homolog of NCBI NO: 15228073 NR Description: hypothetical protein; protein id: At2g04050.1
  misc_feature (1)..(422): Homolog of NCBI NO: 30678096 NR Description: MATE efflux protein - related [Arabidopsis >gi|26451343|dbj|BAC42772.1| unknown protein [Arabidopsis >gi|28973213|gb|AAO63931.1| unknown protein [Arabidopsis
  misc_feature (1)..(423): Homolog of NCBI NO: 15228071 NR Description: hypothetical protein; protein id: At2g04040.1
  misc_feature (1)..(407): Homolog of NCBI NO: 15228081 NR Description: hypothetical protein; protein id: At2g04070.1
  misc_feature (1)..(407): Homolog of NCBI NO: 25411053 NR Description: hypothetical protein At2g04080 [imported] - thaliana >gi|4734007|gb|AAD28684.1| hypothetical protein
  misc_feature (1)..(416): Homolog of NCBI NO: 22325453 NR Description: hypothetical protein; protein id: At2g04100.1, by cDNA: gi_20260453 [Arabidopsis thaliana]
  misc_feature (1)..(413): Homolog of NCBI NO: 15228085 NR Description: hypothetical protein; protein id: At2g04090.1
  misc_feature (1)..(407): Homolog of NCBI NO: 25411056 NR Description: hypothetical protein At2g04100 [imported] - thaliana >gi|4734005|gb|AAD28682.1| hypothetical protein
  misc_feature (1)..(419): Homolog of NCBI NO: 15223961 NR Description: hypothetical protein; protein id: At1g71140.1
  misc_feature (1)..(415): Homolog of NCBI NO: 13430684 NR Description: putative MATE efflux family protein [Arabidopsis
MVAGHNGELQLSGVALATSFTNVSGFSILFGLAGALETLCGQAYGAKQYEKIGTYTYSATASNIPICVLISVLWIYIEKLLISLGQDPDISRVAGSYALWLIPALFAHAFFIPLTRFLLAQGLVLPLLYCTLTTLLFHIPVCWAFVYAFGLGSNGAAMAISVSFWFYVVILSCYVRYSSSCDKTRVFVSSDFVSCIKQFFHFGVPSAAMVCLEWWLFELLILCSGLLPNPKLETSVLSICLTTASLHYVIPGGVAAAVSTRVSNKLGAGIPQVARVSVLAGLCLWLVESAFFSTLLFTCRNIIGYAFSNSKEVVDYVANLTPLLCLSFILDGFTAVLNGVARGSGWQHIGALNNVVAYYLVGAPVGVYLAFNRELNGKGLWCGVVVGSAVQAIILAFVTASINWKEQAEKARKRMVSSENRLA

SEQ ID NO: 91565 - DNA, 2397 bp, Arabidopsis thaliana
  misc_feature (1)..(2397): Ceres Seq. ID no. 12728299
  misc_feature: MA Experiment ID: 20000315 Result: Down-regulated in Transcription
  misc_feature: MA Experiment 20000315 PARAMETER Experiment Name: At_14day_Shoots-Roots_Sub_P Parameter: Age (day) Value: 14
  misc_feature: MA Experiment 20000315 PARAMETER Experiment Name: At_14day_Shoots-Roots_Sub_P Parameter: Organism Value: A. thaliana
  misc_feature: MA Experiment 20000315 PARAMETER Experiment Name: At_14day_Shoots-Roots_Sub_P Parameter: Plant Line Value: WS
  misc_feature: MA Experiment 20000315 PARAMETER Experiment Name: At_14day_Shoots-Roots_Sub_P Parameter: Tissue Value: Shoots vs. Whole Plant
atggtggatcatcatcatcatcatcatcatcaacatcgacctaatcgtctttcagtaccacaaccaacaatcggaagaacatacccatcattcccttacactccaactccaaccccttccaaaacccgtctctcttcttcttcttcctacagatcgatccatggaagcaaatcatcactttcatttctctttctcattctcttctctcttagatctctttactctctcttacctttccttcgttcttcaccttctttctctcttttccctttctccttcctcgtctctcttctctctttcctcttctcactttctttcactatcatctcttccttttcaccttcaaagaaagacccttttcttctccgtcttcaaaatcgttccttttcctcaatttcatctctttcttcctctcaaatcaaactcttactcgctaaatcattccttcttgctttcgtctttcttctccgttttcaagctcttcgttactgtggtgctgctgctatgatcttagctgaactctctggcacagtttcagccagagtcttgtttagtgatactggtggaattggagttagatcatctaaggttcgtgggttttgcgttttgtttgctgggttgttgttgttatcaatcagctgggatcgtgttgattgtttcccgttttcatcatctgttgaaagttggggtttttggatttaccctaaagagaattgcttgaggatttggcctctgttgcttccgtttctatctggtttcttaggttgttatgagaaagtttctgtgaattggaatgagatcaaacagttagatcagaaacgagttcgattactgtctttgtttctaaccactgtgttgttgttcccacttgctatttggagtttcttcttctctggtagtggtgatgatagtgtctcttttgggaatttaggttggcctttagctaacactgttgtatttggagtgttgttgagtgagaattataatgatgataagttttcaagctcgaagaagaaggactcagagagggagtttcttgtaacgtttctatgtactatagtattggaactcttctattttcctgagctatctctttggggattgttgctttgtggtttgttgctttacattgctgttagagagttggagtctgtgtattcagattatcaagagattggtatggaatcgcctgagtcgttttccactatgtttatgaagcctatccgtcacattttgagcgagaagaaatcgaggaagattgcgttgtttcttttgattaatacggcgtatatggtggttgagtttgtggctggttttatgagtaacagtcttggattgatctcagacgcttgtcatatgttgtttgattgtgctgctttggcaattgggctgtatgcgtcttatatctctcgtcttcctgcaaaccatcagtataactatggccgaggtagatttgaagtgctttctggttatgttaacgcggtgttccttgttcttgttggggctctgattgtgcttgagtcgattgagagaatcttggatcctcaggagatttctacaaatagtcttttggttgtttcggttggtgggcttctcgtgaatatcgtcgggttaatctttttccacgaggaacatcatcatgctcatggtggatctggttgcacacattctcactcacaccaatcccatagccataaaaatgaggagcatcatcagcattcagatagccataaacatgaggaacatcatcagcattcagatagccataaacatgaggaacatcatgagcatgaccatcatcatcattcccatagccataaacacgaggagtgcaaccacaaccacgaccatgagcatcaatcccatagccataatcacgaggagtgcaaccacaaccacgaccatcattctgatcaccaacctgaaaaaagcgaaaagaaggagcatcgccacattgatcacaatatggaaggaatctttcttcatgttttagcagacacaatggggagtgttggagttgtgatatcgacactcttgattaaatacaagggctggttagttgcagatccagccagctcaatctttatctccatcctcatcatcgcttcagtcattccgttgctacgaaactctgcggagattctactgcaaagagtccctagggctcacaggcaagacctgaaagaagctatgaggaacatacttaagactaaaggtgtttgcagtatccagaggctgcatgtatggagtttcaccaactcagacgtcgtggctactctccatctccttgtatctgcagattcagacaagacggatactaagttacaagtgtcacgtttgttagaagatgcaggagtaaaggattggacattgcaggtggaatctgttaactcatag

SEQ ID NO: 91566 - protein, 798 aa, Arabidopsis thaliana
  peptide (1)..(798): Ceres Seq. ID no. 12728300
  misc_feature (420)..(553): Pfam Name: Cation efflux family Pfam Description: Cation efflux family
  misc_feature (394)..(553): Homolog of NCBI NO: 25303192 NR Description: probable cation transport protein [imported] - thaliana >gi|4895164|gb|AAD32753.1| putative cation transport
  misc_feature (647)..(798): Homolog of NCBI NO: 25303192 NR Description: probable cation transport protein [imported] - thaliana >gi|4895164|gb|AAD32753.1| putative cation transport
  misc_feature (143)..(653): Homolog of NCBI NO: 34904948 NR Description: putative disease resistance protein homolog
  misc_feature (11)..(120): Homolog of NCBI NO: 34904948 NR Description: putative disease resistance protein homolog
  misc_feature (600)..(794): Homolog of NCBI NO: 37537241 NR Description: Slc30a5 protein [Mus musculus]
  misc_feature (396)..(573): Homolog of NCBI NO: 37537241 NR Description: Slc30a5 protein [Mus musculus]
  misc_feature (542)..(796): Homolog of NCBI NO: 34904948 NR Description: putative disease resistance protein homolog
  misc_feature (600)..(794): Homolog of NCBI NO: 26352918 NR Description: unnamed protein product [Mus musculus]
  misc_feature (396)..(573): Homolog of NCBI NO: 26352918 NR Description: unnamed protein product [Mus musculus]
  misc_feature (600)..(794): Homolog of NCBI NO: 26341774 NR Description: unnamed protein product [Mus musculus]
MVDHHHHHHHQHRPNRLSVPQPTIGRTYPSFPYTPTPTPSKTRLSSSSSYRSIHGSKSSLSFLFLILFSLRSLYSLLPFLRSSPSFSLFPFSFLVSLLSFLFSLSFTIISSFSPSKKDPFLLRLQNRSFSSISSLSSSQIKLLLAKSFLLAFVFLLRFQALRYCGAAAMILAELSGTVSARVLFSDTGGIGVRSSKVRGFCVLFAGLLLLSISWDRVDCFPFSSSVESWGFWIYPKENCLRIWPLLLPFLSGFLGCYEKVSVNWNEIKQLDQKRVRLLSLFLTTVLLFPLAIWSFFFSGSGDDSVSFGNLGWPLANTVVFGVLLSENYNDDKFSSSKKKDSEREFLVTFLCTIVLELFYFPELSLWGLLLCGLLLYIAVRELESVYSDYQEIGMESPESFSTMFMKPIRHILSEKKSRKIALFLLINTAYMVVEFVAGFMSNSLGLISDACHMLFDCAALAIGLYASYISRLPANHQYNYGRGRFEVLSGYVNAVFLVLVGALIVLESIERILDPQEISTNSLLVVSVGGLLVNIVGLIFFHEEHHHAHGGSGCTHSHSHQSHSHKNEEHHQHSDSHKHEEHHQHSDSHKHEEHHEHDHHHHSHSHKHEECNHNHDHEHQSHSHNHEECNHNHDHHSDHQPEKSEKKEHRHIDHNMEGIFLHVLADTMGSVGVVISTLLIKYKGWLVADPASSIFISILIIASVIPLLRNSAEILLQRVPRAHRQDLKEAMRNILKTKGVCSIQRLHVWSFTNSDVVATLHLLVSADSDKTDTKLQVSRLLEDAGVKDWTLQVESVNS

SEQ ID NO: 91567 - protein, 630 aa, Arabidopsis thaliana
  peptide (1)..(630): Ceres Seq. ID no. 12728301
  misc_feature (252)..(385): Pfam Name: Cation efflux family Pfam Description: Cation efflux family
  misc_feature (226)..(385): Homolog of NCBI NO: 25303192 NR Description: probable cation transport protein [imported] - thaliana >gi|4895164|gb|AAD32753.1| putative cation transport
  misc_feature (479)..(630): Homolog of NCBI NO: 25303192 NR Description: probable cation transport protein [imported] - thaliana >gi|4895164|gb|AAD32753.1| putative cation transport
  misc_feature (1)..(485): Homolog of NCBI NO: 34904948 NR Description: putative disease resistance protein homolog
  misc_feature (432)..(626): Homolog of NCBI NO: 37537241 NR Description: Slc30a5 protein [Mus musculus]
  misc_feature (228)..(405): Homolog of NCBI NO: 37537241 NR Description: Slc30a5 protein [Mus musculus]
  misc_feature (374)..(628): Homolog of NCBI NO: 34904948 NR Description: putative disease resistance protein homolog
  misc_feature (432)..(626): Homolog of NCBI NO: 26352918 NR Description: unnamed protein product [Mus musculus]
  misc_feature (228)..(405): Homolog of NCBI NO: 26352918 NR Description: unnamed protein product [Mus musculus]
  misc_feature (432)..(626): Homolog of NCBI NO: 26341774 NR Description: unnamed protein product [Mus musculus]
  misc_feature (228)..(405): Homolog of NCBI NO: 26341774 NR Description: unnamed protein product [Mus musculus]
MILAELSGTVSARVLFSDTGGIGVRSSKVRGFCVLFAGLLLLSISWDRVDCFPFSSSVESWGFWIYPKENCLRIWPLLLPFLSGFLGCYEKVSVNWNEIKQLDQKRVRLLSLFLTTVLLFPLAIWSFFFSGSGDDSVSFGNLGWPLANTVVFGVLLSENYNDDKFSSSKKKDSEREFLVTFLCTIVLELFYFPELSLWGLLLCGLLLYIAVRELESVYSDYQEIGMESPESFSTMFMKPIRHILSEKKSRKIALFLLINTAYMVVEFVAGFMSNSLGLISDACHMLFDCAALAIGLYASYISRLPANHQYNYGRGRFEVLSGYVNAVFLVLVGALIVLESIERILDPQEISTNSLLVVSVGGLLVNIVGLIFFHEEHHHAHGGSGCTHSHSHQSHSHKNEEHHQHSDSHKHEEHHQHSDSHKHEEHHEHDHHHHSHSHKHEECNHNHDHEHQSHSHNHEECNHNHDHHSDHQPEKSEKKEHRHIDHNMEGIFLHVLADTMGSVGVVISTLLIKYKGWLVADPASSIFISILIIASVIPLLRNSAEILLQRVPRAHRQDLKEAMRNILKTKGVCSIQRLHVWSFTNSDVVATLHLLVSADSDKTDTKLQVSRLLEDAGVKDWTLQVESVNS

SEQ ID NO: 91568 - protein, 405 aa, Arabidopsis thaliana
  peptide (1)..(405): Ceres Seq. ID no. 12728302
  misc_feature (27)..(160): Pfam Name: Cation efflux family Pfam Description: Cation efflux family
  misc_feature (1)..(160): Homolog of NCBI NO: 25303192 NR Description: probable cation transport protein [imported] - thaliana >gi|4895164|gb|AAD32753.1| putative cation transport
  misc_feature (254)..(405): Homolog of NCBI NO: 25303192 NR Description: probable cation transport protein [imported] - thaliana >gi|4895164|gb|AAD32753.1| putative cation transport
  misc_feature (1)..(260): Homolog of NCBI NO: 34904948 NR Description: putative disease resistance protein homolog
  misc_feature (207)..(401): Homolog of NCBI NO: 37537241 NR Description: Slc30a5 protein [Mus musculus]
  misc_feature (3)..(180): Homolog of NCBI NO: 37537241 NR Description: Slc30a5 protein [Mus musculus]
  misc_feature (149)..(403): Homolog of NCBI NO: 34904948 NR Description: putative disease resistance protein homolog
  misc_feature (207)..(401): Homolog of NCBI NO: 26352918 NR Description: unnamed protein product [Mus musculus]
  misc_feature (3)..(180): Homolog of NCBI NO: 26352918 NR Description: unnamed protein product [Mus musculus]
  misc_feature (207)..(401): Homolog of NCBI NO: 26341774 NR Description: unnamed protein product [Mus musculus]
  misc_feature (3)..(180): Homolog of NCBI NO: 26341774 NR Description: unnamed protein product [Mus musculus]
MESPESFSTMFMKPIRHILSEKKSRKIALFLLINTAYMVVEFVAGFMSNSLGLISDACHMLFDCAALAIGLYASYISRLPANHQYNYGRGRFEVLSGYVNAVFLVLVGALIVLESIERILDPQEISTNSLLVVSVGGLLVNIVGLIFFHEEHHHAHGGSGCTHSHSHQSHSHKNEEHHQHSDSHKHEEHHQHSDSHKHEEHHEHDHHHHSHSHKHEECNHNHDHEHQSHSHNHEECNHNHDHHSDHQPEKSEKKEHRHIDHNMEGIFLHVLADTMGSVGVVISTLLIKYKGWLVADPASSIFISILIIASVIPLLRNSAEILLQRVPRAHRQDLKEAMRNILKTKGVCSIQRLHVWSFTNSDVVATLHLLVSADSDKTDTKLQVSRLLEDAGVKDWTLQVESVNS

SEQ ID NO: 91569 - DNA, 2322 bp, Arabidopsis thaliana
  misc_feature (1)..(2322): Ceres Seq. ID no. 12728312
  misc_feature: MA Experiment ID: 20000171 Result: Up-regulated in Transcription
  misc_feature: MA Experiment 20000171 PARAMETER Experiment Name: At_42deg_Heat_P Parameter: Age (day) Value: 14
  misc_feature: MA Experiment 20000171 PARAMETER Experiment Name: At_42deg_Heat_P Parameter: Organism Value: A. thaliana
  misc_feature: MA Experiment 20000171 PARAMETER Experiment Name: At_42deg_Heat_P Parameter: Plant Line Value: WS
  misc_feature: MA Experiment 20000171 PARAMETER Experiment Name: At_42deg_Heat_P Parameter: Temperature (deg C) Value: 42 vs. 22
  misc_feature: MA Experiment 20000171 PARAMETER Experiment Name: At_42deg_Heat_P Parameter: Timepoint (hr) Value: 1
  misc_feature: MA Experiment 20000171 PARAMETER Experiment Name: At_42deg_Heat_P Parameter: Tissue Value: Aerial
  misc_feature: MA Experiment ID: 20000173 Result: Up-regulated in Transcription
  misc_feature: MA Experiment 20000173 PARAMETER Experiment Name: At_42deg_Heat_P Parameter: Age (day) Value: 14
  misc_feature: MA Experiment 20000173 PARAMETER Experiment Name: At_42deg_Heat_P Parameter: Organism Value: A. thaliana
  misc_feature: MA Experiment 20000173 PARAMETER Experiment Name: At_42deg_Heat_P Parameter: Plant Line Value: WS
  misc_feature: MA Experiment 20000173 PARAMETER Experiment Name: At_42deg_Heat_P Parameter: Temperature (deg C) Value: 42 vs. 22
  misc_feature: MA Experiment 20000173 PARAMETER Experiment Name: At_42deg_Heat_P Parameter: Timepoint (hr) Value: 6
  misc_feature: MA Experiment 20000173 PARAMETER Experiment Name: At_42deg_Heat_P Parameter: Tissue Value: Aerial
  misc_feature: MA Experiment ID: 20000184 Result: Down-regulated in Transcription
  misc_feature: MA Experiment 20000184 PARAMETER Experiment Name: At_Shoots__P Parameter: Age (day) Value: 7
  misc_feature: MA Experiment 20000184 PARAMETER Experiment Name: At_Shoots__P Parameter: Tissue Value: Shoots vs. Whole Plant
atgagtgtagtgggatttgatgttgggaatgagaactgtgttatcgcagttgcaaagcaacgagggatcgacgttttgttgaacgatgaatcgaaccgagaaaatcctgctatggtttcctttggtgagaagcagagattcatgggtgctgctgctgctgcctctgctactatgcatcccaagtcaaccatttctcagttaaagagattgatcggtaggaaattcagggagcctgatgttcagaatgatctgaggttgtttccttttgaaacttctgaagactctgatggtggaattcaaattcggcttcggtatatgggtgagatacagagcttcagtccggtgcagatattaggcatgttgctttcacatttgaagcagattgcagagaagagtctcaaaacgcctgtttcagactgtgtcattgggattccatcctactttacaaactcacaaagacttgcctatttggatgctgcagccattgctggcctgaggccattgagattgatgcatgattctaccgccactgcacttggatatggtatatacaagacagatttggtagctaactcgagccctacttacattgtgtttatcgatatcggtcactgtgatacacaagtgtgtgtggcatcgtttgagtctggaagcatgagagtccgttctcatgcttttgatagaaacttgggcgggagagattttgatgaggttctcttcaaccactttgcccttgaatttaaggagaaatacaacatagatgtatatacaaataccaaggcgtgtgttaggttaagggcatcgtgtgagaaagttaaaaaggtcttgagtgcaaatgctgaggcacagctgaatattgaatgtctgatggaggagaaggacgtgaggagcttcatcaagagagaagagtttgagcagttgtcagcaggcttgttggagagattaattgtaccgtgtcaaaaggctttggctgactctggtctaagtttggatcaaatccactctgtggagctagttggttcagggtcccgcattccagctatatctaagatgctaagctcgttgtttaagagggagctaggcaggactgtgaatgcaagtgagtgcgtagctcgaggatgtgcgcttcaatgtgcaatgctcagtccagtttttcgagttagagattatgaggttcaagattcttaccctttcgcaatcggcttttcatctgataaaggtcccataaacacaccatcgaatgaattgctctttccgaaaggccagatcttcccaagtgtaaaggttcttactctacatagggaaaacactttccagttggaagccttttatgcaaaccataatgaactatcaccagatataccaacacagataagcagttttatgattgggccttttcatatatcgcacggagaagcggcacgtgtcaaagtaagagttcagctaaatctccacgggattgtcacgattgattcagctacgcttgagtctaaactttccgtttctgaacagctaatagaatatcataaggagaatataacttctgaagagatgatatctgaagagaatcatcaatcttctgctatgaaggatggctctttggacccttcgtcaggttctattggtaatgagcctaaggctatcaaaagaatggaaattccagttgttgcgaacgtgtctggtgcattgacgaaggatgagttatcggaggccaaacagagagagaactctttagtggagcaagatctgaagatggaatcgacaaaggataagaaaaatgctcttgaatcttttgtctatgagatgcgtgataagatgttaaatacatatcggaacactgcaaccgagtcagaacgggaatgcatagctagaaatcttcaggaaacagaggaatggctatatgaagatggtgatgatgaatctgaaaatgcgtacatcgagaagttgaatgatgtcaaaaagctcatcgatcctattgaaaaccggttcaaagatggagaagagcgagttcaagcatcaaaagatcttctgaaaactattgcagataaccgaatggctgcagagtctcttcctcctccaagaaagaatgcggttctcgatgaatgccataaagctgagaggtggctccacgagaaaaccacagaacaggaatctttacccaaagacgctaatccagagctgcaatctgctgaaatcaggagaaaagctgatgctctaaacgcgacatgcaagtacattgggaaatcaaactctccccccgcgaaaccggaacataacggatcatacggaagtagaaaatcagatgatatggagcttgattga

SEQ ID NO: 91570 - protein, 773 aa, Arabidopsis thaliana
  peptide (1)..(773): Ceres Seq. ID no. 12728313
  misc_feature (3)..(389): Pfam Name: Hsp70 protein Pfam Description: Hsp70 protein
  misc_feature (1)..(682): Homolog of NCBI NO: 7450157 NR Description: heat shock protein 91 - Arabidopsis thaliana
  misc_feature (1)..(682): Homolog of NCBI NO: 15220026 NR Description: putative heat-shock protein; protein id: supported by cDNA: gi_19310472 [Arabidopsis thaliana]
  misc_feature (1)..(682): Homolog of NCBI NO: 17473863 NR Description: putative heat-shock protein [Arabidopsis thaliana]
  misc_feature (1)..(631): Homolog of NCBI NO: 30699465 NR Description: heat shock protein hsp70, putative [Arabidopsis
  misc_feature (1)..(671): Homolog of NCBI NO: 34906196 NR Description: putative heat-shock protein [Oryza sativa
  misc_feature (1)..(631): Homolog of NCBI NO: 30699467 NR Description: heat shock protein hsp70, putative [Arabidopsis
  misc_feature (1)..(771): Homolog of NCBI NO: 5729879 NR Description: heat shock 105kD; heat shock 105kD alpha; heat
  misc_feature (1)..(768): Homolog of NCBI NO: 1001011 NR Description: heat shock protein 105 kDa beta (42 degrees
  misc_feature (1)..(737): Homolog of NCBI NO: 40747009 NR Description: hypothetical protein AN1047.2 [Aspergillus
  misc_feature (1)..(679): Homolog of NCBI NO: 2495362 NR Description: 97 KDA HEAT SHOCK PROTEIN (HEAT SHOCK PROTEIN >gi|1568627|gb|AAB09038.1| heat shock protein 110
MSVVGFDVGNENCVIAVAKQRGIDVLLNDESNRENPAMVSFGEKQRFMGAAAAASATMHPKSTISQLKRLIGRKFREPDVQNDLRLFPFETSEDSDGGIQIRLRYMGEIQSFSPVQILGMLLSHLKQIAEKSLKTPVSDCVIGIPSYFTNSQRLAYLDAAAIAGLRPLRLMHDSTATALGYGIYKTDLVANSSPTYIVFIDIGHCDTQVCVASFESGSMRVRSHAFDRNLGGRDFDEVLFNHFALEFKEKYNIDVYTNTKACVRLRASCEKVKKVLSANAEAQLNIECLMEEKDVRSFIKREEFEQLSAGLLERLIVPCQKALADSGLSLDQIHSVELVGSGSRIPAISKMLSSLFKRELGRTVNASECVARGCALQCAMLSPVFRVRDYEVQDSYPFAIGFSSDKGPINTPSNELLFPKGQIFPSVKVLTLHRENTFQLEAFYANHNELSPDIPTQISSFMIGPFHISHGEAARVKVRVQLNLHGIVTIDSATLESKLSVSEQLIEYHKENITSEEMISEENHQSSAMKDGSLDPSSGSIGNEPKAIKRMEIPVVANVSGALTKDELSEAKQRENSLVEQDLKMESTKDKKNALESFVYEMRDKMLNTYRNTATESERECIARNLQETEEWLYEDGDDESENAYIEKLNDVKKLIDPIENRFKDGEERVQASKDLLKTIADNRMAAESLPPPRKNAVLDECHKAERWLHEKTTEQESLPKDANPELQSAEIRRKADALNATCKYIGKSNSPPAKPEHNGSYGSRKSDDMELD

SEQ ID NO: 91571 - protein, 736 aa, Arabidopsis thaliana
  peptide (1)..(736): Ceres Seq. ID no. 12728314
  misc_feature (1)..(352): Pfam Name: Hsp70 protein Pfam Description: Hsp70 protein
  misc_feature (1)..(645): Homolog of NCBI NO: 7450157 NR Description: heat shock protein 91 - Arabidopsis thaliana
  misc_feature (1)..(645): Homolog of NCBI NO: 15220026 NR Description: putative heat-shock protein; protein id: supported by cDNA: gi_19310472 [Arabidopsis thaliana]
  misc_feature (1)..(645): Homolog of NCBI NO: 17473863 NR Description: putative heat-shock protein [Arabidopsis thaliana]
  misc_feature (1)..(594): Homolog of NCBI NO: 30699465 NR Description: heat shock protein hsp70, putative [Arabidopsis
  misc_feature (1)..(634): Homolog of NCBI NO: 34906196 NR Description: putative heat-shock protein [Oryza sativa
  misc_feature (1)..(594): Homolog of NCBI NO: 30699467 NR Description: heat shock protein hsp70, putative [Arabidopsis
  misc_feature (1)..(734): Homolog of NCBI NO: 5729879 NR Description: heat shock 105kD; heat shock 105kD alpha; heat
  misc_feature (1)..(731): Homolog of NCBI NO: 1001011 NR Description: heat shock protein 105 kDa beta (42 degrees
  misc_feature (1)..(700): Homolog of NCBI NO: 40747009 NR Description: hypothetical protein AN1047.2 [Aspergillus
  misc_feature (1)..(642): Homolog of NCBI NO: 2495362 NR Description: 97 KDA HEAT SHOCK PROTEIN (HEAT SHOCK PROTEIN >gi|1568627|gb|AAB09038.1| heat shock protein 110
MVSFGEKQRFMGAAAAASATMHPKSTISQLKRLIGRKFREPDVQNDLRLFPFETSEDSDGGIQIRLRYMGEIQSFSPVQILGMLLSHLKQIAEKSLKTPVSDCVIGIPSYFTNSQRLAYLDAAAIAGLRPLRLMHDSTATALGYGIYKTDLVANSSPTYIVFIDIGHCDTQVCVASFESGSMRVRSHAFDRNLGGRDFDEVLFNHFALEFKEKYNIDVYTNTKACVRLRASCEKVKKVLSANAEAQLNIECLMEEKDVRSFIKREEFEQLSAGLLERLIVPCQKALADSGLSLDQIHSVELVGSGSRIPAISKMLSSLFKRELGRTVNASECVARGCALQCAMLSPVFRVRDYEVQDSYPFAIGFSSDKGPINTPSNELLFPKGQIFPSVKVLTLHRENTFQLEAFYANHNELSPDIPTQISSFMIGPFHISHGEAARVKVRVQLNLHGIVTIDSATLESKLSVSEQLIEYHKENITSEEMISEENHQSSAMKDGSLDPSSGSIGNEPKAIKRMEIPVVANVSGALTKDELSEAKQRENSLVEQDLKMESTKDKKNALESFVYEMRDKMLNTYRNTATESERECIARNLQETEEWLYEDGDDESENAYIEKLNDVKKLIDPIENRFKDGEERVQASKDLLKTIADNRMAAESLPPPRKNAVLDECHKAERWLHEKTTEQESLPKDANPELQSAEIRRKADALNATCKYIGKSNSPPAKPEHNGSYGSRKSDDMELD

SEQ ID NO: 91572 - protein, 726 aa, Arabidopsis thaliana
  peptide (1)..(726): Ceres Seq. ID no. 12728315
  misc_feature (1)..(342): Pfam Name: Hsp70 protein Pfam Description: Hsp70 protein
  misc_feature (1)..(635): Homolog of NCBI NO: 7450157 NR Description: heat shock protein 91 - Arabidopsis thaliana
  misc_feature (1)..(635): Homolog of NCBI NO: 15220026 NR Description: putative heat-shock protein; protein id: supported by cDNA: gi_19310472 [Arabidopsis thaliana]
  misc_feature (1)..(635): Homolog of NCBI NO: 17473863 NR Description: putative heat-shock protein [Arabidopsis thaliana]
  misc_feature (1)..(584): Homolog of NCBI NO: 30699465 NR Description: heat shock protein hsp70, putative [Arabidopsis
  misc_feature (1)..(624): Homolog of NCBI NO: 34906196 NR Description: putative heat-shock protein [Oryza sativa
  misc_feature (1)..(584): Homolog of NCBI NO: 30699467 NR Description: heat shock protein hsp70, putative [Arabidopsis
  misc_feature (1)..(724): Homolog of NCBI NO: 5729879 NR Description: heat shock 105kD; heat shock 105kD alpha; heat
  misc_feature (1)..(721): Homolog of NCBI NO: 1001011 NR Description: heat shock protein 105 kDa beta (42 degrees
  misc_feature (1)..(690): Homolog of NCBI NO: 40747009 NR Description: hypothetical protein AN1047.2 [Aspergillus
  misc_feature (1)..(632): Homolog of NCBI NO: 2495362 NR Description: 97 KDA HEAT SHOCK PROTEIN (HEAT SHOCK PROTEIN >gi|1568627|gb|AAB09038.1| heat shock protein 110
MGAAAAASATMHPKSTISQLKRLIGRKFREPDVQNDLRLFPFETSEDSDGGIQIRLRYMGEIQSFSPVQILGMLLSHLKQIAEKSLKTPVSDCVIGIPSYFTNSQRLAYLDAAAIAGLRPLRLMHDSTATALGYGIYKTDLVANSSPTYIVFIDIGHCDTQVCVASFESGSMRVRSHAFDRNLGGRDFDEVLFNHFALEFKEKYNIDVYTNTKACVRLRASCEKVKKVLSANAEAQLNIECLMEEKDVRSFIKREEFEQLSAGLLERLIVPCQKALADSGLSLDQIHSVELVGSGSRIPAISKMLSSLFKRELGRTVNASECVARGCALQCAMLSPVFRVRDYEVQDSYPFAIGFSSDKGPINTPSNELLFPKGQIFPSVKVLTLHRENTFQLEAFYANHNELSPDIPTQISSFMIGPFHISHGEAARVKVRVQLNLHGIVTIDSATLESKLSVSEQLIEYHKENITSEEMISEENHQSSAMKDGSLDPSSGSIGNEPKAIKRMEIPVVANVSGALTKDELSEAKQRENSLVEQDLKMESTKDKKNALESFVYEMRDKMLNTYRNTATESERECIARNLQETEEWLYEDGDDESENAYIEKLNDVKKLIDPIENRFKDGEERVQASKDLLKTIADNRMAAESLPPPRKNAVLDECHKAERWLHEKTTEQESLPKDANPELQSAEIRRKADALNATCKYIGKSNSPPAKPEHNGSYGSRKSDDMELD

SEQ ID NO: 91573 - DNA, 1943 bp, Arabidopsis thaliana
  misc_feature (1)..(1943): Ceres Seq. ID no. 12728316
  misc_feature: MA Experiment ID: 20000314 Result: Up-regulated in Transcription
  misc_feature: MA Experiment 20000314 PARAMETER Experiment Name: At_14day_Shoots-Roots_Sub_P Parameter: Age (day) Value: 14
  misc_feature: MA Experiment 20000314 PARAMETER Experiment Name: At_14day_Shoots-Roots_Sub_P Parameter: Organism Value: A. thaliana
  misc_feature: MA Experiment 20000314 PARAMETER Experiment Name: At_14day_Shoots-Roots_Sub_P Parameter: Plant Line Value: WS
  misc_feature: MA Experiment 20000314 PARAMETER Experiment Name: At_14day_Shoots-Roots_Sub_P Parameter: Tissue Value: Roots vs. Whole Plant
  misc_feature: MA Experiment ID: 20000327 Result: Down-regulated in Transcription
  misc_feature: MA Experiment 20000327 PARAMETER Experiment Name: At_42deg_Heat_Sub_P Parameter: Age (day) Value: 14
  misc_feature: MA Experiment 20000327 PARAMETER Experiment Name: At_42deg_Heat_Sub_P Parameter: Organism Value: A. thaliana
  misc_feature: MA Experiment 20000327 PARAMETER Experiment Name: At_42deg_Heat_Sub_P Parameter: Plant Line Value: WS
  misc_feature: MA Experiment 20000327 PARAMETER Experiment Name: At_42deg_Heat_Sub_P Parameter: Temperature (deg C) Value: 42 vs. 22
  misc_feature: MA Experiment 20000327 PARAMETER Experiment Name: At_42deg_Heat_Sub_P Parameter: Timepoint (hr) Value: 1
  misc_feature: MA Experiment 20000327 PARAMETER Experiment Name: At_42deg_Heat_Sub_P Parameter: Tissue Value: Aerial
  misc_feature: MA Experiment ID: 20000328 Result: Down-regulated in Transcription
  misc_feature: MA Experiment 20000328 PARAMETER Experiment Name: At_42deg_Heat_Sub_P Parameter: Age (day) Value: 14
  misc_feature: MA Experiment 20000328 PARAMETER Experiment Name: At_42deg_Heat_Sub_P Parameter: Organism Value: A. thaliana
  misc_feature: MA Experiment 20000328 PARAMETER Experiment Name: At_42deg_Heat_Sub_P Parameter: Plant Line Value: WS
  misc_feature: MA Experiment 20000328 PARAMETER Experiment Name: At_42deg_Heat_Sub_P Parameter: Temperature (deg C) Value: 42 vs. 22
  misc_feature: MA Experiment 20000328 PARAMETER Experiment Name: At_42deg_Heat_Sub_P Parameter: Timepoint (hr) Value: 6
  misc_feature: MA Experiment 20000328 PARAMETER Experiment Name: At_42deg_Heat_Sub_P Parameter: Tissue Value: Aerial
  misc_feature: MA Experiment ID: 20000349 Result: Down-regulated in Transcription
  misc_feature: MA Experiment 20000349 PARAMETER Experiment Name: At_100uM_ABA_Sub_P Parameter: Age (day) Value: 14
  misc_feature: MA Experiment 20000349 PARAMETER Experiment Name: At_100uM_ABA_Sub_P Parameter: Organism Value: A. thaliana
  misc_feature: MA Experiment 20000349 PARAMETER Experiment Name: At_100uM_ABA_Sub_P Parameter: Plant Line Value: WS
  misc_feature: MA Experiment 20000349 PARAMETER Experiment Name: At_100uM_ABA_Sub_P Parameter: Timepoint (hr) Value: 6
  misc_feature: MA Experiment 20000349 PARAMETER Experiment Name: At_100uM_ABA_Sub_P Parameter: Tissue Value: Aerial
  misc_feature: MA Experiment 20000349 PARAMETER Experiment Name: At_100uM_ABA_Sub_P Parameter: Treatment Value: 100uM ABA vs. No Treatment
  misc_feature: MA Experiment ID: 20000355 Result: Up-regulated in Transcription
  misc_feature: MA Experiment 20000355 PARAMETER Experiment Name: At_Siliques_Sub_P Parameter: Age (day) Value: 21
  misc_feature: MA Experiment 20000355 PARAMETER Experiment Name: At_Siliques_Sub_P Parameter: Organism Value: A. thaliana
  misc_feature: MA Experiment 20000355 PARAMETER Experiment Name: At_Siliques_Sub_P Parameter: Plant Line Value: WS
  misc_feature: MA Experiment 20000355 PARAMETER Experiment Name: At_Siliques_Sub_P Parameter: Tissue Value: Less Than 5mm Siliques vs. Whole Plant
  misc_feature: MA Experiment ID: 20000440 Result: Up-regulated in Transcription
  misc_feature: MA Experiment 20000440 PARAMETER Experiment Name: At_Closed-Flower__Sub_P Parameter: Tissue Value: Closed Flower vs. Whole Plant
agacttaaacgaagatagagatagagagagagacgaagttttgtttttattttttcataaatatttgttttctttttggatatttaaaaaaaaaatgggttcggaagcgaccaccgccgtgaacaaccttcagcaaccgttactggagtcaacaaaatcagaagctgacttcaggatggagagtgtattaacggacacacacttgtcatattttcggcggatctaccttgcgtcgttgatcgagatgaagtaccttttccacttggcggctccggcgatctttgtctacgtcatcaacaatggcatgtctatgctcactcgtatcttcgctggtcgtttgggaagtatgcaactcgctgccgcttctctaggaaacagcggtttcaatatgttcactcttggtctcatgcttggaatgggaagtgcagtggagacattatgtgggcaagcgcatggagctcatagatacgacatgcttggagtctacttacaaagatccacgattgttcttgtcataaccggacttccaatgactttactcttcatcttctcaaaacctctcctcatttccttaggcgagccagctgacgtagcatcagtggcatcagtattcgtctacggtatgatcccaatgatcttcgcttacgccgtcaacttccccatccaaaagtttctccagtcgcaaagcatcgtcacgccgagtgcttatatctcagccgcaacactagtcatccacttaatcctctcttggctctctgtctttaagtttggttggggcttacttggtctctccgttgttcatagtctctcgtggtggatcattgtcctcgctcagattatttacattaagataagtccaagatgtcgccggacttgggatggttttagttggaaagcttttgatggtctttgggactttttccagttatccgcagcttccgccgtcatgctctgccttgaatcttggtactctcagattcttgttctcctcgccggacttcttaaagaccctgaacttgctttggattctctagcaatctgcatgtcaatctctgcaatgtcgttcatggtgtcagttggattcaacgcagctgccagtgtgagagttagtaacgaattaggtgctggaaatccaagatcagcagcattttcaaccgcggtaactacaggagtgtcatttttactgtcattgtttgaagccatcgtgatcctctcgtggcgacatgtcatcagttacatttttacggatagtccagcggttgcggaagccgtcgccgagctctctcctttcttagccattaccatagttctcaatggagttcaacctgttttatctggtgtggccgttggatgtggatggcaagcatatgtagcttacgttaacattggatgttattacattgtggggattccgattggttatgttcttggtttcacctatgatatgggagctaggggaatatggacagggatgattggtggcacactcatgcaaactattatcttggtcattgtcacattccgaaccgattgggataaagaggtggagaaggcttcgagacgattggaccagtgggaggacacatctccgcttcttaagcaataaaataaataaattgatttttttttcaaaaaaaagaaaaaattagcttggggagattcaaagatcaattatataaataatttttggttttccccaaaatgatttttaaatggataaaaccctagttagttattcaagagatatgcgaatctcttgattaatgaattggaaaatcgattgttttctgagggggttagagtgaagagaaggatgccaatgtacatctatttttgtaagagaaaatattgagaagtgagaatgatatattgaaaaaaatgttgtattgtatggaagagtgaatttgttgtaatcgtttcttgtatgaaataaatcagataat

SEQ ID NO: 91574 - protein, 534 aa, Arabidopsis thaliana
  peptide (1)..(534): Ceres Seq. ID no. 12728317
  misc_feature (32)..(534): Homolog of NCBI NO: 15221073 NR Description: unknown protein; protein id: At1g11670.1
  misc_feature (32)..(534): Homolog of NCBI NO: 22655139 NR Description: unknown protein [Arabidopsis thaliana]
  misc_feature (32)..(534): Homolog of NCBI NO: 18407368 NR Description: expressed protein; protein id: At1g61890.1, by cDNA: gi_13272458, supported by cDNA: gi_15028186, supported cDNA: gi_15081772, supported by cDNA: gi_16209723 [Arabidopsis
  misc_feature (32)..(534): Homolog of NCBI NO: 15081773 NR Description: At1g61890/F8K4_9 [Arabidopsis thaliana]
  misc_feature (34)..(531): Homolog of NCBI NO: 18415793 NR Description: putative protein; protein id: At4g21910.1 thaliana] >gi|15809935|gb|AAL06895.1| AT4g21910/T8O5_120 thaliana] >gi|22137012|gb|AAM91351.1| At4g21910/T8O5_120
  misc_feature (34)..(531): Homolog of NCBI NO: 21553843 NR Description: unknown [Arabidopsis thaliana]
  misc_feature (41)..(527): Homolog of NCBI NO: 15233127 NR Description: integral membrane protein, putative; protein id: supported by cDNA: gi_20466555 [Arabidopsis thaliana] gb|AAC28507.1~gene_id:MIL23.25~strong similarity to unknown
  misc_feature (41)..(527): Homolog of NCBI NO: 20466556 NR Description: integral membrane protein, putative [Arabidopsis
  misc_feature (37)..(494): Homolog of NCBI NO: 7487826 NR Description: hypothetical protein T8O5.120 - Arabidopsis >gi|2894569|emb|CAA17158.1| putative protein [Arabidopsis >gi|7269036|emb|CAB79146.1| putative protein [Arabidopsis
  misc_feature (102)..(524): Homolog of NCBI NO: 15234633 NR Description: putative protein; protein id: At4g21900.1
DLNEDRDRERDEVLFLFFHKYLFSFWIFKKKMGSEATTAVNNLQQPLLESTKSEADFRMESVLTDTHLSYFRRIYLASLIEMKYLFHLAAPAIFVYVINNGMSMLTRIFAGRLGSMQLAAASLGNSGFNMFTLGLMLGMGSAVETLCGQAHGAHRYDMLGVYLQRSTIVLVITGLPMTLLFIFSKPLLISLGEPADVASVASVFVYGMIPMIFAYAVNFPIQKFLQSQSIVTPSAYISAATLVIHLILSWLSVFKFGWGLLGLSVVHSLSWWIIVLAQIIYIKISPRCRRTWDGFSWKAFDGLWDFFQLSAASAVMLCLESWYSQILVLLAGLLKDPELALDSLAICMSISAMSFMVSVGFNAAASVRVSNELGAGNPRSAAFSTAVTTGVSFLLSLFEAIVILSWRHVISYIFTDSPAVAEAVAELSPFLAITIVLNGVQPVLSGVAVGCGWQAYVAYVNIGCYYIVGIPIGYVLGFTYDMGARGIWTGMIGGTLMQTIILVIVTFRTDWDKEVEKASRRLDQWEDTSPLLKQ

SEQ ID NO: 91575 - protein, 503 aa, Arabidopsis thaliana
  peptide (1)..(503): Ceres Seq. ID no. 12728318
  misc_feature (1)..(503): Homolog of NCBI NO: 15221073 NR Description: unknown protein; protein id: At1g11670.1
  misc_feature (1)..(503): Homolog of NCBI NO: 22655139 NR Description: unknown protein [Arabidopsis thaliana]
  misc_feature (1)..(503): Homolog of NCBI NO: 18407368 NR Description: expressed protein; protein id: At1g61890.1, by cDNA: gi_13272458, supported by cDNA: gi_15028186, supported cDNA: gi_15081772, supported by cDNA: gi_16209723 [Arabidopsis
  misc_feature (1)..(503): Homolog of NCBI NO: 15081773 NR Description: At1g61890/F8K4_9 [Arabidopsis thaliana]
  misc_feature (3)..(500): Homolog of NCBI NO: 18415793 NR Description: putative protein; protein id: At4g21910.1 thaliana] >gi|15809935|gb|AAL06895.1| AT4g21910/T8O5_120 thaliana] >gi|22137012|gb|AAM91351.1| At4g21910/T8O5_120
  misc_feature (3)..(500): Homolog of NCBI NO: 21553843 NR Description: unknown [Arabidopsis thaliana]
  misc_feature (10)..(496): Homolog of NCBI NO: 15233127 NR Description: integral membrane protein, putative; protein id: supported by cDNA: gi_20466555 [Arabidopsis thaliana] gb|AAC28507.1~gene_id:MIL23.25~strong similarity to unknown
  misc_feature (10)..(496): Homolog of NCBI NO: 20466556 NR Description: integral membrane protein, putative [Arabidopsis
  misc_feature (6)..(463): Homolog of NCBI NO: 7487826 NR Description: hypothetical protein T8O5.120 - Arabidopsis >gi|2894569|emb|CAA17158.1| putative protein [Arabidopsis >gi|7269036|emb|CAB79146.1| putative protein [Arabidopsis
  misc_feature (71)..(493): Homolog of NCBI NO: 15234633 NR Description: putative protein; protein id: At4g21900.1
MGSEATTAVNNLQQPLLESTKSEADFRMESVLTDTHLSYFRRIYLASLIEMKYLFHLAAPAIFVYVINNGMSMLTRIFAGRLGSMQLAAASLGNSGFNMFTLGLMLGMGSAVETLCGQAHGAHRYDMLGVYLQRSTIVLVITGLPMTLLFIFSKPLLISLGEPADVASVASVFVYGMIPMIFAYAVNFPIQKFLQSQSIVTPSAYISAATLVIHLILSWLSVFKFGWGLLGLSVVHSLSWWIIVLAQIIYIKISPRCRRTWDGFSWKAFDGLWDFFQLSAASAVMLCLESWYSQILVLLAGLLKDPELALDSLAICMSISAMSFMVSVGFNAAASVRVSNELGAGNPRSAAFSTAVTTGVSFLLSLFEAIVILSWRHVISYIFTDSPAVAEAVAELSPFLAITIVLNGVQPVLSGVAVGCGWQAYVAYVNIGCYYIVGIPIGYVLGFTYDMGARGIWTGMIGGTLMQTIILVIVTFRTDWDKEVEKASRRLDQWEDTSPLLKQ

SEQ ID NO: 91576 - protein, 476 aa, Arabidopsis thaliana
  peptide (1)..(476): Ceres Seq. ID no. 12728319
  misc_feature (1)..(476): Homolog of NCBI NO: 15221073 NR Description: unknown protein; protein id: At1g11670.1
  misc_feature (1)..(476): Homolog of NCBI NO: 22655139 NR Description: unknown protein [Arabidopsis thaliana]
  misc_feature (1)..(476): Homolog of NCBI NO: 18407368 NR Description: expressed protein; protein id: At1g61890.1, by cDNA: gi_13272458, supported by cDNA: gi_15028186, supported cDNA: gi_15081772, supported by cDNA: gi_16209723 [Arabidopsis
  misc_feature (1)..(476): Homolog of NCBI NO: 15081773 NR Description: At1g61890/F8K4_9 [Arabidopsis thaliana]
  misc_feature (1)..(473): Homolog of NCBI NO: 18415793 NR Description: putative protein; protein id: At4g21910.1 thaliana] >gi|15809935|gb|AAL06895.1| AT4g21910/T8O5_120 thaliana] >gi|22137012|gb|AAM91351.1| At4g21910/T8O5_120
  misc_feature (1)..(473): Homolog of NCBI NO: 21553843 NR Description: unknown [Arabidopsis thaliana]
  misc_feature (1)..(469): Homolog of NCBI NO: 15233127 NR Description: integral membrane protein, putative; protein id: supported by cDNA: gi_20466555 [Arabidopsis thaliana] gb|AAC28507.1~gene_id:MIL23.25~strong similarity to unknown
  misc_feature (1)..(469): Homolog of NCBI NO: 20466556 NR Description: integral membrane protein, putative [Arabidopsis
  misc_feature (1)..(436): Homolog of NCBI NO: 7487826 NR Description: hypothetical protein T8O5.120 - Arabidopsis >gi|2894569|emb|CAA17158.1| putative protein [Arabidopsis >gi|7269036|emb|CAB79146.1| putative protein [Arabidopsis
  misc_feature (44)..(466): Homolog of NCBI NO: 15234633 NR Description: putative protein; protein id: At4g21900.1
MESVLTDTHLSYFRRIYLASLIEMKYLFHLAAPAIFVYVINNGMSMLTRIFAGRLGSMQLAAASLGNSGFNMFTLGLMLGMGSAVETLCGQAHGAHRYDMLGVYLQRSTIVLVITGLPMTLLFIFSKPLLISLGEPADVASVASVFVYGMIPMIFAYAVNFPIQKFLQSQSIVTPSAYISAATLVIHLILSWLSVFKFGWGLLGLSVVHSLSWWIIVLAQIIYIKISPRCRRTWDGFSWKAFDGLWDFFQLSAASAVMLCLESWYSQILVLLAGLLKDPELALDSLAICMSISAMSFMVSVGFNAAASVRVSNELGAGNPRSAAFSTAVTTGVSFLLSLFEAIVILSWRHVISYIFTDSPAVAEAVAELSPFLAITIVLNGVQPVLSGVAVGCGWQAYVAYVNIGCYYIVGIPIGYVLGFTYDMGARGIWTGMIGGTLMQTIILVIVTFRTDWDKEVEKASRRLDQWEDTSPLLKQ

SEQ ID NO: 91577 - DNA, 1155 bp, Arabidopsis thaliana
  misc_feature (1)..(1155): Ceres Seq. ID no. 12728327
  misc_feature: MA Experiment ID: 20000227 Result: Down-regulated in Transcription
  misc_feature: MA Experiment 20000227 PARAMETER Experiment Name: At_Root-Tips-vs-Tops_P Parameter: Tissue Value: Root Tips vs. Root Tops
  misc_feature: MA Experiment ID: 20000234 Result: Up-regulated in Transcription
  misc_feature: MA Experiment 20000234 PARAMETER Experiment Name: At_Siliques_P Parameter: Age (day) Value: 21
  misc_feature: MA Experiment 20000234 PARAMETER Experiment Name: At_Siliques_P Parameter: Organism Value: A. thaliana
  misc_feature: MA Experiment 20000234 PARAMETER Experiment Name: At_Siliques_P Parameter: Plant Line Value: WS
  misc_feature: MA Experiment 20000234 PARAMETER Experiment Name: At_Siliques_P Parameter: Tissue Value: Less Than 5mm Siliques vs. Whole Plant
  misc_feature: MA Experiment ID: 20000235 Result: Up-regulated in Transcription
  misc_feature: MA Experiment 20000235 PARAMETER Experiment Name: At_Siliques_P Parameter: Age (day) Value: 21
  misc_feature: MA Experiment 20000235 PARAMETER Experiment Name: At_Siliques_P Parameter: Organism Value: A. thaliana
  misc_feature: MA Experiment 20000235 PARAMETER Experiment Name: At_Siliques_P Parameter: Plant Line Value: WS
  misc_feature: MA Experiment 20000235 PARAMETER Experiment Name: At_Siliques_P Parameter: Tissue Value: 5-10mm Siliques vs. Whole Plant
  misc_feature: MA Experiment ID: 20000264 Result: Up-regulated in Transcription
  misc_feature: MA Experiment 20000264 PARAMETER Experiment Name: At_Open_Flower_P Parameter: Age (day) Value: 21
  misc_feature: MA Experiment 20000264 PARAMETER Experiment Name: At_Open_Flower_P Parameter: Plant Line Value: WS
  misc_feature: MA Experiment 20000264 PARAMETER Experiment Name: At_Open_Flower_P Parameter: Tissue Value: Open Flower vs. Whole Plant
  misc_feature: MA Experiment ID: 20000265 Result: Up-regulated in Transcription
  misc_feature: MA Experiment 20000265 PARAMETER Experiment Name: At_Open_Flower_P Parameter: Age (day) Value: 21
  misc_feature: MA Experiment 20000265 PARAMETER Experiment Name: At_Open_Flower_P Parameter: Plant Line Value: WS
  misc_feature: MA Experiment 20000265 PARAMETER Experiment Name: At_Open_Flower_P Parameter: Tissue Value: Closed Flower vs. Whole Plant
  misc_feature: MA Experiment ID: 20000286 Result: Up-regulated in Transcription
  misc_feature: MA Experiment 20000286 PARAMETER Experiment Name: At_Open_Flower_P Parameter: Age (day) Value: 21
  misc_feature: MA Experiment 20000286 PARAMETER Experiment Name: At_Open_Flower_P Parameter: Plant Line Value: WS
  misc_feature: MA Experiment 20000286 PARAMETER Experiment Name: At_Open_Flower_P Parameter: Tissue Value: Half Open vs. Whole Plant
  misc_feature: MA Experiment ID: 20000495 Result: Up-regulated in Transcription
  misc_feature: MA Experiment 20000495 PARAMETER Experiment Name: At_Guard_Cells_P Parameter: Harvest Date Value: 8/2/2002
  misc_feature: MA Experiment 20000495 PARAMETER Experiment Name: At_Guard_Cells_P Parameter: Organism Value: A. thaliana
  misc_feature: MA Experiment 20000495 PARAMETER Experiment Name: At_Guard_Cells_P Parameter: Tissue Value: Guard Cells vs. Leaves
  misc_feature: MA Experiment ID: 20001557 Result: Down-regulated in Transcription
  misc_feature: MA Experiment 20001557 PARAMETER Experiment Name: At_Drought_Soil_Dry_P Parameter: Age (day) Value: 27
  misc_feature: MA Experiment 20001557 PARAMETER Experiment Name: At_Drought_Soil_Dry_P Parameter: Organism Value: A. thaliana
  misc_feature: MA Experiment 20001557 PARAMETER Experiment Name: At_Drought_Soil_Dry_P Parameter: Plant Line Value: WS
  misc_feature: MA Experiment 20001557 PARAMETER Experiment Name: At_Drought_Soil_Dry_P Parameter: Post Timepoint (hr) Value: 3
  misc_feature: MA Experiment 20001557 PARAMETER Experiment Name: At_Drought_Soil_Dry_P Parameter: Post-Treatment Value: Re-Water vs. No Drought
  misc_feature: MA Experiment 20001557 PARAMETER Experiment Name: At_Drought_Soil_Dry_P Parameter: Timepoint (day) Value: 13
  misc_feature: MA Experiment 20001557 PARAMETER Experiment Name: At_Drought_Soil_Dry_P Parameter: Treatment Value: Drought vs. No Drought
  misc_feature: MA Experiment ID: 20001558 Result: Down-regulated in Transcription
  misc_feature: MA Experiment 20001558 PARAMETER Experiment Name: At_Drought_Soil_Dry_P Parameter: Age (day) Value: 27
  misc_feature: MA Experiment 20001558 PARAMETER Experiment Name: At_Drought_Soil_Dry_P Parameter: Organism Value: A. thaliana
  misc_feature: MA Experiment 20001558 PARAMETER Experiment Name: At_Drought_Soil_Dry_P Parameter: Plant Line Value: WS
  misc_feature: MA Experiment 20001558 PARAMETER Experiment Name: At_Drought_Soil_Dry_P Parameter: Post Timepoint (hr) Value: 6
  misc_feature: MA Experiment 20001558 PARAMETER Experiment Name: At_Drought_Soil_Dry_P Parameter: Post-Treatment Value: Re-Water vs. No Drought
  misc_feature: MA Experiment 20001558 PARAMETER Experiment Name: At_Drought_Soil_Dry_P Parameter: Timepoint (day) Value: 13
  misc_feature: MA Experiment 20001558 PARAMETER Experiment Name: At_Drought_Soil_Dry_P Parameter: Treatment Value: Drought vs. No Drought
atgtcattcaagaacagaggagattacaattttactccaagaaatgtagtttctagaaactctgtatttttcatgtgcctcgcaagtttctgccttggaatgttcttcactaacaggatgtggaatatagtacctgaagctagaggcatatcaagactctccaaactaagcttaagttccagtgattgcgataaaaagaatgttttggactatggtaacaacactatcgggatcttagataaatccatttcaaatttagagatgaaactagtagctgctagagctgaacgtgagtcattgtccgggaaatttaacatatccaatgaagctaagaaaagaaaatacttcatggttatcggtattaacacggcctttagtagtcgtaagagacgtgactctgtccggtcaacatggatgccacaaggagagaatcttaagaaacttgaagaagagaaaggcatcattgttcgctttgttataggacatagtgtgttgtcccacgggattcttgataaagctattgaagcagaagagaaaacacatggtgatttcttgagactggaacatacggagggatacatgaagttatctgccaagacaaagacgtttttcgctaccgctgtttccttgtgggatgcagaattctacatcaaagttgacgatgacgttcatgtgaatcttgcctccctcaagaaggctttatccgcacaccaaaacaagcctcgggtttatgttggttgcatgaagtctggtcccgtcctagccagaaagagtgtgaagtaccatgagccagagtattggaagtttggagaagtcgggaacaagtatttccgccacgccactggacagttttatgctatatctaaagatctagctacttacatactgataaaccaggatttactgcataagtatgcgaatgaagatgtttcgttgggatcttggttcatcggattgaatgtagaacatgttgatgaaaaaagactttgttgcagtacttctcaagattgtgaactaaaagcaatgatgggacatgtttgcgcggcgtcgttcgactggaaatgcagcggaatctgtcggtcggctgagaggatggccgacgttcacgaacgttgtggtgaacctcaaaatgcattatggacgtcaaattcctga

SEQ ID NO: 91578 - protein, 384 aa, Arabidopsis thaliana
  peptide (1)..(384): Ceres Seq. ID no. 12728328
  misc_feature (129)..(327): Pfam Name: Galactosyltransferase Pfam Description: Galactosyltransferase
  misc_feature (1)..(384): Homolog of NCBI NO: 15221085 NR Description: Avr9 elicitor response-like protein; protein id:
  misc_feature (1)..(339): Homolog of NCBI NO: 25370620 NR Description: hypothetical protein [imported] - Arabidopsis >gi|4835784|gb|AAD30250.1|AC007296_11 Strong similarity to Avr9 elicitor response protein from Nicotiana tabacum. EST
  misc_feature (79)..(382): Homolog of NCBI NO: 15220440 NR Description: putative AVR9 elicitor response protein; protein At1g05170.1, supported by cDNA: gi_14488077 [Arabidopsis
  misc_feature (1)..(114): Homolog of NCBI NO: 15220440 NR Description: putative AVR9 elicitor response protein; protein At1g05170.1, supported by cDNA: gi_14488077 [Arabidopsis
  misc_feature (73)..(380): Homolog of NCBI NO: 15225684 NR Description: unknown protein; protein id: At2g32430.1
  misc_feature (1)..(68): Homolog of NCBI NO: 15225684 NR Description: unknown protein; protein id: At2g32430.1
  misc_feature (74)..(379): Homolog of NCBI NO: 7485336 NR Description: hypothetical protein F10M23.280 - Arabidopsis >gi|4455217|emb|CAB36540.1| Avr9 elicitor response like protein thaliana] >gi|7269547|emb|CAB79549.1| Avr9 elicitor response like
  misc_feature (1)..(111): Homolog of NCBI NO: 7485336 NR Description: hypothetical protein F10M23.280 - Arabidopsis >gi|4455217|emb|CAB36540.1| Avr9 elicitor response like protein thaliana] >gi|7269547|emb|CAB79549.1| Avr9 elicitor response like
  misc_feature (74)..(379): Homolog of NCBI NO: 18416895 NR Description: Avr9 elicitor response like protein; protein id:
  misc_feature (1)..(111): Homolog of NCBI NO: 18416895 NR Description: Avr9 elicitor response like protein; protein id:
MSFKNRGDYNFTPRNVVSRNSVFFMCLASFCLGMFFTNRMWNIVPEARGISRLSKLSLSSSDCDKKNVLDYGNNTIGILDKSISNLEMKLVAARAERESLSGKFNISNEAKKRKYFMVIGINTAFSSRKRRDSVRSTWMPQGENLKKLEEEKGIIVRFVIGHSVLSHGILDKAIEAEEKTHGDFLRLEHTEGYMKLSAKTKTFFATAVSLWDAEFYIKVDDDVHVNLASLKKALSAHQNKPRVYVGCMKSGPVLARKSVKYHEPEYWKFGEVGNKYFRHATGQFYAISKDLATYILINQDLLHKYANEDVSLGSWFIGLNVEHVDEKRLCCSTSQDCELKAMMGHVCAASFDWKCSGICRSAERMADVHERCGEPQNALWTSNS

SEQ ID NO: 91579 - protein, 360 aa, Arabidopsis thaliana
  peptide (1)..(360): Ceres Seq. ID no. 12728329
  misc_feature (105)..(303): Pfam Name: Galactosyltransferase Pfam Description: Galactosyltransferase
  misc_feature (1)..(360): Homolog of NCBI NO: 15221085 NR Description: Avr9 elicitor response-like protein; protein id:
  misc_feature (1)..(315): Homolog of NCBI NO: 25370620 NR Description: hypothetical protein [imported] - Arabidopsis >gi|4835784|gb|AAD30250.1|AC007296_11 Strong similarity to Avr9 elicitor response protein from Nicotiana tabacum. EST
  misc_feature (55)..(358): Homolog of NCBI NO: 15220440 NR Description: putative AVR9 elicitor response protein; protein At1g05170.1, supported by cDNA: gi_14488077 [Arabidopsis
  misc_feature (1)..(90): Homolog of NCBI NO: 15220440 NR Description: putative AVR9 elicitor response protein; protein At1g05170.1, supported by cDNA: gi_14488077 [Arabidopsis
  misc_feature (49)..(356): Homolog of NCBI NO: 15225684 NR Description: unknown protein; protein id: At2g32430.1
  misc_feature (1)..(44): Homolog of NCBI NO: 15225684 NR Description: unknown protein; protein id: At2g32430.1
  misc_feature (50)..(355): Homolog of NCBI NO: 7485336 NR Description: hypothetical protein F10M23.280 - Arabidopsis >gi|4455217|emb|CAB36540.1| Avr9 elicitor response like protein thaliana] >gi|7269547|emb|CAB79549.1| Avr9 elicitor response like
  misc_feature (1)..(87): Homolog of NCBI NO: 7485336 NR Description: hypothetical protein F10M23.280 - Arabidopsis >gi|4455217|emb|CAB36540.1| Avr9 elicitor response like protein thaliana] >gi|7269547|emb|CAB79549.1| Avr9 elicitor response like
  misc_feature (50)..(355): Homolog of NCBI NO: 18416895 NR Description: Avr9 elicitor response like protein; protein id:
  misc_feature (1)..(87): Homolog of NCBI NO: 18416895 NR Description: Avr9 elicitor response like protein; protein id:
MCLASFCLGMFFTNRMWNIVPEARGISRLSKLSLSSSDCDKKNVLDYGNNTIGILDKSISNLEMKLVAARAERESLSGKFNISNEAKKRKYFMVIGINTAFSSRKRRDSVRSTWMPQGENLKKLEEEKGIIVRFVIGHSVLSHGILDKAIEAEEKTHGDFLRLEHTEGYMKLSAKTKTFFATAVSLWDAEFYIKVDDDVHVNLASLKKALSAHQNKPRVYVGCMKSGPVLARKSVKYHEPEYWKFGEVGNKYFRHATGQFYAISKDLATYILINQDLLHKYANEDVSLGSWFIGLNVEHVDEKRLCCSTSQDCELKAMMGHVCAASFDWKCSGICRSAERMADVHERCGEPQNALWTSNS

SEQ ID NO: 91580 - protein, 351 aa, Arabidopsis thaliana
  peptide (1)..(351): Ceres Seq. ID no. 12728330
  misc_feature (96)..(294): Pfam Name: Galactosyltransferase Pfam Description: Galactosyltransferase
  misc_feature (1)..(351): Homolog of NCBI NO: 15221085 NR Description: Avr9 elicitor response-like protein; protein id:
  misc_feature (1)..(306): Homolog of NCBI NO: 25370620 NR Description: hypothetical protein [imported] - Arabidopsis >gi|4835784|gb|AAD30250.1|AC007296_11 Strong similarity to Avr9 elicitor response protein from Nicotiana tabacum. EST
  misc_feature (46)..(349): Homolog of NCBI NO: 15220440 NR Description: putative AVR9 elicitor response protein; protein At1g05170.1, supported by cDNA: gi_14488077 [Arabidopsis
  misc_feature (1)..(81): Homolog of NCBI NO: 15220440 NR Description: putative AVR9 elicitor response protein; protein At1g05170.1, supported by cDNA: gi_14488077 [Arabidopsis
  misc_feature (40)..(347): Homolog of NCBI NO: 15225684 NR Description: unknown protein; protein id: At2g32430.1
  misc_feature (1)..(35): Homolog of NCBI NO: 15225684 NR Description: unknown protein; protein id: At2g32430.1
  misc_feature (41)..(346): Homolog of NCBI NO: 7485336 NR Description: hypothetical protein F10M23.280 - Arabidopsis >gi|4455217|emb|CAB36540.1| Avr9 elicitor response like protein thaliana] >gi|7269547|emb|CAB79549.1| Avr9 elicitor response like
  misc_feature (1)..(78): Homolog of NCBI NO: 7485336 NR Description: hypothetical protein F10M23.280 - Arabidopsis >gi|4455217|emb|CAB36540.1| Avr9 elicitor response like protein thaliana] >gi|7269547|emb|CAB79549.1| Avr9 elicitor response like
  misc_feature (41)..(346): Homolog of NCBI NO: 18416895 NR Description: Avr9 elicitor response like protein; protein id:
  misc_feature (1)..(78): Homolog of NCBI NO: 18416895 NR Description: Avr9 elicitor response like protein; protein id:
MFFTNRMWNIVPEARGISRLSKLSLSSSDCDKKNVLDYGNNTIGILDKSISNLEMKLVAARAERESLSGKFNISNEAKKRKYFMVIGINTAFSSRKRRDSVRSTWMPQGENLKKLEEEKGIIVRFVIGHSVLSHGILDKAIEAEEKTHGDFLRLEHTEGYMKLSAKTKTFFATAVSLWDAEFYIKVDDDVHVNLASLKKALSAHQNKPRVYVGCMKSGPVLARKSVKYHEPEYWKFGEVGNKYFRHATGQFYAISKDLATYILINQDLLHKYANEDVSLGSWFIGLNVEHVDEKRLCCSTSQDCELKAMMGHVCAASFDWKCSGICRSAERMADVHERCGEPQNALWTSNS

SEQ ID NO: 91581 - DNA, 2568 bp, Arabidopsis thaliana
  misc_feature (1)..(2568): Ceres Seq. ID no. 12728364
  misc_feature: MA Experiment ID: 20000171 Result: Up-regulated in Transcription
  misc_feature: MA Experiment 20000171 PARAMETER Experiment Name: At_42deg_Heat_P Parameter: Age (day) Value: 14
  misc_feature: MA Experiment 20000171 PARAMETER Experiment Name: At_42deg_Heat_P Parameter: Organism Value: A. thaliana
  misc_feature: MA Experiment 20000171 PARAMETER Experiment Name: At_42deg_Heat_P Parameter: Plant Line Value: WS
  misc_feature: MA Experiment 20000171 PARAMETER Experiment Name: At_42deg_Heat_P Parameter: Temperature (deg C) Value: 42 vs. 22
  misc_feature: MA Experiment 20000171 PARAMETER Experiment Name: At_42deg_Heat_P Parameter: Timepoint (hr) Value: 1
  misc_feature: MA Experiment 20000171 PARAMETER Experiment Name: At_42deg_Heat_P Parameter: Tissue Value: Aerial
  misc_feature: MA Experiment ID: 20000173 Result: Up-regulated in Transcription
  misc_feature: MA Experiment 20000173 PARAMETER Experiment Name: At_42deg_Heat_P Parameter: Age (day) Value: 14
  misc_feature: MA Experiment 20000173 PARAMETER Experiment Name: At_42deg_Heat_P Parameter: Organism Value: A. thaliana
  misc_feature: MA Experiment 20000173 PARAMETER Experiment Name: At_42deg_Heat_P Parameter: Plant Line Value: WS
  misc_feature: MA Experiment 20000173 PARAMETER Experiment Name: At_42deg_Heat_P Parameter: Temperature (deg C) Value: 42 vs. 22
  misc_feature: MA Experiment 20000173 PARAMETER Experiment Name: At_42deg_Heat_P Parameter: Timepoint (hr) Value: 6
  misc_feature: MA Experiment 20000173 PARAMETER Experiment Name: At_42deg_Heat_P Parameter: Tissue Value: Aerial
  misc_feature: MA Experiment ID: 20000179 Result: Up-regulated in Transcription
  misc_feature: MA Experiment 20000179 PARAMETER Experiment Name: At_Germinating_Seeds_P Parameter: Age (hr) Value: 6 vs. 0
  misc_feature: MA Experiment 20000179 PARAMETER Experiment Name: At_Germinating_Seeds_P Parameter: Tissue Value: Germinating Seeds
  misc_feature: MA Experiment ID: 20000184 Result: Down-regulated in Transcription
  misc_feature: MA Experiment 20000184 PARAMETER Experiment Name: At_Shoots__P Parameter: Age (day) Value: 7
  misc_feature: MA Experiment 20000184 PARAMETER Experiment Name: At_Shoots__P Parameter: Tissue Value: Shoots vs. Whole Plant
  misc_feature: MA Experiment ID: 20000227 Result: Down-regulated in Transcription
  misc_feature: MA Experiment 20000227 PARAMETER Experiment Name: At_Root-Tips-vs-Tops_P Parameter: Tissue Value: Root Tips vs. Root Tops
  misc_feature: MA Experiment ID: 20000264 Result: Down-regulated in Transcription
  misc_feature: MA Experiment 20000264 PARAMETER Experiment Name: At_Open_Flower_P Parameter: Age (day) Value: 21
  misc_feature: MA Experiment 20000264 PARAMETER Experiment Name: At_Open_Flower_P Parameter: Plant Line Value: WS
  misc_feature: MA Experiment 20000264 PARAMETER Experiment Name: At_Open_Flower_P Parameter: Tissue Value: Open Flower vs. Whole Plant
  misc_feature: MA Experiment ID: 20000438 Result: Down-regulated in Transcription
  misc_feature: MA Experiment 20000438 PARAMETER Experiment Name: At_Shoots__P Parameter: Age (day) Value: 14
  misc_feature: MA Experiment 20000438 PARAMETER Experiment Name: At_Shoots__P Parameter: Tissue Value: Shoots vs. Whole Plant
  misc_feature: MA Experiment ID: 20000495 Result: Down-regulated in Transcription
  misc_feature: MA Experiment 20000495 PARAMETER Experiment Name: At_Guard_Cells_P Parameter: Harvest Date Value: 8/2/2002
  misc_feature: MA Experiment 20000495 PARAMETER Experiment Name: At_Guard_Cells_P Parameter: Organism Value: A. thaliana
  misc_feature: MA Experiment 20000495 PARAMETER Experiment Name: At_Guard_Cells_P Parameter: Tissue Value: Guard Cells vs. Leaves
  misc_feature: MA Experiment ID: 20001248 Result: Up-regulated in Transcription
  misc_feature: MA Experiment 20001248 PARAMETER Experiment Name: At_Far-red-induction_P Parameter: Age (day) Value: 7
  misc_feature: MA Experiment 20001248 PARAMETER Experiment Name: At_Far-red-induction_P Parameter: Light Value: Far-red vs. White
  misc_feature: MA Experiment 20001248 PARAMETER Experiment Name: At_Far-red-induction_P Parameter: Organism Value: A. thaliana
  misc_feature: MA Experiment 20001248 PARAMETER Experiment Name: At_Far-red-induction_P Parameter: Plant Line Value: Columbia
  misc_feature: MA Experiment 20001248 PARAMETER Experiment Name: At_Far-red-induction_P Parameter: Timepoint (hr) Value: 4
  misc_feature: MA Experiment 20001248 PARAMETER Experiment Name: At_Far-red-induction_P Parameter: Tissue Value: Whole Plant
cctgggtgtatgtatgtacagagaataagaccgatctctccaagatctctgttttctgaagagttggtgaatactgtttaagcttctctataagagtgtcattccaaggtgaagaagaagcgtttgattcccaaaggagattcatttatttgataaatagatttaagctaagagttaaaaaaagatggcaacactaggagatattggagtagcagcagcaatcaacatactcactgcaatcatcttccttttggcatttgcaatcttgaggattcaaccattcaacgatagggtttatttccctaaatggtatctcaaaggtataagaagcagccctttgcattcaggtgctcttgtcagcaagtttgtcaatgttaacttaggctcatacctccggttcttgaactggatgcccgcggctctaaagatgcctgagcctgagcttattgatcatgctggattggattctgctgtctacttgaggatttacttgatagggcttaagatctttgtaccgatagcgttacttgcttggtcgattcttgtacctgtcaattggactagtcatggtctgcaactagctaagcttcgtaatgtgacatctagtgatattgataagttatccatctcgaatatcgaaaatggatcagacaggttttggactcaccttgtgatggcttacgcattcacattctggacttgctatgttcttatgaaagagtatgagaaagtagctgctatgcgtttggcatttctccagaacgagcaacggcgccctgatcagttcacggttttggttaggaacgtaccagcggacccagatgagtccattagtgacagtgtggaacatttctttctagttaaccatccggaccattatcttacgcatcaggttgtgtacaatgcaaacgatttggcagcattagtagagcagaagaagagcacacagaactggcttgactattaccaattgaagtatacaaggaaccaggaacataagccgaggataaagacgggttttctcgggctatggggaaagaaagttgacgcaatcgatcattatatagctgaaatcgagaaattaaacgagcaaataatggaggagaggaaaaaagtgaagaaagatgatacaagtgtaatgccagccgcttttgtctcgtttaaaacacggtggggtgctgcggttagtgcacagactcaacagtcgagtgatccgactgaatggttaactgaatgggctcccgaggcacgagaagtgttttggtcgaaccttgcaataccttatgtctctttaacacatcgaaggcattgagaaaaatgctcctttcctgaaatccatcatcgagaacgatcttttcaaatcggttatccaaggttttcttccgggtatcgtgttaaagctctttctaatatttctgccaagcattttgatggtaatgtcgaagttcgaagggtttgtatcgttatcatcgttagagagaagagcggcttttcgatattatatctttaatctcatcaatgtcttcctcggaagcgtaatcaccggctctgcatttgaacagcttgattctttcctaaaacaatccgcaaaggagattcctaagacggttggggtagcgataccgataaaagcaacgttttttatcacatatataatggtggacggttgggctggtattgcaggggagattctgaggctgaaacctcttatctttttccatataaagaactccttattggtgaaaaccgaaaaggatagagaagaagcaatgaacccgggacagatcaattatcatgcgacagagcctcggattcaactctacttcctcctcggtcttgtctacgctcctgtgactccagttctactccctttcattatcatcttcttcgcattggcttaccttgtctttcgtcatcagatcataaatgtgtataatcaggaatatgaaagcgcggctaggttctggccagatgttcatggtcgtataatatcagcattgatcatcgcacaaatccttttgatgggactattaagcactaagggagctgctcagtccacgcctttcctactcttcttaccgatcataacctttttcttccaccggtactgcaaaggccggtatgaaccagcattcctccgtcaccccttgaaggaagctatggtcaaagatacattggaacgagcaagagaacccaattttaatctgaaaccgtatcttcaaaaagcatacattcatccggttttcaaagacaacgactatgaagatagccggtttgatgaaatatccggttattgcatcgaagattcggatgaagagtgtgttactgtaccgaccaaacgtcagtcccggataaatacgcctgctgttagccatgcaagccgcggttcttcgcgttcaccaccctcaaagtaagacacattgattcacttaaaccgggtgtggatatatacggtatagaaagaaacgatatcaattgggaattttagttatttagtcagattttgtatattatgagaatatttttggttctgacttttgagttgttttcagtatattaaaaaattct

SEQ ID NO: 91582 - protein, 375 aa, Arabidopsis thaliana
  peptide (1)..(375): Ceres Seq. ID no. 12728365
  misc_feature (306)..(374): Pfam Name: Domain of unknown function DUF221 Pfam Description: Domain of unknown function DUF221
  misc_feature (1)..(159): Homolog of NCBI NO: 7486105 NR Description: hypothetical protein F24O1.3 - Arabidopsis
  misc_feature (236)..(374): Homolog of NCBI NO: 7486105 NR Description: hypothetical protein F24O1.3 - Arabidopsis
  misc_feature (1)..(374): Homolog of NCBI NO: 15233476 NR Description: unknown protein; protein id: At4g04340.1, by cDNA: gi_15810532, supported by cDNA: gi_20260619 [Arabidopsis >gi|25407261|pir||H85054 hypothetical protein AT4g04340
  misc_feature (1)..(374): Homolog of NCBI NO: 15810533 NR Description: unknown protein [Arabidopsis thaliana]
  misc_feature (1)..(374): Homolog of NCBI NO: 15233100 NR Description: unknown protein; protein id: At3g21620.1 thaliana] >gi|11994398|dbj|BAB02357.1|
  misc_feature (1)..(374): Homolog of NCBI NO: 17381104 NR Description: unknown protein [Arabidopsis thaliana]
  misc_feature (1)..(374): Homolog of NCBI NO: 15236212 NR Description: hypothetical protein; protein id: At4g02900.1
  misc_feature (1)..(374): Homolog of NCBI NO: 15222569 NR Description: hypothetical protein; protein id: At1g32090.1
  misc_feature (1)..(374): Homolog of NCBI NO: 37537172 NR Description: unknown protein [Oryza sativa (japonica
  misc_feature (1)..(236): Homolog of NCBI NO: 34913548 NR Description: OJ1029_F04.25 [Oryza sativa (japonica
MATLGDIGVAAAINILTAIIFLLAFAILRIQPFNDRVYFPKWYLKGIRSSPLHSGALVSKFVNVNLGSYLRFLNWMPAALKMPEPELIDHAGLDSAVYLRIYLIGLKIFVPIALLAWSILVPVNWTSHGLQLAKLRNVTSSDIDKLSISNIENGSDRFWTHLVMAYAFTFWTCYVLMKEYEKVAAMRLAFLQNEQRRPDQFTVLVRNVPADPDESISDSVEHFFLVNHPDHYLTHQVVYNANDLAALVEQKKSTQNWLDYYQLKYTRNQEHKPRIKTGFLGLWGKKVDAIDHYIAEIEKLNEQIMEERKKVKKDDTSVMPAAFVSFKTRWGAAVSAQTQQSSDPTEWLTEWAPEAREVFWSNLAIPYVSLTHRRH

SEQ ID NO: 91583 - protein, 327 aa, Arabidopsis thaliana
  peptide (1)..(327): Ceres Seq. ID no. 12728366
  misc_feature (1)..(284): Pfam Name: Domain of unknown function DUF221 Pfam Description: Domain of unknown function DUF221
  misc_feature (1)..(325): Homolog of NCBI NO: 7486105 NR Description: hypothetical protein F24O1.3 - Arabidopsis
  misc_feature (1)..(323): Homolog of NCBI NO: 15233476 NR Description: unknown protein; protein id: At4g04340.1, by cDNA: gi_15810532, supported by cDNA: gi_20260619 [Arabidopsis >gi|25407261|pir||H85054 hypothetical protein AT4g04340
  misc_feature (1)..(323): Homolog of NCBI NO: 15810533 NR Description: unknown protein [Arabidopsis thaliana]
  misc_feature (1)..(276): Homolog of NCBI NO: 15233100 NR Description: unknown protein; protein id: At3g21620.1 thaliana] >gi|11994398|dbj|BAB02357.1|
  misc_feature (1)..(317): Homolog of NCBI NO: 17381104 NR Description: unknown protein [Arabidopsis thaliana]
  misc_feature (1)..(327): Homolog of NCBI NO: 15236212 NR Description: hypothetical protein; protein id: At4g02900.1
  misc_feature (1)..(278): Homolog of NCBI NO: 15222569 NR Description: hypothetical protein; protein id: At1g32090.1
  misc_feature (1)..(272): Homolog of NCBI NO: 37537172 NR Description: unknown protein [Oryza sativa (japonica
  misc_feature (9)..(323): Homolog of NCBI NO: 34913548 NR Description: OJ1029_F04.25 [Oryza sativa (japonica
  misc_feature (1)..(281): Homolog of NCBI NO: 30678282 NR Description: ERD4 protein-related [Arabidopsis thaliana] Unknown protein [Arabidopsis thaliana]
MVMSKFEGFVSLSSLERRAAFRYYIFNLINVFLGSVITGSAFEQLDSFLKQSAKEIPKTVGVAIPIKATFFITYIMVDGWAGIAGEILRLKPLIFFHIKNSLLVKTEKDREEAMNPGQINYHATEPRIQLYFLLGLVYAPVTPVLLPFIIIFFALAYLVFRHQIINVYNQEYESAARFWPDVHGRIISALIIAQILLMGLLSTKGAAQSTPFLLFLPIITFFFHRYCKGRYEPAFLRHPLKEAMVKDTLERAREPNFNLKPYLQKAYIHPVFKDNDYEDSRFDEISGYCIEDSDEECVTVPTKRQSRINTPAVSHASRGSSRSPPSK

SEQ ID NO: 91584 - protein, 325 aa, Arabidopsis thaliana
  peptide (1)..(325): Ceres Seq. ID no. 12728367
  misc_feature (1)..(282): Pfam Name: Domain of unknown function DUF221 Pfam Description: Domain of unknown function DUF221
  misc_feature (1)..(323): Homolog of NCBI NO: 7486105 NR Description: hypothetical protein F24O1.3 - Arabidopsis
  misc_feature (1)..(321): Homolog of NCBI NO: 15233476 NR Description: unknown protein; protein id: At4g04340.1, by cDNA: gi_15810532, supported by cDNA: gi_20260619 [Arabidopsis >gi|25407261|pir||H85054 hypothetical protein AT4g04340
  misc_feature (1)..(321): Homolog of NCBI NO: 15810533 NR Description: unknown protein [Arabidopsis thaliana]
  misc_feature (1)..(274): Homolog of NCBI NO: 15233100 NR Description: unknown protein; protein id: At3g21620.1 thaliana] >gi|11994398|dbj|BAB02357.1|
  misc_feature (1)..(315): Homolog of NCBI NO: 17381104 NR Description: unknown protein [Arabidopsis thaliana]
  misc_feature (1)..(325): Homolog of NCBI NO: 15236212 NR Description: hypothetical protein; protein id: At4g02900.1
  misc_feature (1)..(276): Homolog of NCBI NO: 15222569 NR Description: hypothetical protein; protein id: At1g32090.1
  misc_feature (1)..(270): Homolog of NCBI NO: 37537172 NR Description: unknown protein [Oryza sativa (japonica
  misc_feature (7)..(321): Homolog of NCBI NO: 34913548 NR Description: OJ1029_F04.25 [Oryza sativa (japonica
  misc_feature (1)..(279): Homolog of NCBI NO: 30678282 NR Description: ERD4 protein-related [Arabidopsis thaliana] Unknown protein [Arabidopsis thaliana]
MSKFEGFVSLSSLERRAAFRYYIFNLINVFLGSVITGSAFEQLDSFLKQSAKEIPKTVGVAIPIKATFFITYIMVDGWAGIAGEILRLKPLIFFHIKNSLLVKTEKDREEAMNPGQINYHATEPRIQLYFLLGLVYAPVTPVLLPFIIIFFALAYLVFRHQIINVYNQEYESAARFWPDVHGRIISALIIAQILLMGLLSTKGAAQSTPFLLFLPIITFFFHRYCKGRYEPAFLRHPLKEAMVKDTLERAREPNFNLKPYLQKAYIHPVFKDNDYEDSRFDEISGYCIEDSDEECVTVPTKRQSRINTPAVSHASRGSSRSPPSK

SEQ ID NO: 91585 - DNA, 888 bp, Arabidopsis thaliana
  misc_feature (1)..(888): Ceres Seq. ID no. 12728373
  misc_feature: MA Experiment ID: 20000327 Result: Up-regulated in Transcription
  misc_feature: MA Experiment 20000327 PARAMETER Experiment Name: At_42deg_Heat_Sub_P Parameter: Age (day) Value: 14
  misc_feature: MA Experiment 20000327 PARAMETER Experiment Name: At_42deg_Heat_Sub_P Parameter: Organism Value: A. thaliana
  misc_feature: MA Experiment 20000327 PARAMETER Experiment Name: At_42deg_Heat_Sub_P Parameter: Plant Line Value: WS
  misc_feature: MA Experiment 20000327 PARAMETER Experiment Name: At_42deg_Heat_Sub_P Parameter: Temperature (deg C) Value: 42 vs. 22
  misc_feature: MA Experiment 20000327 PARAMETER Experiment Name: At_42deg_Heat_Sub_P Parameter: Timepoint (hr) Value: 1
  misc_feature: MA Experiment 20000327 PARAMETER Experiment Name: At_42deg_Heat_Sub_P Parameter: Tissue Value: Aerial
  misc_feature: MA Experiment ID: 20000634 Result: Up-regulated in Transcription
  misc_feature: MA Experiment 20000634 PARAMETER Experiment Name: At_10percent_PEG_Sub_P Parameter: Age (day) Value: 12
  misc_feature: MA Experiment 20000634 PARAMETER Experiment Name: At_10percent_PEG_Sub_P Parameter: Organism Value: A. thaliana
  misc_feature: MA Experiment 20000634 PARAMETER Experiment Name: At_10percent_PEG_Sub_P Parameter: Plant Line Value: WS
  misc_feature: MA Experiment 20000634 PARAMETER Experiment Name: At_10percent_PEG_Sub_P Parameter: Timepoint (day) Value: 12
  misc_feature: MA Experiment 20000634 PARAMETER Experiment Name: At_10percent_PEG_Sub_P Parameter: Tissue Value: Whole Plant
  misc_feature: MA Experiment 20000634 PARAMETER Experiment Name: At_10percent_PEG_Sub_P Parameter: Treatment Value: 10% PEG vs. No Treatment
atggtagagataggaggacgatttatcagaacagcggcggcttttgatgtggcggcggcgcgtgcacgccctccgtgcgctagcagcagcggaagcgatcactctccggatgacacagaagatctttgggatctggtcgaatcttttatcgacagagaagtggaaactttacctgaggatgcttttcaggaagaagaagatgataaatcggatgaggattacgaagatgtgaaggagaggttacgggagattcttgaaaaccacggaggcgaagagcggcagagaataatggatgaggcggtaaatgctagtcgggtcttcgccggggagaaacgtcactttatggcttatctacgtaacaaaggttttgatgcaggtctctgcaagtctcgatgggagaaatttggtaagaacacggctgggaagtacgagtatgtagacgttaaggcaggagataagaaccgttacatcgtcgagacaaatcttgccggagagttcgagattgcacggccaacgacaagatacctctccgtcttagctcaagtgccacgtgtctttgtgggaacacctgaggagctgaaacagcttgtgaggatcatgtgctttgagatcaggcggtcgatgaagcgagcggatattttcgtgccgccgtggagaaggaatggttatatgcaagccaagtggttcggtcactataaacgaacctcaaacgaagtggtgagtagggttaagagctgcggctgtggaccgcgtgtagggtttgaagaatcggttaaaatgacgacctttaatggttttaaagatggggagatgaggaggagtggtctaaaggttggccagctaacggtggctttcaacggcagtgaagtggggttgcaaatattttag

SEQ ID NO: 91586 - protein, 295 aa, Arabidopsis thaliana
  peptide (1)..(295): Ceres Seq. ID no. 12728374
  misc_feature (42)..(234): Pfam Name: Protein of unknown function (DUF506) Pfam Description: Protein of unknown function (DUF506)
  misc_feature (1)..(295): Homolog of NCBI NO: 15221175 NR Description: hypothetical protein; protein id: At1g12030.1
  misc_feature (1)..(290): Homolog of NCBI NO: 7486102 NR Description: hypothetical protein F24O1.16 - Arabidopsis >gi|7940287|gb|AAF70846.1|AC003113_13 F2401.16 [Arabidopsis >gi|26450592|dbj|BAC42408.1| unknown protein [Arabidopsis
  misc_feature (1)..(286): Homolog of NCBI NO: 15220778 NR Description: unknown protein; protein id: At1g62420.1
  misc_feature (26)..(258): Homolog of NCBI NO: 18397919 NR Description: expressed protein; protein id: At3g07350.1, by cDNA: 251012., supported by cDNA: gi_15028230, supported by gi_21280936 [Arabidopsis thaliana]
  misc_feature (26)..(258): Homolog of NCBI NO: 21554332 NR Description: unknown [Arabidopsis thaliana]
  misc_feature (76)..(245): Homolog of NCBI NO: 34897230 NR Description: unknown protein [Oryza sativa (japonica
  misc_feature (29)..(261): Homolog of NCBI NO: 15230824 NR Description: hypothetical protein; protein id: At3g25240.1 thaliana] >gi|9294181|dbj|BAB02083.1|
  misc_feature (64)..(236): Homolog of NCBI NO: 34906942 NR Description: similar to Arabidopsis thaliana chromosome 3,
  misc_feature (67)..(245): Homolog of NCBI NO: 30682929 NR Description: expressed protein [Arabidopsis thaliana]
  misc_feature (91)..(278): Homolog of NCBI NO: 34907382 NR Description: P0471B04.25 [Oryza sativa (japonica
MVEIGGRFIRTAAAFDVAAARARPPCASSSGSDHSPDDTEDLWDLVESFIDREVETLPEDAFQEEEDDKSDEDYEDVKERLREILENHGGEERQRIMDEAVNASRVFAGEKRHFMAYLRNKGFDAGLCKSRWEKFGKNTAGKYEYVDVKAGDKNRYIVETNLAGEFEIARPTTRYLSVLAQVPRVFVGTPEELKQLVRIMCFEIRRSMKRADIFVPPWRRNGYMQAKWFGHYKRTSNEVVSRVKSCGCGPRVGFEESVKMTTFNGFKDGEMRRSGLKVGQLTVAFNGSEVGLQIF

SEQ ID NO: 91587 - protein, 199 aa, Arabidopsis thaliana
  peptide (1)..(199): Ceres Seq. ID no. 12728375
  misc_feature (1)..(138): Pfam Name: Protein of unknown function (DUF506) Pfam Description: Protein of unknown function (DUF506)
  misc_feature (1)..(199): Homolog of NCBI NO: 15221175 NR Description: hypothetical protein; protein id: At1g12030.1
  misc_feature (1)..(194): Homolog of NCBI NO: 7486102 NR Description: hypothetical protein F24O1.16 - Arabidopsis >gi|7940287|gb|AAF70846.1|AC003113_13 F2401.16 [Arabidopsis >gi|26450592|dbj|BAC42408.1| unknown protein [Arabidopsis
  misc_feature (1)..(190): Homolog of NCBI NO: 15220778 NR Description: unknown protein; protein id: At1g62420.1
  misc_feature (1)..(162): Homolog of NCBI NO: 18397919 NR Description: expressed protein; protein id: At3g07350.1, by cDNA: 251012., supported by cDNA: gi_15028230, supported by gi_21280936 [Arabidopsis thaliana]
  misc_feature (1)..(162): Homolog of NCBI NO: 21554332 NR Description: unknown [Arabidopsis thaliana]
  misc_feature (1)..(149): Homolog of NCBI NO: 34897230 NR Description: unknown protein [Oryza sativa (japonica
  misc_feature (1)..(165): Homolog of NCBI NO: 15230824 NR Description: hypothetical protein; protein id: At3g25240.1 thaliana] >gi|9294181|dbj|BAB02083.1|
  misc_feature (1)..(140): Homolog of NCBI NO: 34906942 NR Description: similar to Arabidopsis thaliana chromosome 3,
  misc_feature (1)..(149): Homolog of NCBI NO: 30682929 NR Description: expressed protein [Arabidopsis thaliana]
  misc_feature (1)..(182): Homolog of NCBI NO: 34907382 NR Description: P0471B04.25 [Oryza sativa (japonica
MDEAVNASRVFAGEKRHFMAYLRNKGFDAGLCKSRWEKFGKNTAGKYEYVDVKAGDKNRYIVETNLAGEFEIARPTTRYLSVLAQVPRVFVGTPEELKQLVRIMCFEIRRSMKRADIFVPPWRRNGYMQAKWFGHYKRTSNEVVSRVKSCGCGPRVGFEESVKMTTFNGFKDGEMRRSGLKVGQLTVAFNGSEVGLQIF

SEQ ID NO: 91588 - protein, 181 aa, Arabidopsis thaliana
  peptide (1)..(181): Ceres Seq. ID no. 12728376
  misc_feature (1)..(120): Pfam Name: Protein of unknown function (DUF506) Pfam Description: Protein of unknown function (DUF506)
  misc_feature (1)..(181): Homolog of NCBI NO: 15221175 NR Description: hypothetical protein; protein id: At1g12030.1
  misc_feature (1)..(176): Homolog of NCBI NO: 7486102 NR Description: hypothetical protein F24O1.16 - Arabidopsis >gi|7940287|gb|AAF70846.1|AC003113_13 F2401.16 [Arabidopsis >gi|26450592|dbj|BAC42408.1| unknown protein [Arabidopsis
  misc_feature (1)..(172): Homolog of NCBI NO: 15220778 NR Description: unknown protein; protein id: At1g62420.1
  misc_feature (1)..(144): Homolog of NCBI NO: 18397919 NR Description: expressed protein; protein id: At3g07350.1, by cDNA: 251012., supported by cDNA: gi_15028230, supported by gi_21280936 [Arabidopsis thaliana]
  misc_feature (1)..(144): Homolog of NCBI NO: 21554332 NR Description: unknown [Arabidopsis thaliana]
  misc_feature (1)..(131): Homolog of NCBI NO: 34897230 NR Description: unknown protein [Oryza sativa (japonica
  misc_feature (1)..(147): Homolog of NCBI NO: 15230824 NR Description: hypothetical protein; protein id: At3g25240.1 thaliana] >gi|9294181|dbj|BAB02083.1|
  misc_feature (1)..(122): Homolog of NCBI NO: 34906942 NR Description: similar to Arabidopsis thaliana chromosome 3,
  misc_feature (1)..(131): Homolog of NCBI NO: 30682929 NR Description: expressed protein [Arabidopsis thaliana]
  misc_feature (1)..(164): Homolog of NCBI NO: 34907382 NR Description: P0471B04.25 [Oryza sativa (japonica
MAYLRNKGFDAGLCKSRWEKFGKNTAGKYEYVDVKAGDKNRYIVETNLAGEFEIARPTTRYLSVLAQVPRVFVGTPEELKQLVRIMCFEIRRSMKRADIFVPPWRRNGYMQAKWFGHYKRTSNEVVSRVKSCGCGPRVGFEESVKMTTFNGFKDGEMRRSGLKVGQLTVAFNGSEVGLQIF

SEQ ID NO: 91589 - DNA, 2444 bp, Arabidopsis thaliana
  misc_feature (1)..(2444): Ceres Seq. ID no. 12728377
  misc_feature: MA Experiment ID: 20000171 Result: Up-regulated in Transcription
  misc_feature: MA Experiment 20000171 PARAMETER Experiment Name: At_42deg_Heat_P Parameter: Age (day) Value: 14
  misc_feature: MA Experiment 20000171 PARAMETER Experiment Name: At_42deg_Heat_P Parameter: Organism Value: A. thaliana
  misc_feature: MA Experiment 20000171 PARAMETER Experiment Name: At_42deg_Heat_P Parameter: Plant Line Value: WS
  misc_feature: MA Experiment 20000171 PARAMETER Experiment Name: At_42deg_Heat_P Parameter: Temperature (deg C) Value: 42 vs. 22
  misc_feature: MA Experiment 20000171 PARAMETER Experiment Name: At_42deg_Heat_P Parameter: Timepoint (hr) Value: 1
  misc_feature: MA Experiment 20000171 PARAMETER Experiment Name: At_42deg_Heat_P Parameter: Tissue Value: Aerial
  misc_feature: MA Experiment ID: 20000173 Result: Up-regulated in Transcription
  misc_feature: MA Experiment 20000173 PARAMETER Experiment Name: At_42deg_Heat_P Parameter: Age (day) Value: 14
  misc_feature: MA Experiment 20000173 PARAMETER Experiment Name: At_42deg_Heat_P Parameter: Organism Value: A. thaliana
  misc_feature: MA Experiment 20000173 PARAMETER Experiment Name: At_42deg_Heat_P Parameter: Plant Line Value: WS
  misc_feature: MA Experiment 20000173 PARAMETER Experiment Name: At_42deg_Heat_P Parameter: Temperature (deg C) Value: 42 vs. 22
  misc_feature: MA Experiment 20000173 PARAMETER Experiment Name: At_42deg_Heat_P Parameter: Timepoint (hr) Value: 6
  misc_feature: MA Experiment 20000173 PARAMETER Experiment Name: At_42deg_Heat_P Parameter: Tissue Value: Aerial
  misc_feature: MA Experiment ID: 20000180 Result: Up-regulated in Transcription
  misc_feature: MA Experiment 20000180 PARAMETER Experiment Name: At_Germinating_Seeds_P Parameter: Age (hr) Value: 24 vs. 0
  misc_feature: MA Experiment 20000180 PARAMETER Experiment Name: At_Germinating_Seeds_P Parameter: Tissue Value: Germinating Seeds
  misc_feature: MA Experiment ID: 20000185 Result: Up-regulated in Transcription
  misc_feature: MA Experiment 20000185 PARAMETER Experiment Name: At_Roots__P Parameter: Age (day) Value: 7 vs. 21
  misc_feature: MA Experiment 20000185 PARAMETER Experiment Name: At_Roots__P Parameter: Organism Value: A. thaliana
  misc_feature: MA Experiment 20000185 PARAMETER Experiment Name: At_Roots__P Parameter: Tissue Value: Roots vs. Whole Plant
  misc_feature: MA Experiment ID: 20000437 Result: Up-regulated in Transcription
  misc_feature: MA Experiment 20000437 PARAMETER Experiment Name: At_Drought_P Parameter: Age (day) Value: 8
  misc_feature: MA Experiment 20000437 PARAMETER Experiment Name: At_Drought_P Parameter: Organism Value: A. thaliana
  misc_feature: MA Experiment 20000437 PARAMETER Experiment Name: At_Drought_P Parameter: Plant Line Value: WS
  misc_feature: MA Experiment 20000437 PARAMETER Experiment Name: At_Drought_P Parameter: Timepoint (hr) Value: 24
  misc_feature: MA Experiment 20000437 PARAMETER Experiment Name: At_Drought_P Parameter: Tissue Value: Whole Plant
  misc_feature: MA Experiment 20000437 PARAMETER Experiment Name: At_Drought_P Parameter: Treatment Value: Drought vs. No Drought
  misc_feature: MA Experiment ID: 20000439 Result: Up-regulated in Transcription
  misc_feature: MA Experiment 20000439 PARAMETER Experiment Name: At_Roots__P Parameter: Age (day) Value: 14 vs. 21
  misc_feature: MA Experiment 20000439 PARAMETER Experiment Name: At_Roots__P Parameter: Organism Value: A. thaliana
  misc_feature: MA Experiment 20000439 PARAMETER Experiment Name: At_Roots__P Parameter: Tissue Value: Roots vs. Whole Plant
  misc_feature: MA Experiment ID: 20000527 Result: Down-regulated in Transcription
  misc_feature: MA Experiment 20000527 PARAMETER Experiment Name: At_10percent_PEG_P Parameter: Age (day) Value: 20
  misc_feature: MA Experiment 20000527 PARAMETER Experiment Name: At_10percent_PEG_P Parameter: Organism Value: A. thaliana
  misc_feature: MA Experiment 20000527 PARAMETER Experiment Name: At_10percent_PEG_P Parameter: Plant Line Value: WS
  misc_feature: MA Experiment 20000527 PARAMETER Experiment Name: At_10percent_PEG_P Parameter: Timepoint (day) Value: 20
  misc_feature: MA Experiment 20000527 PARAMETER Experiment Name: At_10percent_PEG_P Parameter: Tissue Value: Whole Plant
  misc_feature: MA Experiment 20000527 PARAMETER Experiment Name: At_10percent_PEG_P Parameter: Treatment Value: 10percent PEG vs. No Treatment
ataattagtaaaattgggtttcttgacccataagcaatgttgttccctcctcttcgttccctctttctcttcaccctcttgctctcctccgtttgtttcttacaaatcaaagcagaccacgacgatgaaagcgacttgggcagtgatatcaaagtagacaaacgtctcaagttcgagaacccgaagctacgtcaagcctacattgctcttcaatcatggaaaaaagcaatcttttctgatcctttcaacttcacagctaattggaatggttcagatgtttgctcctacaatggaatctattgtgctccttctccttcatacccgaaaacccgagtcgttgctggcattgacctcaaccacgctgacatggccggttacttggcttccgagctaggtctcctctctgatctcgctctgttccacattaactcaaaccgtttctgcggtgaagtccctctcacgtttaaccgcatgaagcttctctacgagcttgatcttagcaacaaccgattcgtcggtaagttccctaaggttgtcctctctttgccttcccttaaattcttggatctccgctacaacgagtttgaaggcaagatcccatcaaagctcttcgatagagagcttgacgctatattcttgaaccataaccggttccggttcgggattcccaaaaacatgggaaattcccctgtttctgctctggttcttgcggacaacaatctcggaggatgcataccgggaagtatcggtcaaatggggaaaacactcaacgagcttatcctctccaacgacaacttaaccggttgtttacctcctcagatcggaaacctcaagaaagtgacggttttcgacatcacttcaaaccgtctacaaggtccgttaccatctagcgttggtaacatgaagagcctagaagagcttcacgtggctaacaatgccttcacaggagttattcctccaagtatctgccagctttctaaccttgagaactttacttactcttccaactacttctccggtcgtcctcctatatgcgcagctagtttgttagccgacattgtggtgaacggtaccatgaactgcatcaccggtttggctcgtcaaagatcggataaacagtgctcatctttgcttgctcgccctgtggattgcagtaagtttggatgttacaacatcttctctccaccaccaccgacgtttaagatgtcacctgaagtccggacacttcctccaccgatttacgtgtactcatcgcctcctccaccaccgtcgtcaaagatgtcccctaccgtcagagcatactctcccccaccaccaccttcgtccaagatgtcaccctctgtcagagcatattcaccaccaccgcctccttattccaagatgtcacctagcgttcgagcttaccctcctccaccaccaccatcaccatctcccccaccgccttacgtatactcatctcctccaccgccctatgtgtactcatctcctcctccaccgccgtatgtgtattcatcccctcctccaccgccttacgtatactcatctcctccaccgccttacgtgtactcatctccacccccgccttacgtatactcatctccacctccgcctcctccaagtccaccaccaccgtgtcctgaatcatctccaccaccgcctgttgtatactacgcacccgtgacacaaagccctccaccaccatcaccggtatactatccaccagtaacacaaagccctccaccaccatcgccagtatactacccaccggtgacaaacagtccaccaccaccatcaccggtatactatcccccagtaacatacagtccaccaccaccatcaccagtttactatccccaagtaacaccaagtcctccaccaccatcgccgctatactatcccccagtaacaccaagtccaccaccaccatcaccagtttactatcccccagtaacaccaagtcctccaccaccatcaccagtttactatcccccagtaacaccaagtcctccaccaccatcaccagtttactatccatcggaaacacaaagtcctccaccacctactgagtactactattcaccaagccagtctccgccaccaacaaaagcatgtaaagaaggccatccaccacaagcaacaccaagttacgaaccacctccagaatattcatactcatcatcaccaccaccaccatctcctacgtcctactttccaccgatgccaagcgtctcatatgatgcatctcctcctcctcctccgtcttactactagtttcaaccattgagtaaaaaaatgcattgccttatgattaacgagactactcacaattatattcttttggctgcgagactttaatttgtgtgttttgttgatttaaagaaaaaaagacattccagttactttttcttgtaatatttttttttcttttggatattatgttcttt

SEQ ID NO: 91590 - protein, 744 aa, Arabidopsis thaliana
  peptide (1)..(744): Ceres Seq. ID no. 12728378
  misc_feature (397)..(703): Pfam Name: Formin Homology 2 Domain Pfam Description: Formin Homology 2 Domain
  misc_feature (1)..(744): Homolog of NCBI NO: 7484956 NR Description: extensin homolog F24O1.18 - Arabidopsis thaliana T3P18.1 [Arabidopsis thaliana]
  misc_feature (22)..(744): Homolog of NCBI NO: 15220780 NR Description: hypothetical protein; protein id: At1g62440.1
  misc_feature (38)..(743): Homolog of NCBI NO: 15235668 NR Description: extensin-like protein; protein id: At4g13340.1
  misc_feature (29)..(627): Homolog of NCBI NO: 15233976 NR Description: extensin-like protein; protein id: At4g18670.1
  misc_feature (581)..(743): Homolog of NCBI NO: 15233976 NR Description: extensin-like protein; protein id: At4g18670.1
  misc_feature (626)..(744): Homolog of NCBI NO: 15233976 NR Description: extensin-like protein; protein id: At4g18670.1
  misc_feature (641)..(744): Homolog of NCBI NO: 15233976 NR Description: extensin-like protein; protein id: At4g18670.1
  misc_feature (30)..(724): Homolog of NCBI NO: 15226640 NR Description: unknown protein; protein id: At2g15880.1
  misc_feature (44)..(708): Homolog of NCBI NO: 5917664 NR Description: extensin-like protein [Lycopersicon esculentum]
  misc_feature (25)..(739): Homolog of NCBI NO: 1076802 NR Description: extensin-like protein - maize
MLFPPLRSLFLFTLLLSSVCFLQIKADHDDESDLGSDIKVDKRLKFENPKLRQAYIALQSWKKAIFSDPFNFTANWNGSDVCSYNGIYCAPSPSYPKTRVVAGIDLNHADMAGYLASELGLLSDLALFHINSNRFCGEVPLTFNRMKLLYELDLSNNRFVGKFPKVVLSLPSLKFLDLRYNEFEGKIPSKLFDRELDAIFLNHNRFRFGIPKNMGNSPVSALVLADNNLGGCIPGSIGQMGKTLNELILSNDNLTGCLPPQIGNLKKVTVFDITSNRLQGPLPSSVGNMKSLEELHVANNAFTGVIPPSICQLSNLENFTYSSNYFSGRPPICAASLLADIVVNGTMNCITGLARQRSDKQCSSLLARPVDCSKFGCYNIFSPPPPTFKMSPEVRTLPPPIYVYSSPPPPPSSKMSPTVRAYSPPPPPSSKMSPSVRAYSPPPPPYSKMSPSVRAYPPPPPPSPSPPPPYVYSSPPPPYVYSSPPPPPYVYSSPPPPPYVYSSPPPPYVYSSPPPPYVYSSPPPPPPSPPPPCPESSPPPPVVYYAPVTQSPPPPSPVYYPPVTQSPPPPSPVYYPPVTNSPPPPSPVYYPPVTYSPPPPSPVYYPQVTPSPPPPSPLYYPPVTPSPPPPSPVYYPPVTPSPPPPSPVYYPPVTPSPPPPSPVYYPSETQSPPPPTEYYYSPSQSPPPTKACKEGHPPQATPSYEPPPEYSYSSSPPPPSPTSYFPPMPSVSYDASPPPPPSYY

SEQ ID NO: 91591 - protein, 634 aa, Arabidopsis thaliana
  peptide (1)..(634): Ceres Seq. ID no. 12728379
  misc_feature (287)..(593): Pfam Name: Formin Homology 2 Domain Pfam Description: Formin Homology 2 Domain
  misc_feature (1)..(634): Homolog of NCBI NO: 7484956 NR Description: extensin homolog F24O1.18 - Arabidopsis thaliana T3P18.1 [Arabidopsis thaliana]
  misc_feature (1)..(634): Homolog of NCBI NO: 15220780 NR Description: hypothetical protein; protein id: At1g62440.1
  misc_feature (1)..(633): Homolog of NCBI NO: 15235668 NR Description: extensin-like protein; protein id: At4g13340.1
  misc_feature (1)..(517): Homolog of NCBI NO: 15233976 NR Description: extensin-like protein; protein id: At4g18670.1
  misc_feature (471)..(633): Homolog of NCBI NO: 15233976 NR Description: extensin-like protein; protein id: At4g18670.1
  misc_feature (516)..(634): Homolog of NCBI NO: 15233976 NR Description: extensin-like protein; protein id: At4g18670.1
  misc_feature (531)..(634): Homolog of NCBI NO: 15233976 NR Description: extensin-like protein; protein id: At4g18670.1
  misc_feature (1)..(614): Homolog of NCBI NO: 15226640 NR Description: unknown protein; protein id: At2g15880.1
  misc_feature (1)..(598): Homolog of NCBI NO: 5917664 NR Description: extensin-like protein [Lycopersicon esculentum]
  misc_feature (1)..(629): Homolog of NCBI NO: 1076802 NR Description: extensin-like protein - maize
MAGYLASELGLLSDLALFHINSNRFCGEVPLTFNRMKLLYELDLSNNRFVGKFPKVVLSLPSLKFLDLRYNEFEGKIPSKLFDRELDAIFLNHNRFRFGIPKNMGNSPVSALVLADNNLGGCIPGSIGQMGKTLNELILSNDNLTGCLPPQIGNLKKVTVFDITSNRLQGPLPSSVGNMKSLEELHVANNAFTGVIPPSICQLSNLENFTYSSNYFSGRPPICAASLLADIVVNGTMNCITGLARQRSDKQCSSLLARPVDCSKFGCYNIFSPPPPTFKMSPEVRTLPPPIYVYSSPPPPPSSKMSPTVRAYSPPPPPSSKMSPSVRAYSPPPPPYSKMSPSVRAYPPPPPPSPSPPPPYVYSSPPPPYVYSSPPPPPYVYSSPPPPPYVYSSPPPPYVYSSPPPPYVYSSPPPPPPSPPPPCPESSPPPPVVYYAPVTQSPPPPSPVYYPPVTQSPPPPSPVYYPPVTNSPPPPSPVYYPPVTYSPPPPSPVYYPQVTPSPPPPSPLYYPPVTPSPPPPSPVYYPPVTPSPPPPSPVYYPPVTPSPPPPSPVYYPSETQSPPPPTEYYYSPSQSPPPTKACKEGHPPQATPSYEPPPEYSYSSSPPPPSPTSYFPPMPSVSYDASPPPPPSYY

SEQ ID NO: 91592 - protein, 599 aa, Arabidopsis thaliana
  peptide (1)..(599): Ceres Seq. ID no. 12728380
  misc_feature (252)..(558): Pfam Name: Formin Homology 2 Domain Pfam Description: Formin Homology 2 Domain
  misc_feature (1)..(599): Homolog of NCBI NO: 7484956 NR Description: extensin homolog F24O1.18 - Arabidopsis thaliana T3P18.1 [Arabidopsis thaliana]
  misc_feature (1)..(599): Homolog of NCBI NO: 15220780 NR Description: hypothetical protein; protein id: At1g62440.1
  misc_feature (1)..(598): Homolog of NCBI NO: 15235668 NR Description: extensin-like protein; protein id: At4g13340.1
  misc_feature (1)..(482): Homolog of NCBI NO: 15233976 NR Description: extensin-like protein; protein id: At4g18670.1
  misc_feature (436)..(598): Homolog of NCBI NO: 15233976 NR Description: extensin-like protein; protein id: At4g18670.1
  misc_feature (481)..(599): Homolog of NCBI NO: 15233976 NR Description: extensin-like protein; protein id: At4g18670.1
  misc_feature (496)..(599): Homolog of NCBI NO: 15233976 NR Description: extensin-like protein; protein id: At4g18670.1
  misc_feature (1)..(579): Homolog of NCBI NO: 15226640 NR Description: unknown protein; protein id: At2g15880.1
  misc_feature (1)..(563): Homolog of NCBI NO: 5917664 NR Description: extensin-like protein [Lycopersicon esculentum]
  misc_feature (1)..(594): Homolog of NCBI NO: 1076802 NR Description: extensin-like protein - maize
MKLLYELDLSNNRFVGKFPKVVLSLPSLKFLDLRYNEFEGKIPSKLFDRELDAIFLNHNRFRFGIPKNMGNSPVSALVLADNNLGGCIPGSIGQMGKTLNELILSNDNLTGCLPPQIGNLKKVTVFDITSNRLQGPLPSSVGNMKSLEELHVANNAFTGVIPPSICQLSNLENFTYSSNYFSGRPPICAASLLADIVVNGTMNCITGLARQRSDKQCSSLLARPVDCSKFGCYNIFSPPPPTFKMSPEVRTLPPPIYVYSSPPPPPSSKMSPTVRAYSPPPPPSSKMSPSVRAYSPPPPPYSKMSPSVRAYPPPPPPSPSPPPPYVYSSPPPPYVYSSPPPPPYVYSSPPPPPYVYSSPPPPYVYSSPPPPYVYSSPPPPPPSPPPPCPESSPPPPVVYYAPVTQSPPPPSPVYYPPVTQSPPPPSPVYYPPVTNSPPPPSPVYYPPVTYSPPPPSPVYYPQVTPSPPPPSPLYYPPVTPSPPPPSPVYYPPVTPSPPPPSPVYYPPVTPSPPPPSPVYYPSETQSPPPPTEYYYSPSQSPPPTKACKEGHPPQATPSYEPPPEYSYSSSPPPPSPTSYFPPMPSVSYDASPPPPPSYY

SEQ ID NO: 91593 - DNA, 1188 bp, Arabidopsis thaliana
  misc_feature (1)..(1188): Ceres Seq. ID no. 12728424
  misc_feature: MA Experiment ID: 20000185 Result: Up-regulated in Transcription
  misc_feature: MA Experiment 20000185 PARAMETER Experiment Name: At_Roots__P Parameter: Age (day) Value: 7 vs. 21
  misc_feature: MA Experiment 20000185 PARAMETER Experiment Name: At_Roots__P Parameter: Organism Value: A. thaliana
  misc_feature: MA Experiment 20000185 PARAMETER Experiment Name: At_Roots__P Parameter: Tissue Value: Roots vs. Whole Plant
  misc_feature: MA Experiment ID: 20000439 Result: Up-regulated in Transcription
  misc_feature: MA Experiment 20000439 PARAMETER Experiment Name: At_Roots__P Parameter: Age (day) Value: 14 vs. 21
  misc_feature: MA Experiment 20000439 PARAMETER Experiment Name: At_Roots__P Parameter: Organism Value: A. thaliana
  misc_feature: MA Experiment 20000439 PARAMETER Experiment Name: At_Roots__P Parameter: Tissue Value: Roots vs. Whole Plant
atgaattcattttcccacgtccctccgggttttagatttcacccgacagatgaagaacttgtagactactacctgaggaaaaaagtcgcatcgaagagaatagaaattgatttcataaaggacattgatctttacaagattgagccatgggaccttcaagagttgtgcaaaattgggcatgaagagcagagtgattggtacttctttagccataaagacaagaagtatcccacagggactcgaaccaatagagcaacaaaagcagggttttggaaagccaccggaagagataaggctatctatttgaggcatagtctaattggcatgaggaaaacacttgtgttttacaagggaagagccccaaatggacaaaagtctgattggatcatgcacgaataccgcttagaaaccgatgaaaacggaactcctcaggaagaaggatgggttgtgtgtagggttttcaagaagagattggctgcagttagacgaatgggagattacgactcatccccttcacattggtacgatgatcaactttcttttatggcctccgagctcgagacaaacggtcaacgacggattctccccaatcatcatcagcagcagcagcacgagcaccaacaacatatgccatatggcctcaatgcatctgcttacgctctcaacaaccctaacttgcaatgcaagcaagagctagaactacactacaaccacctggtacaacgaaatcatcttcttgatgaatctcatttatcgttcctccaacttcctcaactagaaagccctaagattcaacaagataacagtaattgcaactctcttccttatggaacaagcaacatcgataataactcgagccataatgctaacttgcagcaatcaaatatcgcgcatgaggaacaattgaatcaaggaaatcagaacttcagctctctatacatgaacagcggcaacgagcaagtgatggaccaagtcacagactggagagttctcgataaatttgttgcttctcagctaagcaacgaggaggctgccacagcttctgcatctatacagaataatgccaaggacacaagcaatgctgagtaccaagttgatgaagaaaaagatccgaaaagggcttcagacatgggagaagaatatactgcttctacttcttcgagttgtcagattgatctatggaagtga

SEQ ID NO: 91594 - protein, 395 aa, Arabidopsis thaliana
  peptide (1)..(395): Ceres Seq. ID no. 12728425
  misc_feature (7)..(136): Pfam Name: No apical meristem (NAM) protein Pfam Description: No apical meristem (NAM) protein
  misc_feature (1)..(395): Homolog of NCBI NO: 15221256 NR Description: unknown protein; protein id: At1g12260.1
  misc_feature (1)..(395): Homolog of NCBI NO: 25402716 NR Description: hypothetical protein [imported] - Arabidopsis >gi|10086508|gb|AAG12568.1|AC022522_1 Hypothetical protein
  misc_feature (1)..(393): Homolog of NCBI NO: 15221554 NR Description: unknown protein; protein id: At1g62700.1
  misc_feature (45)..(393): Homolog of NCBI NO: 6630463 NR Description: F23N19.6 [Arabidopsis thaliana]
  misc_feature (1)..(55): Homolog of NCBI NO: 6630463 NR Description: F23N19.6 [Arabidopsis thaliana]
  misc_feature (7)..(187): Homolog of NCBI NO: 15234325 NR Description: NAM like protein; protein id: At4g36160.1
  misc_feature (210)..(372): Homolog of NCBI NO: 15234325 NR Description: NAM like protein; protein id: At4g36160.1
  misc_feature (1)..(212): Homolog of NCBI NO: 38605889 NR Description: OSJNBb0020O11.1 [Oryza sativa (japonica
  misc_feature (5)..(159): Homolog of NCBI NO: 34902254 NR Description: Putative NAM-like protein [Oryza sativa (japonica
  misc_feature (326)..(394): Homolog of NCBI NO: 34902254 NR Description: Putative NAM-like protein [Oryza sativa (japonica
MNSFSHVPPGFRFHPTDEELVDYYLRKKVASKRIEIDFIKDIDLYKIEPWDLQELCKIGHEEQSDWYFFSHKDKKYPTGTRTNRATKAGFWKATGRDKAIYLRHSLIGMRKTLVFYKGRAPNGQKSDWIMHEYRLETDENGTPQEEGWVVCRVFKKRLAAVRRMGDYDSSPSHWYDDQLSFMASELETNGQRRILPNHHQQQQHEHQQHMPYGLNASAYALNNPNLQCKQELELHYNHLVQRNHLLDESHLSFLQLPQLESPKIQQDNSNCNSLPYGTSNIDNNSSHNANLQQSNIAHEEQLNQGNQNFSSLYMNSGNEQVMDQVTDWRVLDKFVASQLSNEEAATASASIQNNAKDTSNAEYQVDEEKDPKRASDMGEEYTASTSSSCQIDLWK

SEQ ID NO: 91595 - protein, 287 aa, Arabidopsis thaliana
  peptide (1)..(287): Ceres Seq. ID no. 12728426
  misc_feature (1)..(287): Homolog of NCBI NO: 15221256 NR Description: unknown protein; protein id: At1g12260.1
  misc_feature (1)..(287): Homolog of NCBI NO: 25402716 NR Description: hypothetical protein [imported] - Arabidopsis >gi|10086508|gb|AAG12568.1|AC022522_1 Hypothetical protein
  misc_feature (1)..(285): Homolog of NCBI NO: 15221554 NR Description: unknown protein; protein id: At1g62700.1
  misc_feature (1)..(285): Homolog of NCBI NO: 6630463 NR Description: F23N19.6 [Arabidopsis thaliana]
  misc_feature (1)..(79): Homolog of NCBI NO: 15234325 NR Description: NAM like protein; protein id: At4g36160.1
  misc_feature (102)..(264): Homolog of NCBI NO: 15234325 NR Description: NAM like protein; protein id: At4g36160.1
  misc_feature (1)..(104): Homolog of NCBI NO: 38605889 NR Description: OSJNBb0020O11.1 [Oryza sativa (japonica
  misc_feature (1)..(51): Homolog of NCBI NO: 34902254 NR Description: Putative NAM-like protein [Oryza sativa (japonica
  misc_feature (218)..(286): Homolog of NCBI NO: 34902254 NR Description: Putative NAM-like protein [Oryza sativa (japonica
  misc_feature (1)..(116): Homolog of NCBI NO: 24413978 NR Description: NAM-like protein [Oryza sativa (japonica
MRKTLVFYKGRAPNGQKSDWIMHEYRLETDENGTPQEEGWVVCRVFKKRLAAVRRMGDYDSSPSHWYDDQLSFMASELETNGQRRILPNHHQQQQHEHQQHMPYGLNASAYALNNPNLQCKQELELHYNHLVQRNHLLDESHLSFLQLPQLESPKIQQDNSNCNSLPYGTSNIDNNSSHNANLQQSNIAHEEQLNQGNQNFSSLYMNSGNEQVMDQVTDWRVLDKFVASQLSNEEAATASASIQNNAKDTSNAEYQVDEEKDPKRASDMGEEYTASTSSSCQIDLWK

SEQ ID NO: 91596 - protein, 266 aa, Arabidopsis thaliana
  peptide (1)..(266): Ceres Seq. ID no. 12728427
  misc_feature (1)..(266): Homolog of NCBI NO: 15221256 NR Description: unknown protein; protein id: At1g12260.1
  misc_feature (1)..(266): Homolog of NCBI NO: 25402716 NR Description: hypothetical protein [imported] - Arabidopsis >gi|10086508|gb|AAG12568.1|AC022522_1 Hypothetical protein
  misc_feature (1)..(264): Homolog of NCBI NO: 15221554 NR Description: unknown protein; protein id: At1g62700.1
  misc_feature (1)..(264): Homolog of NCBI NO: 6630463 NR Description: F23N19.6 [Arabidopsis thaliana]
  misc_feature (1)..(58): Homolog of NCBI NO: 15234325 NR Description: NAM like protein; protein id: At4g36160.1
  misc_feature (81)..(243): Homolog of NCBI NO: 15234325 NR Description: NAM like protein; protein id: At4g36160.1
  misc_feature (1)..(83): Homolog of NCBI NO: 38605889 NR Description: OSJNBb0020O11.1 [Oryza sativa (japonica
  misc_feature (1)..(30): Homolog of NCBI NO: 34902254 NR Description: Putative NAM-like protein [Oryza sativa (japonica
  misc_feature (197)..(265): Homolog of NCBI NO: 34902254 NR Description: Putative NAM-like protein [Oryza sativa (japonica
  misc_feature (1)..(95): Homolog of NCBI NO: 24413978 NR Description: NAM-like protein [Oryza sativa (japonica
MHEYRLETDENGTPQEEGWVVCRVFKKRLAAVRRMGDYDSSPSHWYDDQLSFMASELETNGQRRILPNHHQQQQHEHQQHMPYGLNASAYALNNPNLQCKQELELHYNHLVQRNHLLDESHLSFLQLPQLESPKIQQDNSNCNSLPYGTSNIDNNSSHNANLQQSNIAHEEQLNQGNQNFSSLYMNSGNEQVMDQVTDWRVLDKFVASQLSNEEAATASASIQNNAKDTSNAEYQVDEEKDPKRASDMGEEYTASTSSSCQIDLWK

SEQ ID NO: 91597 - DNA, 1518 bp, Arabidopsis thaliana
  misc_feature (1)..(1518): Ceres Seq. ID no. 12728436
  misc_feature: MA Experiment ID: 20000185 Result: Down-regulated in Transcription
  misc_feature: MA Experiment 20000185 PARAMETER Experiment Name: At_Roots__P Parameter: Age (day) Value: 7 vs. 21
  misc_feature: MA Experiment 20000185 PARAMETER Experiment Name: At_Roots__P Parameter: Organism Value: A. thaliana
  misc_feature: MA Experiment 20000185 PARAMETER Experiment Name: At_Roots__P Parameter: Tissue Value: Roots vs. Whole Plant
  misc_feature: MA Experiment ID: 20000234 Result: Up-regulated in Transcription
  misc_feature: MA Experiment 20000234 PARAMETER Experiment Name: At_Siliques_P Parameter: Age (day) Value: 21
  misc_feature: MA Experiment 20000234 PARAMETER Experiment Name: At_Siliques_P Parameter: Organism Value: A. thaliana
  misc_feature: MA Experiment 20000234 PARAMETER Experiment Name: At_Siliques_P Parameter: Plant Line Value: WS
  misc_feature: MA Experiment 20000234 PARAMETER Experiment Name: At_Siliques_P Parameter: Tissue Value: Less Than 5mm Siliques vs. Whole Plant
  misc_feature: MA Experiment ID: 20000235 Result: Up-regulated in Transcription
  misc_feature: MA Experiment 20000235 PARAMETER Experiment Name: At_Siliques_P Parameter: Age (day) Value: 21
  misc_feature: MA Experiment 20000235 PARAMETER Experiment Name: At_Siliques_P Parameter: Organism Value: A. thaliana
  misc_feature: MA Experiment 20000235 PARAMETER Experiment Name: At_Siliques_P Parameter: Plant Line Value: WS
  misc_feature: MA Experiment 20000235 PARAMETER Experiment Name: At_Siliques_P Parameter: Tissue Value: 5-10mm Siliques vs. Whole Plant
  misc_feature: MA Experiment ID: 20000264 Result: Up-regulated in Transcription
  misc_feature: MA Experiment 20000264 PARAMETER Experiment Name: At_Open_Flower_P Parameter: Age (day) Value: 21
  misc_feature: MA Experiment 20000264 PARAMETER Experiment Name: At_Open_Flower_P Parameter: Plant Line Value: WS
  misc_feature: MA Experiment 20000264 PARAMETER Experiment Name: At_Open_Flower_P Parameter: Tissue Value: Open Flower vs. Whole Plant
  misc_feature: MA Experiment ID: 20000265 Result: Up-regulated in Transcription
  misc_feature: MA Experiment 20000265 PARAMETER Experiment Name: At_Open_Flower_P Parameter: Age (day) Value: 21
  misc_feature: MA Experiment 20000265 PARAMETER Experiment Name: At_Open_Flower_P Parameter: Plant Line Value: WS
  misc_feature: MA Experiment 20000265 PARAMETER Experiment Name: At_Open_Flower_P Parameter: Tissue Value: Closed Flower vs. Whole Plant
  misc_feature: MA Experiment ID: 20000286 Result: Up-regulated in Transcription
  misc_feature: MA Experiment 20000286 PARAMETER Experiment Name: At_Open_Flower_P Parameter: Age (day) Value: 21
  misc_feature: MA Experiment 20000286 PARAMETER Experiment Name: At_Open_Flower_P Parameter: Plant Line Value: WS
  misc_feature: MA Experiment 20000286 PARAMETER Experiment Name: At_Open_Flower_P Parameter: Tissue Value: Half Open vs. Whole Plant
  misc_feature: MA Experiment ID: 20000439 Result: Down-regulated in Transcription
  misc_feature: MA Experiment 20000439 PARAMETER Experiment Name: At_Roots__P Parameter: Age (day) Value: 14 vs. 21
  misc_feature: MA Experiment 20000439 PARAMETER Experiment Name: At_Roots__P Parameter: Organism Value: A. thaliana
  misc_feature: MA Experiment 20000439 PARAMETER Experiment Name: At_Roots__P Parameter: Tissue Value: Roots vs. Whole Plant
  misc_feature: MA Experiment ID: 20000794 Result: Up-regulated in Transcription
  misc_feature: MA Experiment 20000794 PARAMETER Experiment Name: At_Petals_P Parameter: Age (day) Value: 23-25 days
  misc_feature: MA Experiment 20000794 PARAMETER Experiment Name: At_Petals_P Parameter: Plant Line Value: WS
  misc_feature: MA Experiment 20000794 PARAMETER Experiment Name: At_Petals_P Parameter: Tissue Value: Petals vs. Whole plant
  misc_feature: MA Experiment ID: 20001558 Result: Up-regulated in Transcription
  misc_feature: MA Experiment 20001558 PARAMETER Experiment Name: At_Drought_Soil_Dry_P Parameter: Age (day) Value: 27
  misc_feature: MA Experiment 20001558 PARAMETER Experiment Name: At_Drought_Soil_Dry_P Parameter: Organism Value: A. thaliana
  misc_feature: MA Experiment 20001558 PARAMETER Experiment Name: At_Drought_Soil_Dry_P Parameter: Plant Line Value: WS
  misc_feature: MA Experiment 20001558 PARAMETER Experiment Name: At_Drought_Soil_Dry_P Parameter: Post Timepoint (hr) Value: 6
  misc_feature: MA Experiment 20001558 PARAMETER Experiment Name: At_Drought_Soil_Dry_P Parameter: Post-Treatment Value: Re-Water vs. No Drought
  misc_feature: MA Experiment 20001558 PARAMETER Experiment Name: At_Drought_Soil_Dry_P Parameter: Timepoint (day) Value: 13
  misc_feature: MA Experiment 20001558 PARAMETER Experiment Name: At_Drought_Soil_Dry_P Parameter: Treatment Value: Drought vs. No Drought
atggctccttcgtcttcatcttctccttccaaatctcctgttccatctcttcaccaatcccttcacttcactcctattctagaatgtgaagaagacgacctccaagaagaaagatacaaaaacagagcaacaccaagcagcgacggtggttcttccgccacaccaaaccaccagcaccaccgccgtaccaacagcaacaacaaccaccagcacactctaacacctctccaccacaacggcaaaccccaaaccagaaaacgacatgacgacaacgacgaagacgatggtggtgccgtatcctgcaacaagtgtcgacctcaccactctcaccgtgacaaattctccgtcgtacctctcgaaagccacaacaacccttctttcatctctagccccaatctcataatcaaatccatcttccaatctctcacacggagaagccccaaaccttcctctgcaacggcggcgcttccaccgcgctcttcctcatcctccgccgcagatgcttctagagaagaacagtggcggttagctgtggcggagctttctcataaactgattcaagccacgaagaagaaagaagacgcggttatagaagcttctaggttgaaatcatccatggcagagctagagaagaaactcaataaactcgagatttactgtcacaatctcaaatcaggtctcgacgaatgcagcaacaaaaaacagagtgttccgattcgaaaagacggattcaacgacaggatcattcagcagtttctcgtctctgtgtcggaatctcgttcttcgatcagagctttaagtagatctctcgcctcgcagctacgaaccgtcggtggcaaagtttacgagagactctctcttcttcttcaacctttcgatgtaaagatcaactcttttgccaaaaaccctaaaagtctgatcttttacctcgaagcgattctgagcagagccttcttcgaggatttcgaagctcctgggtttcagaaaaacgggtcgacccggattttgaatccaattgatcgttgtgaatccaattacgcttcgtttaacgtcttgatggagctgacgtgggatgaggtgttgagcagaggaacgaagcatttctcggaggagtttagccgtttctgtgaccggaagatgagtgacgtcgtttcgatgcttagctggaaccgtgcctggcctgaaccgcttttacaggctttctttggtgcgtcaaagagtgtttggttggttcatcttttggctaattcagtgaacccggggttgcaaatctttcgtgtggagaaagatgaccggtttgatccgatttacatggaggaaaccggtggggaacggtttaagagtctggttagagctatggttcagcccgggttttatgtctatgggagtgtggttaagtgcaaggtggtttgcaagcaatgcggcagcgatgaggaagaactagaagaccatacggtcaaagaatgtaataaaaacgacaagagtttaataagcatttgtagcccattaggaggttaa

SEQ ID NO: 91598 - protein, 505 aa, Arabidopsis thaliana
  peptide (1)..(505): Ceres Seq. ID no. 12728437
  misc_feature (1)..(505): Homolog of NCBI NO: 22329507 NR Description: hypothetical protein; protein id: At1g12330.1
  misc_feature (3)..(472): Homolog of NCBI NO: 15239939 NR Description: putative protein; protein id: At5g12900.1
  misc_feature (113)..(469): Homolog of NCBI NO: 15225441 NR Description: hypothetical protein; protein id: At2g45260.1, by cDNA: gi_20268755, supported by cDNA: gi_21281073 [Arabidopsis >gi|25367434|pir||D84888 hypothetical protein At2g45260
MAPSSSSSPSKSPVPSLHQSLHFTPILECEEDDLQEERYKNRATPSSDGGSSATPNHQHHRRTNSNNNHQHTLTPLHHNGKPQTRKRHDDNDEDDGGAVSCNKCRPHHSHRDKFSVVPLESHNNPSFISSPNLIIKSIFQSLTRRSPKPSSATAALPPRSSSSSAADASREEQWRLAVAELSHKLIQATKKKEDAVIEASRLKSSMAELEKKLNKLEIYCHNLKSGLDECSNKKQSVPIRKDGFNDRIIQQFLVSVSESRSSIRALSRSLASQLRTVGGKVYERLSLLLQPFDVKINSFAKNPKSLIFYLEAILSRAFFEDFEAPGFQKNGSTRILNPIDRCESNYASFNVLMELTWDEVLSRGTKHFSEEFSRFCDRKMSDVVSMLSWNRAWPEPLLQAFFGASKSVWLVHLLANSVNPGLQIFRVEKDDRFDPIYMEETGGERFKSLVRAMVQPGFYVYGSVVKCKVVCKQCGSDEEELEDHTVKECNKNDKSLISICSPLGG

SEQ ID NO: 91599 - protein, 300 aa, Arabidopsis thaliana
  peptide (1)..(300): Ceres Seq. ID no. 12728438
  misc_feature (1)..(300): Homolog of NCBI NO: 22329507 NR Description: hypothetical protein; protein id: At1g12330.1
  misc_feature (1)..(267): Homolog of NCBI NO: 15239939 NR Description: putative protein; protein id: At5g12900.1
  misc_feature (1)..(264): Homolog of NCBI NO: 15225441 NR Description: hypothetical protein; protein id: At2g45260.1, by cDNA: gi_20268755, supported by cDNA: gi_21281073 [Arabidopsis >gi|25367434|pir||D84888 hypothetical protein At2g45260
MAELEKKLNKLEIYCHNLKSGLDECSNKKQSVPIRKDGFNDRIIQQFLVSVSESRSSIRALSRSLASQLRTVGGKVYERLSLLLQPFDVKINSFAKNPKSLIFYLEAILSRAFFEDFEAPGFQKNGSTRILNPIDRCESNYASFNVLMELTWDEVLSRGTKHFSEEFSRFCDRKMSDVVSMLSWNRAWPEPLLQAFFGASKSVWLVHLLANSVNPGLQIFRVEKDDRFDPIYMEETGGERFKSLVRAMVQPGFYVYGSVVKCKVVCKQCGSDEEELEDHTVKECNKNDKSLISICSPLGG

SEQ ID NO: 91600 - DNA, 789 bp, Arabidopsis thaliana
  misc_feature (1)..(789): Ceres Seq. ID no. 12728462
  misc_feature: MA Experiment ID: 20000180 Result: Up-regulated in Transcription
  misc_feature: MA Experiment 20000180 PARAMETER Experiment Name: At_Germinating_Seeds_P Parameter: Age (hr) Value: 24 vs. 0
  misc_feature: MA Experiment 20000180 PARAMETER Experiment Name: At_Germinating_Seeds_P Parameter: Tissue Value: Germinating Seeds
  misc_feature: MA Experiment ID: 20000184 Result: Up-regulated in Transcription
  misc_feature: MA Experiment 20000184 PARAMETER Experiment Name: At_Shoots__P Parameter: Age (day) Value: 7
  misc_feature: MA Experiment 20000184 PARAMETER Experiment Name: At_Shoots__P Parameter: Tissue Value: Shoots vs. Whole Plant
  misc_feature: MA Experiment ID: 20000185 Result: Up-regulated in Transcription
  misc_feature: MA Experiment 20000185 PARAMETER Experiment Name: At_Roots__P Parameter: Age (day) Value: 7 vs. 21
  misc_feature: MA Experiment 20000185 PARAMETER Experiment Name: At_Roots__P Parameter: Organism Value: A. thaliana
  misc_feature: MA Experiment 20000185 PARAMETER Experiment Name: At_Roots__P Parameter: Tissue Value: Roots vs. Whole Plant
  misc_feature: MA Experiment ID: 20000439 Result: Up-regulated in Transcription
  misc_feature: MA Experiment 20000439 PARAMETER Experiment Name: At_Roots__P Parameter: Age (day) Value: 14 vs. 21
  misc_feature: MA Experiment 20000439 PARAMETER Experiment Name: At_Roots__P Parameter: Organism Value: A. thaliana
  misc_feature: MA Experiment 20000439 PARAMETER Experiment Name: At_Roots__P Parameter: Tissue Value: Roots vs. Whole Plant
  misc_feature: MA Experiment ID: 20000527 Result: Down-regulated in Transcription
  misc_feature: MA Experiment 20000527 PARAMETER Experiment Name: At_10percent_PEG_P Parameter: Age (day) Value: 20
  misc_feature: MA Experiment 20000527 PARAMETER Experiment Name: At_10percent_PEG_P Parameter: Organism Value: A. thaliana
  misc_feature: MA Experiment 20000527 PARAMETER Experiment Name: At_10percent_PEG_P Parameter: Plant Line Value: WS
  misc_feature: MA Experiment 20000527 PARAMETER Experiment Name: At_10percent_PEG_P Parameter: Timepoint (day) Value: 20
  misc_feature: MA Experiment 20000527 PARAMETER Experiment Name: At_10percent_PEG_P Parameter: Tissue Value: Whole Plant
  misc_feature: MA Experiment 20000527 PARAMETER Experiment Name: At_10percent_PEG_P Parameter: Treatment Value: 10percent PEG vs. No Treatment
  misc_feature: MA Experiment ID: 20001450 Result: Down-regulated in Transcription
  misc_feature: MA Experiment 20001450 PARAMETER Experiment Name: At_Far-red-induction_P Parameter: Age (day) Value: 7
  misc_feature: MA Experiment 20001450 PARAMETER Experiment Name: At_Far-red-induction_P Parameter: Light Value: Far-red vs. White
  misc_feature: MA Experiment 20001450 PARAMETER Experiment Name: At_Far-red-induction_P Parameter: Organism Value: A. thaliana
  misc_feature: MA Experiment 20001450 PARAMETER Experiment Name: At_Far-red-induction_P Parameter: Plant Line Value: Columbia
  misc_feature: MA Experiment 20001450 PARAMETER Experiment Name: At_Far-red-induction_P Parameter: Timepoint (hr) Value: 8
  misc_feature: MA Experiment 20001450 PARAMETER Experiment Name: At_Far-red-induction_P Parameter: Tissue Value: Whole Plant
atgggtccaatctcaagttcttggagctttaacaaattcttctcaatagttttcgttgttttcgccatctccggcgagttcgtcgctggatactatcgaccaggcccatggagatatgctcacgccactttctacggtgacgagaccggtggtgaaaccatgggtggtgcatgtgggtacggaaacctttttaacagcggctacggactgtccacggcggcgctaagcacgacattgttcaatgatggttacggatgcggccaatgttttcagataacatgttcgaaatcaccgcattgttactctggaaaatcaacagtggtcacagccaccaatctttgccctcctaattggtaccaagactccaacgctggtggttggtgcaatcctcctagaacccatttcgatatggctaaaccagctttcatgaaactcgcttactggagggccggtatcatcccagttgcataccgaagagtgccatgccaaaggagtggaggtatgaggtttcaattccaaggtaattcttattggcttcttatcttcgtcatgaacgttggtggcgccggagacatcaagagcatggccgttaaaggtagccggacgaattggataagcatgagccacaattggggagcctcttaccaagctttttcctctctctatggtcaatctctctctttccgggtcacttcttacaccaccggtgaaaccatctatgcttggaacgttgctccggctaactggagcggcggtaagacttacaagagcaccgctaatttccgttaa

SEQ ID NO: 91601 - protein, 262 aa, Arabidopsis thaliana
  peptide (1)..(262): Ceres Seq. ID no. 12728463
  misc_feature (168)..(246): Pfam Name: Pollen allergen Pfam Description: Pollen allergen
  misc_feature (1)..(262): Homolog of NCBI NO: 15222017 NR Description: expansin, putative; protein id: At1g12560.1
  misc_feature (1)..(262): Homolog of NCBI NO: 25344424 NR Description: protein T12C24.10 [imported] - Arabidopsis >gi|9502371|gb|AAF88078.1|AC025417_6 T12C24.10 [Arabidopsis
  misc_feature (16)..(261): Homolog of NCBI NO: 15221643 NR Description: expansin, putative; protein id: At1g62980.1, by cDNA: gi_12083295 [Arabidopsis thaliana]
  misc_feature (1)..(261): Homolog of NCBI NO: 37536438 NR Description: putative alpha-expansin protein [Oryza sativa
  misc_feature (12)..(262): Homolog of NCBI NO: 11281297 NR Description: expansin 9 [imported] - tomato
  misc_feature (15)..(262): Homolog of NCBI NO: 15227005 NR Description: expansin, putative; protein id: At2g28950.1, by cDNA: 17914., supported by cDNA: gi_16648831, supported by gi_17865811, supported by cDNA: gi_18252948 [Arabidopsis
  misc_feature (15)..(262): Homolog of NCBI NO: 20138197 NR Description: Alpha-expansin 6 precursor (At-EXP6) (AtEx6)
  misc_feature (18)..(262): Homolog of NCBI NO: 15225530 NR Description: expansin, putative; protein id: At2g39700.1, by cDNA: 17353., supported by cDNA: gi_15294171, supported by gi_17065213, supported by cDNA: gi_20259979 [Arabidopsis
  misc_feature (18)..(262): Homolog of NCBI NO: 15224330 NR Description: expansin, putative; protein id: At2g37640.1, by cDNA: gi_19699321 [Arabidopsis thaliana]
  misc_feature (15)..(262): Homolog of NCBI NO: 29466643 NR Description: expansin [Prunus persica]
MGPISSSWSFNKFFSIVFVVFAISGEFVAGYYRPGPWRYAHATFYGDETGGETMGGACGYGNLFNSGYGLSTAALSTTLFNDGYGCGQCFQITCSKSPHCYSGKSTVVTATNLCPPNWYQDSNAGGWCNPPRTHFDMAKPAFMKLAYWRAGIIPVAYRRVPCQRSGGMRFQFQGNSYWLLIFVMNVGGAGDIKSMAVKGSRTNWISMSHNWGASYQAFSSLYGQSLSFRVTSYTTGETIYAWNVAPANWSGGKTYKSTANFR

SEQ ID NO: 91602 - protein, 209 aa, Arabidopsis thaliana
  peptide (1)..(209): Ceres Seq. ID no. 12728464
  misc_feature (115)..(193): Pfam Name: Pollen allergen Pfam Description: Pollen allergen
  misc_feature (1)..(209): Homolog of NCBI NO: 15222017 NR Description: expansin, putative; protein id: At1g12560.1
  misc_feature (1)..(209): Homolog of NCBI NO: 25344424 NR Description: protein T12C24.10 [imported] - Arabidopsis >gi|9502371|gb|AAF88078.1|AC025417_6 T12C24.10 [Arabidopsis
  misc_feature (1)..(208): Homolog of NCBI NO: 15221643 NR Description: expansin, putative; protein id: At1g62980.1, by cDNA: gi_12083295 [Arabidopsis thaliana]
  misc_feature (1)..(208): Homolog of NCBI NO: 37536438 NR Description: putative alpha-expansin protein [Oryza sativa
  misc_feature (1)..(209): Homolog of NCBI NO: 11281297 NR Description: expansin 9 [imported] - tomato
  misc_feature (1)..(209): Homolog of NCBI NO: 15227005 NR Description: expansin, putative; protein id: At2g28950.1, by cDNA: 17914., supported by cDNA: gi_16648831, supported by gi_17865811, supported by cDNA: gi_18252948 [Arabidopsis
  misc_feature (1)..(209): Homolog of NCBI NO: 20138197 NR Description: Alpha-expansin 6 precursor (At-EXP6) (AtEx6)
  misc_feature (1)..(209): Homolog of NCBI NO: 15225530 NR Description: expansin, putative; protein id: At2g39700.1, by cDNA: 17353., supported by cDNA: gi_15294171, supported by gi_17065213, supported by cDNA: gi_20259979 [Arabidopsis
  misc_feature (1)..(209): Homolog of NCBI NO: 15224330 NR Description: expansin, putative; protein id: At2g37640.1, by cDNA: gi_19699321 [Arabidopsis thaliana]
  misc_feature (1)..(209): Homolog of NCBI NO: 29466643 NR Description: expansin [Prunus persica]
MGGACGYGNLFNSGYGLSTAALSTTLFNDGYGCGQCFQITCSKSPHCYSGKSTVVTATNLCPPNWYQDSNAGGWCNPPRTHFDMAKPAFMKLAYWRAGIIPVAYRRVPCQRSGGMRFQFQGNSYWLLIFVMNVGGAGDIKSMAVKGSRTNWISMSHNWGASYQAFSSLYGQSLSFRVTSYTTGETIYAWNVAPANWSGGKTYKSTANFR

SEQ ID NO: 91603 - DNA, 1970 bp, Arabidopsis thaliana
  misc_feature (1)..(1970): Ceres Seq. ID no. 12728465
  misc_feature: MA Experiment ID: 20000184 Result: Down-regulated in Transcription
  misc_feature: MA Experiment 20000184 PARAMETER Experiment Name: At_Shoots__P Parameter: Age (day) Value: 7
  misc_feature: MA Experiment 20000184 PARAMETER Experiment Name: At_Shoots__P Parameter: Tissue Value: Shoots vs. Whole Plant
  misc_feature: MA Experiment ID: 20000234 Result: Down-regulated in Transcription
  misc_feature: MA Experiment 20000234 PARAMETER Experiment Name: At_Siliques_P Parameter: Age (day) Value: 21
  misc_feature: MA Experiment 20000234 PARAMETER Experiment Name: At_Siliques_P Parameter: Organism Value: A. thaliana
  misc_feature: MA Experiment 20000234 PARAMETER Experiment Name: At_Siliques_P Parameter: Plant Line Value: WS
  misc_feature: MA Experiment 20000234 PARAMETER Experiment Name: At_Siliques_P Parameter: Tissue Value: Less Than 5mm Siliques vs. Whole Plant
  misc_feature: MA Experiment ID: 20000235 Result: Down-regulated in Transcription
  misc_feature: MA Experiment 20000235 PARAMETER Experiment Name: At_Siliques_P Parameter: Age (day) Value: 21
  misc_feature: MA Experiment 20000235 PARAMETER Experiment Name: At_Siliques_P Parameter: Organism Value: A. thaliana
  misc_feature: MA Experiment 20000235 PARAMETER Experiment Name: At_Siliques_P Parameter: Plant Line Value: WS
  misc_feature: MA Experiment 20000235 PARAMETER Experiment Name: At_Siliques_P Parameter: Tissue Value: 5-10mm Siliques vs. Whole Plant
  misc_feature: MA Experiment ID: 20000264 Result: Down-regulated in Transcription
  misc_feature: MA Experiment 20000264 PARAMETER Experiment Name: At_Open_Flower_P Parameter: Age (day) Value: 21
  misc_feature: MA Experiment 20000264 PARAMETER Experiment Name: At_Open_Flower_P Parameter: Plant Line Value: WS
  misc_feature: MA Experiment 20000264 PARAMETER Experiment Name: At_Open_Flower_P Parameter: Tissue Value: Open Flower vs. Whole Plant
  misc_feature: MA Experiment ID: 20000265 Result: Down-regulated in Transcription
  misc_feature: MA Experiment 20000265 PARAMETER Experiment Name: At_Open_Flower_P Parameter: Age (day) Value: 21
  misc_feature: MA Experiment 20000265 PARAMETER Experiment Name: At_Open_Flower_P Parameter: Plant Line Value: WS
  misc_feature: MA Experiment 20000265 PARAMETER Experiment Name: At_Open_Flower_P Parameter: Tissue Value: Closed Flower vs. Whole Plant
  misc_feature: MA Experiment ID: 20001247 Result: Up-regulated in Transcription
  misc_feature: MA Experiment 20001247 PARAMETER Experiment Name: At_Far-red-induction_P Parameter: Age (day) Value: 7
  misc_feature: MA Experiment 20001247 PARAMETER Experiment Name: At_Far-red-induction_P Parameter: Light Value: Far-red vs. White
  misc_feature: MA Experiment 20001247 PARAMETER Experiment Name: At_Far-red-induction_P Parameter: Organism Value: A. thaliana
  misc_feature: MA Experiment 20001247 PARAMETER Experiment Name: At_Far-red-induction_P Parameter: Plant Line Value: Columbia
  misc_feature: MA Experiment 20001247 PARAMETER Experiment Name: At_Far-red-induction_P Parameter: Timepoint (hr) Value: 1
  misc_feature: MA Experiment 20001247 PARAMETER Experiment Name: At_Far-red-induction_P Parameter: Tissue Value: Whole Plant
  misc_feature: MA Experiment ID: 20001450 Result: Up-regulated in Transcription
  misc_feature: MA Experiment 20001450 PARAMETER Experiment Name: At_Far-red-induction_P Parameter: Age (day) Value: 7
  misc_feature: MA Experiment 20001450 PARAMETER Experiment Name: At_Far-red-induction_P Parameter: Light Value: Far-red vs. White
  misc_feature: MA Experiment 20001450 PARAMETER Experiment Name: At_Far-red-induction_P Parameter: Organism Value: A. thaliana
  misc_feature: MA Experiment 20001450 PARAMETER Experiment Name: At_Far-red-induction_P Parameter: Plant Line Value: Columbia
  misc_feature: MA Experiment 20001450 PARAMETER Experiment Name: At_Far-red-induction_P Parameter: Timepoint (hr) Value: 8
  misc_feature: MA Experiment 20001450 PARAMETER Experiment Name: At_Far-red-induction_P Parameter: Tissue Value: Whole Plant
  misc_feature: MA Experiment ID: 20001451 Result: Up-regulated in Transcription
  misc_feature: MA Experiment 20001451 PARAMETER Experiment Name: At_Far-red-induction_P Parameter: Age (day) Value: 7
  misc_feature: MA Experiment 20001451 PARAMETER Experiment Name: At_Far-red-induction_P Parameter: Light Value: Far-red vs. White
  misc_feature: MA Experiment 20001451 PARAMETER Experiment Name: At_Far-red-induction_P Parameter: Organism Value: A. thaliana
  misc_feature: MA Experiment 20001451 PARAMETER Experiment Name: At_Far-red-induction_P Parameter: Plant Line Value: Columbia
  misc_feature: MA Experiment 20001451 PARAMETER Experiment Name: At_Far-red-induction_P Parameter: Timepoint (hr) Value: 24
  misc_feature: MA Experiment 20001451 PARAMETER Experiment Name: At_Far-red-induction_P Parameter: Tissue Value: Whole Plant
gagagaggactgggtctggtctcttcgctgcaacctatagctgttgtttgctcttcgacgggattctcactactcttttgccaaaaaaaagagatcggaggttccgaaggtgaatgcagcttgcgatttcatagaaaagaagattcgtttgctggattaggcttatttgtgtatcatagctttgaggttttaactgagatttattgatagtggaacttaggttttcgagaggtgtgaacagttgggtatatgggtatggacatagctgataaggagaatacgagcccgcttttatttgaattctgcaattgctataaagttgcaagccttactgaaaccattctaaaccctgtaaatgtttccaacttaaaagatagatatgtacttggagaacagttaggctggggtcagtttggtgtgataagagtatgttctgataagttaactggagagaggcttgcttgtaagtctatatctaaagacagactggtaacacaagatgacatgaagagtatcaaactcgagattgcgataatggccaagttagctgggcacccaaatgtggtgaatctcaaagcagtttacgaggagaaagattctgtgcatcttgtgatggaactatgcgcaggcggtgagctttttcacaagctcgagaaatatggaaggtattctgaggttcgtgctagggtgctcttcaagcacttgatgcaagtggtcaagttttgtcatgatagcggtattgttcacagagatttgaaaccggaaaacattcttatggccacaatgtcttcttcgtctcctatcaaattggctgattttggactggcaacctatataaagcctggcgaaaagctgagcggaacagttggtagtccgttttatatagccccggaagtgttagcagggggatataaccaagctgctgatgtatggagtgcaggggttattttgtatattcttctcagtggagcgccgcccttttggggaaagactaagtcaaagatttttgatgctgtcagggctgccgatttgagattttctgcagagccatgggacaatataacttcatacgccaaggatttgattcgcgggatgctttgtgtggatccttcccaaaggttatcagctgacgaagttctagctcactcttggatggagcagttatctgaatcaggtcaagaacaatatgatcaggatgggtttggttgtgaaggattggagaatgggggatgttctttctccacacaatgcgtttctcgggaacaagactatagctttagcgttggccagttagagcaatcaacagataacgattttaaatcatcgttctcgacattcctacctgcggataacacactgccaaattccggttttgatgggttttcttttgatgggaaacaaccggaatcaaccacagctggcttctcatcaactggaattccctctatgccaagctttacctttttttgtacaagcccagcaaggacacagaacaacgacataactgaaatagatggaaaagttcgagactcaagcccaaagaggttactgccttcaccagattcttcttcacaacttgagaggcgtgatgaagcaggggagaatcagacagaagcaggaggaaagtcagagacaagaagggaaagaggaaactggtcaagaatgtcaggtctacacagcaaaaggaacagaacaataggactaggcgagctagaccagttggtggtggatgttgcagtcacagagtcgataatcagatgggcatcttgcacgcatattcccaccgctccatctctcagattgtcgctcgtctgctagaagaagaaaacgaagaagacaactgttatcagtaaaatattgtatgtacacatctgattttgtccctgcaatgtctttgtttttgtagtaaaacttttccatggaaactgacctcaactgtataaaccaacggaaatagagtgtgattttga

SEQ ID NO: 91604 - protein, 522 aa, Arabidopsis thaliana
  peptide (1)..(522): Ceres Seq. ID no. 12728466
  misc_feature (44)..(302): Pfam Name: Protein kinase domain Pfam Description: Protein kinase domain
  misc_feature (1)..(522): Homolog of NCBI NO: 15222023 NR Description: calcium-dependent protein kinase, putative; id: At1g12580.1, supported by cDNA: gi_16323175 [Arabidopsis
  misc_feature (3)..(522): Homolog of NCBI NO: 21064945 NR Description: CDPK-like protein [Solanum tuberosum]
  misc_feature (20)..(522): Homolog of NCBI NO: 25553562 NR Description: OSJNBa0038F22.11 [Oryza sativa (japonica
  misc_feature (20)..(522): Homolog of NCBI NO: 34898032 NR Description: ESTs AU030197(E50746),AU030196(E50746) correspond
  misc_feature (26)..(302): Homolog of NCBI NO: 2315983 NR Description: calmodulin-like domain protein kinase [Tortula
  misc_feature (27)..(302): Homolog of NCBI NO: 27819504 NR Description: putative calcium-dependent protein kinase [Oryza
  misc_feature (26)..(314): Homolog of NCBI NO: 5162877 NR Description: calcium-dependent protein kinase [Marchantia
  misc_feature (26)..(314): Homolog of NCBI NO: 5162878 NR Description: calcium-dependent protein kinase [Marchantia
  misc_feature (27)..(302): Homolog of NCBI NO: 33146743 NR Description: putative calcium-dependent protein kinase 2
  misc_feature (37)..(308): Homolog of NCBI NO: 15239716 NR Description: calcium-dependent protein kinase - like; protein
MGMDIADKENTSPLLFEFCNCYKVASLTETILNPVNVSNLKDRYVLGEQLGWGQFGVIRVCSDKLTGERLACKSISKDRLVTQDDMKSIKLEIAIMAKLAGHPNVVNLKAVYEEKDSVHLVMELCAGGELFHKLEKYGRYSEVRARVLFKHLMQVVKFCHDSGIVHRDLKPENILMATMSSSSPIKLADFGLATYIKPGEKLSGTVGSPFYIAPEVLAGGYNQAADVWSAGVILYILLSGAPPFWGKTKSKIFDAVRAADLRFSAEPWDNITSYAKDLIRGMLCVDPSQRLSADEVLAHSWMEQLSESGQEQYDQDGFGCEGLENGGCSFSTQCVSREQDYSFSVGQLEQSTDNDFKSSFSTFLPADNTLPNSGFDGFSFDGKQPESTTAGFSSTGIPSMPSFTFFCTSPARTQNNDITEIDGKVRDSSPKRLLPSPDSSSQLERRDEAGENQTEAGGKSETRRERGNWSRMSGLHSKRNRTIGLGELDQLVVDVAVTESIIRWASCTHIPTAPSLRLSLVC

SEQ ID NO: 91605 - protein, 520 aa, Arabidopsis thaliana
  peptide (1)..(520): Ceres Seq. ID no. 12728467
  misc_feature (42)..(300): Pfam Name: Protein kinase domain Pfam Description: Protein kinase domain
  misc_feature (1)..(520): Homolog of NCBI NO: 15222023 NR Description: calcium-dependent protein kinase, putative; id: At1g12580.1, supported by cDNA: gi_16323175 [Arabidopsis
  misc_feature (1)..(520): Homolog of NCBI NO: 21064945 NR Description: CDPK-like protein [Solanum tuberosum]
  misc_feature (18)..(520): Homolog of NCBI NO: 25553562 NR Description: OSJNBa0038F22.11 [Oryza sativa (japonica
  misc_feature (18)..(520): Homolog of NCBI NO: 34898032 NR Description: ESTs AU030197(E50746),AU030196(E50746) correspond
  misc_feature (24)..(300): Homolog of NCBI NO: 2315983 NR Description: calmodulin-like domain protein kinase [Tortula
  misc_feature (25)..(300): Homolog of NCBI NO: 27819504 NR Description: putative calcium-dependent protein kinase [Oryza
  misc_feature (24)..(312): Homolog of NCBI NO: 5162877 NR Description: calcium-dependent protein kinase [Marchantia
  misc_feature (24)..(312): Homolog of NCBI NO: 5162878 NR Description: calcium-dependent protein kinase [Marchantia
  misc_feature (25)..(300): Homolog of NCBI NO: 33146743 NR Description: putative calcium-dependent protein kinase 2
  misc_feature (35)..(306): Homolog of NCBI NO: 15239716 NR Description: calcium-dependent protein kinase - like; protein
MDIADKENTSPLLFEFCNCYKVASLTETILNPVNVSNLKDRYVLGEQLGWGQFGVIRVCSDKLTGERLACKSISKDRLVTQDDMKSIKLEIAIMAKLAGHPNVVNLKAVYEEKDSVHLVMELCAGGELFHKLEKYGRYSEVRARVLFKHLMQVVKFCHDSGIVHRDLKPENILMATMSSSSPIKLADFGLATYIKPGEKLSGTVGSPFYIAPEVLAGGYNQAADVWSAGVILYILLSGAPPFWGKTKSKIFDAVRAADLRFSAEPWDNITSYAKDLIRGMLCVDPSQRLSADEVLAHSWMEQLSESGQEQYDQDGFGCEGLENGGCSFSTQCVSREQDYSFSVGQLEQSTDNDFKSSFSTFLPADNTLPNSGFDGFSFDGKQPESTTAGFSSTGIPSMPSFTFFCTSPARTQNNDITEIDGKVRDSSPKRLLPSPDSSSQLERRDEAGENQTEAGGKSETRRERGNWSRMSGLHSKRNRTIGLGELDQLVVDVAVTESIIRWASCTHIPTAPSLRLSLVC

SEQ ID NO: 91606 - protein, 437 aa, Arabidopsis thaliana
  peptide (1)..(437): Ceres Seq. ID no. 12728468
  misc_feature (1)..(217): Pfam Name: Protein kinase domain Pfam Description: Protein kinase domain
  misc_feature (1)..(437): Homolog of NCBI NO: 15222023 NR Description: calcium-dependent protein kinase, putative; id: At1g12580.1, supported by cDNA: gi_16323175 [Arabidopsis
  misc_feature (1)..(437): Homolog of NCBI NO: 21064945 NR Description: CDPK-like protein [Solanum tuberosum]
  misc_feature (1)..(437): Homolog of NCBI NO: 25553562 NR Description: OSJNBa0038F22.11 [Oryza sativa (japonica
  misc_feature (1)..(437): Homolog of NCBI NO: 34898032 NR Description: ESTs AU030197(E50746),AU030196(E50746) correspond
  misc_feature (1)..(217): Homolog of NCBI NO: 2315983 NR Description: calmodulin-like domain protein kinase [Tortula
  misc_feature (1)..(217): Homolog of NCBI NO: 27819504 NR Description: putative calcium-dependent protein kinase [Oryza
  misc_feature (1)..(229): Homolog of NCBI NO: 5162877 NR Description: calcium-dependent protein kinase [Marchantia
  misc_feature (1)..(229): Homolog of NCBI NO: 5162878 NR Description: calcium-dependent protein kinase [Marchantia
  misc_feature (1)..(217): Homolog of NCBI NO: 33146743 NR Description: putative calcium-dependent protein kinase 2
  misc_feature (1)..(223): Homolog of NCBI NO: 15239716 NR Description: calcium-dependent protein kinase - like; protein
MKSIKLEIAIMAKLAGHPNVVNLKAVYEEKDSVHLVMELCAGGELFHKLEKYGRYSEVRARVLFKHLMQVVKFCHDSGIVHRDLKPENILMATMSSSSPIKLADFGLATYIKPGEKLSGTVGSPFYIAPEVLAGGYNQAADVWSAGVILYILLSGAPPFWGKTKSKIFDAVRAADLRFSAEPWDNITSYAKDLIRGMLCVDPSQRLSADEVLAHSWMEQLSESGQEQYDQDGFGCEGLENGGCSFSTQCVSREQDYSFSVGQLEQSTDNDFKSSFSTFLPADNTLPNSGFDGFSFDGKQPESTTAGFSSTGIPSMPSFTFFCTSPARTQNNDITEIDGKVRDSSPKRLLPSPDSSSQLERRDEAGENQTEAGGKSETRRERGNWSRMSGLHSKRNRTIGLGELDQLVVDVAVTESIIRWASCTHIPTAPSLRLSLVC

SEQ ID NO: 91607 - DNA, 630 bp, Arabidopsis thaliana
  misc_feature (1)..(630): Ceres Seq. ID no. 12728473
  misc_feature: MA Experiment ID: 20000184 Result: Down-regulated in Transcription
  misc_feature: MA Experiment 20000184 PARAMETER Experiment Name: At_Shoots__P Parameter: Age (day) Value: 7
  misc_feature: MA Experiment 20000184 PARAMETER Experiment Name: At_Shoots__P Parameter: Tissue Value: Shoots vs. Whole Plant
  misc_feature: MA Experiment ID: 20000185 Result: Down-regulated in Transcription
  misc_feature: MA Experiment 20000185 PARAMETER Experiment Name: At_Roots__P Parameter: Age (day) Value: 7 vs. 21
  misc_feature: MA Experiment 20000185 PARAMETER Experiment Name: At_Roots__P Parameter: Organism Value: A. thaliana
  misc_feature: MA Experiment 20000185 PARAMETER Experiment Name: At_Roots__P Parameter: Tissue Value: Roots vs. Whole Plant
  misc_feature: MA Experiment ID: 20000211 Result: Up-regulated in Transcription
  misc_feature: MA Experiment 20000211 PARAMETER Experiment Name: At_0.001percent_MeJA__P Parameter: Age (day) Value: 14
  misc_feature: MA Experiment 20000211 PARAMETER Experiment Name: At_0.001percent_MeJA__P Parameter: Organism Value: A. thaliana
  misc_feature: MA Experiment 20000211 PARAMETER Experiment Name: At_0.001percent_MeJA__P Parameter: Plant Line Value: WS
  misc_feature: MA Experiment 20000211 PARAMETER Experiment Name: At_0.001percent_MeJA__P Parameter: Timepoint (hr) Value: 1
  misc_feature: MA Experiment 20000211 PARAMETER Experiment Name: At_0.001percent_MeJA__P Parameter: Tissue Value: Aerial
  misc_feature: MA Experiment 20000211 PARAMETER Experiment Name: At_0.001percent_MeJA__P Parameter: Treatment Value: 0.001percent MeJA vs. No Treatment
  misc_feature: MA Experiment ID: 20000234 Result: Down-regulated in Transcription
  misc_feature: MA Experiment 20000234 PARAMETER Experiment Name: At_Siliques_P Parameter: Age (day) Value: 21
  misc_feature: MA Experiment 20000234 PARAMETER Experiment Name: At_Siliques_P Parameter: Organism Value: A. thaliana
  misc_feature: MA Experiment 20000234 PARAMETER Experiment Name: At_Siliques_P Parameter: Plant Line Value: WS
  misc_feature: MA Experiment 20000234 PARAMETER Experiment Name: At_Siliques_P Parameter: Tissue Value: Less Than 5mm Siliques vs. Whole Plant
  misc_feature: MA Experiment ID: 20000235 Result: Down-regulated in Transcription
  misc_feature: MA Experiment 20000235 PARAMETER Experiment Name: At_Siliques_P Parameter: Age (day) Value: 21
  misc_feature: MA Experiment 20000235 PARAMETER Experiment Name: At_Siliques_P Parameter: Organism Value: A. thaliana
  misc_feature: MA Experiment 20000235 PARAMETER Experiment Name: At_Siliques_P Parameter: Plant Line Value: WS
  misc_feature: MA Experiment 20000235 PARAMETER Experiment Name: At_Siliques_P Parameter: Tissue Value: 5-10mm Siliques vs. Whole Plant
  misc_feature: MA Experiment ID: 20000264 Result: Down-regulated in Transcription
  misc_feature: MA Experiment 20000264 PARAMETER Experiment Name: At_Open_Flower_P Parameter: Age (day) Value: 21
  misc_feature: MA Experiment 20000264 PARAMETER Experiment Name: At_Open_Flower_P Parameter: Plant Line Value: WS
  misc_feature: MA Experiment 20000264 PARAMETER Experiment Name: At_Open_Flower_P Parameter: Tissue Value: Open Flower vs. Whole Plant
  misc_feature: MA Experiment ID: 20000265 Result: Down-regulated in Transcription
  misc_feature: MA Experiment 20000265 PARAMETER Experiment Name: At_Open_Flower_P Parameter: Age (day) Value: 21
  misc_feature: MA Experiment 20000265 PARAMETER Experiment Name: At_Open_Flower_P Parameter: Plant Line Value: WS
  misc_feature: MA Experiment 20000265 PARAMETER Experiment Name: At_Open_Flower_P Parameter: Tissue Value: Closed Flower vs. Whole Plant
  misc_feature: MA Experiment ID: 20000267 Result: Up-regulated in Transcription
  misc_feature: MA Experiment 20000267 PARAMETER Experiment Name: At_Drought_P Parameter: Age (day) Value: 7
  misc_feature: MA Experiment 20000267 PARAMETER Experiment Name: At_Drought_P Parameter: Organism Value: A. thaliana
  misc_feature: MA Experiment 20000267 PARAMETER Experiment Name: At_Drought_P Parameter: Plant Line Value: WS
  misc_feature: MA Experiment 20000267 PARAMETER Experiment Name: At_Drought_P Parameter: Timepoint (hr) Value: 6
  misc_feature: MA Experiment 20000267 PARAMETER Experiment Name: At_Drought_P Parameter: Tissue Value: Whole Plant
  misc_feature: MA Experiment 20000267 PARAMETER Experiment Name: At_Drought_P Parameter: Treatment Value: Drought vs. No Drought
  misc_feature: MA Experiment ID: 20000286 Result: Down-regulated in Transcription
  misc_feature: MA Experiment 20000286 PARAMETER Experiment Name: At_Open_Flower_P Parameter: Age (day) Value: 21
  misc_feature: MA Experiment 20000286 PARAMETER Experiment Name: At_Open_Flower_P Parameter: Plant Line Value: WS
  misc_feature: MA Experiment 20000286 PARAMETER Experiment Name: At_Open_Flower_P Parameter: Tissue Value: Half Open vs. Whole Plant
  misc_feature: MA Experiment ID: 20000438 Result: Down-regulated in Transcription
  misc_feature: MA Experiment 20000438 PARAMETER Experiment Name: At_Shoots__P Parameter: Age (day) Value: 14
  misc_feature: MA Experiment 20000438 PARAMETER Experiment Name: At_Shoots__P Parameter: Tissue Value: Shoots vs. Whole Plant
  misc_feature: MA Experiment ID: 20000439 Result: Down-regulated in Transcription
  misc_feature: MA Experiment 20000439 PARAMETER Experiment Name: At_Roots__P Parameter: Age (day) Value: 14 vs. 21
  misc_feature: MA Experiment 20000439 PARAMETER Experiment Name: At_Roots__P Parameter: Organism Value: A. thaliana
  misc_feature: MA Experiment 20000439 PARAMETER Experiment Name: At_Roots__P Parameter: Tissue Value: Roots vs. Whole Plant
  misc_feature: MA Experiment ID: 20000495 Result: Down-regulated in Transcription
  misc_feature: MA Experiment 20000495 PARAMETER Experiment Name: At_Guard_Cells_P Parameter: Harvest Date Value: 8/2/2002
  misc_feature: MA Experiment 20000495 PARAMETER Experiment Name: At_Guard_Cells_P Parameter: Organism Value: A. thaliana
  misc_feature: MA Experiment 20000495 PARAMETER Experiment Name: At_Guard_Cells_P Parameter: Tissue Value: Guard Cells vs. Leaves
  misc_feature: MA Experiment ID: 20000496 Result: Down-regulated in Transcription
  misc_feature: MA Experiment 20000496 PARAMETER Experiment Name: At_Guard_Cells_P Parameter: Harvest Date Value: 7/19/2002
  misc_feature: MA Experiment 20000496 PARAMETER Experiment Name: At_Guard_Cells_P Parameter: Organism Value: Canola
  misc_feature: MA Experiment 20000496 PARAMETER Experiment Name: At_Guard_Cells_P Parameter: Tissue Value: Guard Cells vs. Leaves
  misc_feature: MA Experiment ID: 20000527 Result: Up-regulated in Transcription
  misc_feature: MA Experiment 20000527 PARAMETER Experiment Name: At_10percent_PEG_P Parameter: Age (day) Value: 20
  misc_feature: MA Experiment 20000527 PARAMETER Experiment Name: At_10percent_PEG_P Parameter: Organism Value: A. thaliana
  misc_feature: MA Experiment 20000527 PARAMETER Experiment Name: At_10percent_PEG_P Parameter: Plant Line Value: WS
  misc_feature: MA Experiment 20000527 PARAMETER Experiment Name: At_10percent_PEG_P Parameter: Timepoint (day) Value: 20
  misc_feature: MA Experiment 20000527 PARAMETER Experiment Name: At_10percent_PEG_P Parameter: Tissue Value: Whole Plant
  misc_feature: MA Experiment 20000527 PARAMETER Experiment Name: At_10percent_PEG_P Parameter: Treatment Value: 10percent PEG vs. No Treatment
  misc_feature: MA Experiment ID: 20000794 Result: Down-regulated in Transcription
  misc_feature: MA Experiment 20000794 PARAMETER Experiment Name: At_Petals_P Parameter: Age (day) Value: 23-25 days
  misc_feature: MA Experiment 20000794 PARAMETER Experiment Name: At_Petals_P Parameter: Plant Line Value: WS
  misc_feature: MA Experiment 20000794 PARAMETER Experiment Name: At_Petals_P Parameter: Tissue Value: Petals vs. Whole plant
  misc_feature: MA Experiment ID: 20001451 Result: Up-regulated in Transcription
  misc_feature: MA Experiment 20001451 PARAMETER Experiment Name: At_Far-red-induction_P Parameter: Age (day) Value: 7
  misc_feature: MA Experiment 20001451 PARAMETER Experiment Name: At_Far-red-induction_P Parameter: Light Value: Far-red vs. White
  misc_feature: MA Experiment 20001451 PARAMETER Experiment Name: At_Far-red-induction_P Parameter: Organism Value: A. thaliana
  misc_feature: MA Experiment 20001451 PARAMETER Experiment Name: At_Far-red-induction_P Parameter: Plant Line Value: Columbia
  misc_feature: MA Experiment 20001451 PARAMETER Experiment Name: At_Far-red-induction_P Parameter: Timepoint (hr) Value: 24
  misc_feature: MA Experiment 20001451 PARAMETER Experiment Name: At_Far-red-induction_P Parameter: Tissue Value: Whole Plant
  misc_feature: MA Experiment ID: 20001557 Result: Up-regulated in Transcription
  misc_feature: MA Experiment 20001557 PARAMETER Experiment Name: At_Drought_Soil_Dry_P Parameter: Age (day) Value: 27
  misc_feature: MA Experiment 20001557 PARAMETER Experiment Name: At_Drought_Soil_Dry_P Parameter: Organism Value: A. thaliana
  misc_feature: MA Experiment 20001557 PARAMETER Experiment Name: At_Drought_Soil_Dry_P Parameter: Plant Line Value: WS
  misc_feature: MA Experiment 20001557 PARAMETER Experiment Name: At_Drought_Soil_Dry_P Parameter: Post Timepoint (hr) Value: 3
  misc_feature: MA Experiment 20001557 PARAMETER Experiment Name: At_Drought_Soil_Dry_P Parameter: Post-Treatment Value: Re-Water vs. No Drought
  misc_feature: MA Experiment 20001557 PARAMETER Experiment Name: At_Drought_Soil_Dry_P Parameter: Timepoint (day) Value: 13
  misc_feature: MA Experiment 20001557 PARAMETER Experiment Name: At_Drought_Soil_Dry_P Parameter: Treatment Value: Drought vs. No Drought
  misc_feature: MA Experiment ID: 20001759 Result: Down-regulated in Transcription
  misc_feature: MA Experiment 20001759 PARAMETER Experiment Name: At_50mM_NH4NO3_L-to-H_P Parameter: Timepoint (hr) Value: 1
  misc_feature: MA Experiment 20001759 PARAMETER Experiment Name: At_50mM_NH4NO3_L-to-H_P Parameter: Tissue Value: Siliques
  misc_feature: MA Experiment 20001759 PARAMETER Experiment Name: At_50mM_NH4NO3_L-to-H_P Parameter: Treatment Value: 50mM NH4NO3 vs 100mM Mannitol
  misc_feature: MA Experiment ID: 20001760 Result: Down-regulated in Transcription
  misc_feature: MA Experiment 20001760 PARAMETER Experiment Name: At_50mM_NH4NO3_L-to-H_P Parameter: Timepoint (hr) Value: 2
  misc_feature: MA Experiment 20001760 PARAMETER Experiment Name: At_50mM_NH4NO3_L-to-H_P Parameter: Tissue Value: Siliques
  misc_feature: MA Experiment 20001760 PARAMETER Experiment Name: At_50mM_NH4NO3_L-to-H_P Parameter: Treatment Value: 50mM NH4NO3 vs 100mM Mannitol
  misc_feature: MA Experiment ID: 20001761 Result: Down-regulated in Transcription
  misc_feature: MA Experiment 20001761 PARAMETER Experiment Name: At_50mM_NH4NO3_L-to-H_P Parameter: Timepoint (hr) Value: 4
  misc_feature: MA Experiment 20001761 PARAMETER Experiment Name: At_50mM_NH4NO3_L-to-H_P Parameter: Tissue Value: Siliques
  misc_feature: MA Experiment 20001761 PARAMETER Experiment Name: At_50mM_NH4NO3_L-to-H_P Parameter: Treatment Value: 50mM NH4NO3 vs 100mM Mannitol
  misc_feature: MA Experiment ID: 20001904 Result: Down-regulated in Transcription
  misc_feature: MA Experiment 20001904 PARAMETER Experiment Name: At_Drought_Reproduction_P Parameter: Age (day) Value: 37
  misc_feature: MA Experiment 20001904 PARAMETER Experiment Name: At_Drought_Reproduction_P Parameter: Organism Value: A. thaliana
  misc_feature: MA Experiment 20001904 PARAMETER Experiment Name: At_Drought_Reproduction_P Parameter: Plant Line Value: WS
  misc_feature: MA Experiment 20001904 PARAMETER Experiment Name: At_Drought_Reproduction_P Parameter: Timepoint (day) Value: 7
  misc_feature: MA Experiment 20001904 PARAMETER Experiment Name: At_Drought_Reproduction_P Parameter: Tissue Value: Rosettes
  misc_feature: MA Experiment 20001904 PARAMETER Experiment Name: At_Drought_Reproduction_P Parameter: Treatment Value: Drought vs. No Drought
  misc_feature: MA Experiment ID: 20001910 Result: Down-regulated in Transcription
  misc_feature: MA Experiment 20001910 PARAMETER Experiment Name: At_Drought_Reproduction_P Parameter: Age (day) Value: 37
  misc_feature: MA Experiment 20001910 PARAMETER Experiment Name: At_Drought_Reproduction_P Parameter: Organism Value: A. thaliana
  misc_feature: MA Experiment 20001910 PARAMETER Experiment Name: At_Drought_Reproduction_P Parameter: Plant Line Value: WS
  misc_feature: MA Experiment 20001910 PARAMETER Experiment Name: At_Drought_Reproduction_P Parameter: Timepoint (day) Value: 7
  misc_feature: MA Experiment 20001910 PARAMETER Experiment Name: At_Drought_Reproduction_P Parameter: Tissue Value: Flowers
  misc_feature: MA Experiment 20001910 PARAMETER Experiment Name: At_Drought_Reproduction_P Parameter: Treatment Value: Drought vs. No Drought
atgaataatgatgatattattctggcggagatgaggcctaagaagcgtgcgggaaggagagtgtttaaggagacacgtcacccagtttacagaggcataaggcggaggaacggtgacaaatgggtctgcgaagtcagagaaccgacgcaccaacgccgcatttggctcgggacttatcccacagcagatatggcagcgcgtgcacacgacgtggcggttttagctctgcgtgggagatccgcatgtttgaatttcgccgactccgcttggcggcttccggtgccggaatccaatgatccggatgtgataagaagagttgcggcggaagctgcggagatgtttaggccggtggatttagaaagtggaattacggttttgccttgtgcgggagatgatgtggatttgggttttggttcgggttccggctctggttcgggatcggaggagaggaattcttcttcgtatggatttggagactacgaagaagtctcaacgacgatgatgagactcgcggaggggccactaatgtcgccgccgcgatcgtatatggaagacatgactcctactaatgtttacacggaagaagagatgtgttatgaagatatgtcattgtggagttacagatattaa

SEQ ID NO: 91608 - protein, 209 aa, Arabidopsis thaliana
  peptide (1)..(209): Ceres Seq. ID no. 12728474
  misc_feature (27)..(91): Pfam Name: AP2 domain Pfam Description: AP2 domain
  misc_feature (1)..(209): Homolog of NCBI NO: 15222028 NR Description: transcriptional activator CBF1, putative; protein At1g12610.1 [Arabidopsis thaliana] >gi|25350646|pir||H86259
  misc_feature (1)..(131): Homolog of NCBI NO: 15221664 NR Description: transcription factor DREB1A, putative; protein At1g63030.1 [Arabidopsis thaliana] >gi|25404392|pir||E96655
  misc_feature (151)..(207): Homolog of NCBI NO: 15221664 NR Description: transcription factor DREB1A, putative; protein At1g63030.1 [Arabidopsis thaliana] >gi|25404392|pir||E96655
  misc_feature (2)..(207): Homolog of NCBI NO: 23495460 NR Description: dehydration responsive element binding protein 1
  misc_feature (1)..(207): Homolog of NCBI NO: 23495458 NR Description: dehydratiion responsive element binding protein 1
  misc_feature (2)..(124): Homolog of NCBI NO: 37147896 NR Description: CaCBF1B [Capsicum annuum]
  misc_feature (2)..(124): Homolog of NCBI NO: 40647095 NR Description: DREB-like protein 1 [Capsicum annuum]
  misc_feature (2)..(121): Homolog of NCBI NO: 12003384 NR Description: Avr9/Cf-9 rapidly elicited protein 111B
  misc_feature (2)..(122): Homolog of NCBI NO: 18535580 NR Description: putative transcriptional activator CBF1
  misc_feature (8)..(207): Homolog of NCBI NO: 38683266 NR Description: Cbcbf [Capsella bursa-pastoris]
MNNDDIILAEMRPKKRAGRRVFKETRHPVYRGIRRRNGDKWVCEVREPTHQRRIWLGTYPTADMAARAHDVAVLALRGRSACLNFADSAWRLPVPESNDPDVIRRVAAEAAEMFRPVDLESGITVLPCAGDDVDLGFGSGSGSGSGSEERNSSSYGFGDYEEVSTTMMRLAEGPLMSPPRSYMEDMTPTNVYTEEEMCYEDMSLWSYRY

SEQ ID NO: 91609 - protein, 199 aa, Arabidopsis thaliana
  peptide (1)..(199): Ceres Seq. ID no. 12728475
  misc_feature (17)..(81): Pfam Name: AP2 domain Pfam Description: AP2 domain
  misc_feature (1)..(199): Homolog of NCBI NO: 15222028 NR Description: transcriptional activator CBF1, putative; protein At1g12610.1 [Arabidopsis thaliana] >gi|25350646|pir||H86259
  misc_feature (1)..(121): Homolog of NCBI NO: 15221664 NR Description: transcription factor DREB1A, putative; protein At1g63030.1 [Arabidopsis thaliana] >gi|25404392|pir||E96655
  misc_feature (141)..(197): Homolog of NCBI NO: 15221664 NR Description: transcription factor DREB1A, putative; protein At1g63030.1 [Arabidopsis thaliana] >gi|25404392|pir||E96655
  misc_feature (1)..(197): Homolog of NCBI NO: 23495460 NR Description: dehydration responsive element binding protein 1
  misc_feature (1)..(197): Homolog of NCBI NO: 23495458 NR Description: dehydratiion responsive element binding protein 1
  misc_feature (1)..(114): Homolog of NCBI NO: 37147896 NR Description: CaCBF1B [Capsicum annuum]
  misc_feature (1)..(114): Homolog of NCBI NO: 40647095 NR Description: DREB-like protein 1 [Capsicum annuum]
  misc_feature (1)..(111): Homolog of NCBI NO: 12003384 NR Description: Avr9/Cf-9 rapidly elicited protein 111B
  misc_feature (1)..(112): Homolog of NCBI NO: 18535580 NR Description: putative transcriptional activator CBF1
  misc_feature (1)..(197): Homolog of NCBI NO: 38683266 NR Description: Cbcbf [Capsella bursa-pastoris]
MRPKKRAGRRVFKETRHPVYRGIRRRNGDKWVCEVREPTHQRRIWLGTYPTADMAARAHDVAVLALRGRSACLNFADSAWRLPVPESNDPDVIRRVAAEAAEMFRPVDLESGITVLPCAGDDVDLGFGSGSGSGSGSEERNSSSYGFGDYEEVSTTMMRLAEGPLMSPPRSYMEDMTPTNVYTEEEMCYEDMSLWSYRY

SEQ ID NO: 91610 - protein, 146 aa, Arabidopsis thaliana
  peptide (1)..(146): Ceres Seq. ID no. 12728476
  misc_feature (1)..(146): Homolog of NCBI NO: 15222028 NR Description: transcriptional activator CBF1, putative; protein At1g12610.1 [Arabidopsis thaliana] >gi|25350646|pir||H86259
  misc_feature (1)..(68): Homolog of NCBI NO: 15221664 NR Description: transcription factor DREB1A, putative; protein At1g63030.1 [Arabidopsis thaliana] >gi|25404392|pir||E96655
  misc_feature (88)..(144): Homolog of NCBI NO: 15221664 NR Description: transcription factor DREB1A, putative; protein At1g63030.1 [Arabidopsis thaliana] >gi|25404392|pir||E96655
  misc_feature (1)..(144): Homolog of NCBI NO: 23495460 NR Description: dehydration responsive element binding protein 1
  misc_feature (1)..(144): Homolog of NCBI NO: 23495458 NR Description: dehydratiion responsive element binding protein 1
  misc_feature (1)..(61): Homolog of NCBI NO: 37147896 NR Description: CaCBF1B [Capsicum annuum]
  misc_feature (1)..(61): Homolog of NCBI NO: 40647095 NR Description: DREB-like protein 1 [Capsicum annuum]
  misc_feature (1)..(58): Homolog of NCBI NO: 12003384 NR Description: Avr9/Cf-9 rapidly elicited protein 111B
  misc_feature (1)..(59): Homolog of NCBI NO: 18535580 NR Description: putative transcriptional activator CBF1
  misc_feature (1)..(144): Homolog of NCBI NO: 38683266 NR Description: Cbcbf [Capsella bursa-pastoris]
MAARAHDVAVLALRGRSACLNFADSAWRLPVPESNDPDVIRRVAAEAAEMFRPVDLESGITVLPCAGDDVDLGFGSGSGSGSGSEERNSSSYGFGDYEEVSTTMMRLAEGPLMSPPRSYMEDMTPTNVYTEEEMCYEDMSLWSYRY

SEQ ID NO: 91611 - DNA, 567 bp, Arabidopsis thaliana
  misc_feature (1)..(567): Ceres Seq. ID no. 12728481
  misc_feature: MA Experiment ID: 20000184 Result: Up-regulated in Transcription
  misc_feature: MA Experiment 20000184 PARAMETER Experiment Name: At_Shoots__P Parameter: Age (day) Value: 7
  misc_feature: MA Experiment 20000184 PARAMETER Experiment Name: At_Shoots__P Parameter: Tissue Value: Shoots vs. Whole Plant
  misc_feature: MA Experiment ID: 20001451 Result: Up-regulated in Transcription
  misc_feature: MA Experiment 20001451 PARAMETER Experiment Name: At_Far-red-induction_P Parameter: Age (day) Value: 7
  misc_feature: MA Experiment 20001451 PARAMETER Experiment Name: At_Far-red-induction_P Parameter: Light Value: Far-red vs. White
  misc_feature: MA Experiment 20001451 PARAMETER Experiment Name: At_Far-red-induction_P Parameter: Organism Value: A. thaliana
  misc_feature: MA Experiment 20001451 PARAMETER Experiment Name: At_Far-red-induction_P Parameter: Plant Line Value: Columbia
  misc_feature: MA Experiment 20001451 PARAMETER Experiment Name: At_Far-red-induction_P Parameter: Timepoint (hr) Value: 24
  misc_feature: MA Experiment 20001451 PARAMETER Experiment Name: At_Far-red-induction_P Parameter: Tissue Value: Whole Plant
atggcttctgccggcttaggtagccggagaaaggatccggtgtacagaggaatccggtgccgaagtgggaaatgggtctccgagattcgtgagccgaggaaaaccacgagaatctggcttggaacttaccccatggcagagatggcagcagccgcctatgatgtggctgctatggctcttaaaggaagagaagctgtcttgaacttccctggatccgtcgggtcatacccggttcctgaatcaacatccgcagcagatatacgagccgctgcggcagccgcagcagcaatgaagggatgtgaggaaggggaggaggagaaaaaggcaaaggagaagaagagtagtagttcgaagtcgagagcgcgtgagtgccacgtagataatgatgttggatcttcgtcgtggtgtgggacagagttcatggacgaagaagaagtcttgaatatgcctaatctgctggctaatatggcagaagggatgatggttgcgccgccgtcgtggatgggttctcggccgtcggatgactctccggagaattcaaatgatgaggacttgtggggctattga

SEQ ID NO: 91612 - protein, 188 aa, Arabidopsis thaliana
  peptide (1)..(188): Ceres Seq. ID no. 12728482
  misc_feature (12)..(75): Pfam Name: AP2 domain Pfam Description: AP2 domain
  misc_feature (1)..(188): Homolog of NCBI NO: 15222031 NR Description: DRE binding protein; protein id: At1g12630.1
  misc_feature (6)..(188): Homolog of NCBI NO: 25404394 NR Description: hypothetical protein F16M19.1 [imported] - thaliana >gi|12323257|gb|AAG51609.1|AC010795_13 transcription
  misc_feature (6)..(178): Homolog of NCBI NO: 8493594 NR Description: Contains similarity to transcriptional activator from Arabidopsis thaliana gb|U77378 and contains an AP2 PF|00847
  misc_feature (7)..(188): Homolog of NCBI NO: 15242262 NR Description: DRE binding protein; protein id: At5g52020.1, by cDNA: 251466. [Arabidopsis thaliana] contains similarity to AP2 domain transcription
  misc_feature (11)..(188): Homolog of NCBI NO: 15227980 NR Description: DRE binding protein; protein id: At2g36450.1 thaliana] >gi|25408476|pir||H84780 probable AP2 domain
  misc_feature (2)..(182): Homolog of NCBI NO: 14140155 NR Description: putative AP2 domain transcription factor [Oryza
  misc_feature (11)..(104): Homolog of NCBI NO: 17352283 NR Description: CBF-like protein [Brassica napus]
  misc_feature (121)..(188): Homolog of NCBI NO: 17352283 NR Description: CBF-like protein [Brassica napus]
  misc_feature (11)..(188): Homolog of NCBI NO: 18416562 NR Description: C-repeat/DRE binding factor 1 (CBF1) (DREB1B); id: At4g25490.1, supported by cDNA: gi_1899057, supported by gi_3738225 [Arabidopsis thaliana] >gi|7488377|pir||JE0298
  misc_feature (11)..(188): Homolog of NCBI NO: 1899058 NR Description: transcriptional activator CBF1 [Arabidopsis >gi|4091982|gb|AAC99369.1| CRT/CRE binding factor 1 [Arabidopsis
MASAGLGSRRKDPVYRGIRCRSGKWVSEIREPRKTTRIWLGTYPMAEMAAAAYDVAAMALKGREAVLNFPGSVGSYPVPESTSAADIRAAAAAAAAMKGCEEGEEEKKAKEKKSSSSKSRARECHVDNDVGSSSWCGTEFMDEEEVLNMPNLLANMAEGMMVAPPSWMGSRPSDDSPENSNDEDLWGY

SEQ ID NO: 91613 - protein, 144 aa, Arabidopsis thaliana
  peptide (1)..(144): Ceres Seq. ID no. 12728483
  misc_feature (1)..(144): Homolog of NCBI NO: 15222031 NR Description: DRE binding protein; protein id: At1g12630.1
  misc_feature (1)..(144): Homolog of NCBI NO: 25404394 NR Description: hypothetical protein F16M19.1 [imported] - thaliana >gi|12323257|gb|AAG51609.1|AC010795_13 transcription
  misc_feature (1)..(134): Homolog of NCBI NO: 8493594 NR Description: Contains similarity to transcriptional activator from Arabidopsis thaliana gb|U77378 and contains an AP2 PF|00847
  misc_feature (1)..(144): Homolog of NCBI NO: 15242262 NR Description: DRE binding protein; protein id: At5g52020.1, by cDNA: 251466. [Arabidopsis thaliana] contains similarity to AP2 domain transcription
  misc_feature (1)..(144): Homolog of NCBI NO: 15227980 NR Description: DRE binding protein; protein id: At2g36450.1 thaliana] >gi|25408476|pir||H84780 probable AP2 domain
  misc_feature (1)..(138): Homolog of NCBI NO: 14140155 NR Description: putative AP2 domain transcription factor [Oryza
  misc_feature (1)..(60): Homolog of NCBI NO: 17352283 NR Description: CBF-like protein [Brassica napus]
  misc_feature (77)..(144): Homolog of NCBI NO: 17352283 NR Description: CBF-like protein [Brassica napus]
  misc_feature (1)..(144): Homolog of NCBI NO: 18416562 NR Description: C-repeat/DRE binding factor 1 (CBF1) (DREB1B); id: At4g25490.1, supported by cDNA: gi_1899057, supported by gi_3738225 [Arabidopsis thaliana] >gi|7488377|pir||JE0298
  misc_feature (1)..(144): Homolog of NCBI NO: 1899058 NR Description: transcriptional activator CBF1 [Arabidopsis >gi|4091982|gb|AAC99369.1| CRT/CRE binding factor 1 [Arabidopsis
MAEMAAAAYDVAAMALKGREAVLNFPGSVGSYPVPESTSAADIRAAAAAAAAMKGCEEGEEEKKAKEKKSSSSKSRARECHVDNDVGSSSWCGTEFMDEEEVLNMPNLLANMAEGMMVAPPSWMGSRPSDDSPENSNDEDLWGY

SEQ ID NO: 91614 - protein, 141 aa, Arabidopsis thaliana
  peptide (1)..(141): Ceres Seq. ID no. 12728484
  misc_feature (1)..(141): Homolog of NCBI NO: 15222031 NR Description: DRE binding protein; protein id: At1g12630.1
  misc_feature (1)..(141): Homolog of NCBI NO: 25404394 NR Description: hypothetical protein F16M19.1 [imported] - thaliana >gi|12323257|gb|AAG51609.1|AC010795_13 transcription
  misc_feature (1)..(131): Homolog of NCBI NO: 8493594 NR Description: Contains similarity to transcriptional activator from Arabidopsis thaliana gb|U77378 and contains an AP2 PF|00847
  misc_feature (1)..(141): Homolog of NCBI NO: 15242262 NR Description: DRE binding protein; protein id: At5g52020.1, by cDNA: 251466. [Arabidopsis thaliana] contains similarity to AP2 domain transcription
  misc_feature (1)..(141): Homolog of NCBI NO: 15227980 NR Description: DRE binding protein; protein id: At2g36450.1 thaliana] >gi|25408476|pir||H84780 probable AP2 domain
  misc_feature (1)..(135): Homolog of NCBI NO: 14140155 NR Description: putative AP2 domain transcription factor [Oryza
  misc_feature (1)..(57): Homolog of NCBI NO: 17352283 NR Description: CBF-like protein [Brassica napus]
  misc_feature (74)..(141): Homolog of NCBI NO: 17352283 NR Description: CBF-like protein [Brassica napus]
  misc_feature (1)..(141): Homolog of NCBI NO: 18416562 NR Description: C-repeat/DRE binding factor 1 (CBF1) (DREB1B); id: At4g25490.1, supported by cDNA: gi_1899057, supported by gi_3738225 [Arabidopsis thaliana] >gi|7488377|pir||JE0298
  misc_feature (1)..(141): Homolog of NCBI NO: 1899058 NR Description: transcriptional activator CBF1 [Arabidopsis >gi|4091982|gb|AAC99369.1| CRT/CRE binding factor 1 [Arabidopsis
MAAAAYDVAAMALKGREAVLNFPGSVGSYPVPESTSAADIRAAAAAAAAMKGCEEGEEEKKAKEKKSSSSKSRARECHVDNDVGSSSWCGTEFMDEEEVLNMPNLLANMAEGMMVAPPSWMGSRPSDDSPENSNDEDLWGY

SEQ ID NO: 91615 - DNA, 1437 bp, Arabidopsis thaliana
  misc_feature (1)..(1437): Ceres Seq. ID no. 12728504
  misc_feature: MA Experiment ID: 20000180 Result: Up-regulated in Transcription
  misc_feature: MA Experiment 20000180 PARAMETER Experiment Name: At_Germinating_Seeds_P Parameter: Age (hr) Value: 24 vs. 0
  misc_feature: MA Experiment 20000180 PARAMETER Experiment Name: At_Germinating_Seeds_P Parameter: Tissue Value: Germinating Seeds
  misc_feature: MA Experiment ID: 20000436 Result: Down-regulated in Transcription
  misc_feature: MA Experiment 20000436 PARAMETER Experiment Name: At_Drought_P Parameter: Age (day) Value: 7
  misc_feature: MA Experiment 20000436 PARAMETER Experiment Name: At_Drought_P Parameter: Organism Value: A. thaliana
  misc_feature: MA Experiment 20000436 PARAMETER Experiment Name: At_Drought_P Parameter: Plant Line Value: WS
  misc_feature: MA Experiment 20000436 PARAMETER Experiment Name: At_Drought_P Parameter: Timepoint (hr) Value: 12
  misc_feature: MA Experiment 20000436 PARAMETER Experiment Name: At_Drought_P Parameter: Tissue Value: Whole Plant
  misc_feature: MA Experiment 20000436 PARAMETER Experiment Name: At_Drought_P Parameter: Treatment Value: Drought vs. No Drought
  misc_feature: MA Experiment ID: 20000437 Result: Down-regulated in Transcription
  misc_feature: MA Experiment 20000437 PARAMETER Experiment Name: At_Drought_P Parameter: Age (day) Value: 8
  misc_feature: MA Experiment 20000437 PARAMETER Experiment Name: At_Drought_P Parameter: Organism Value: A. thaliana
  misc_feature: MA Experiment 20000437 PARAMETER Experiment Name: At_Drought_P Parameter: Plant Line Value: WS
  misc_feature: MA Experiment 20000437 PARAMETER Experiment Name: At_Drought_P Parameter: Timepoint (hr) Value: 24
  misc_feature: MA Experiment 20000437 PARAMETER Experiment Name: At_Drought_P Parameter: Tissue Value: Whole Plant
  misc_feature: MA Experiment 20000437 PARAMETER Experiment Name: At_Drought_P Parameter: Treatment Value: Drought vs. No Drought
  misc_feature: MA Experiment ID: 20000439 Result: Up-regulated in Transcription
  misc_feature: MA Experiment 20000439 PARAMETER Experiment Name: At_Roots__P Parameter: Age (day) Value: 14 vs. 21
  misc_feature: MA Experiment 20000439 PARAMETER Experiment Name: At_Roots__P Parameter: Organism Value: A. thaliana
  misc_feature: MA Experiment 20000439 PARAMETER Experiment Name: At_Roots__P Parameter: Tissue Value: Roots vs. Whole Plant
  misc_feature: MA Experiment ID: 20000527 Result: Up-regulated in Transcription
  misc_feature: MA Experiment 20000527 PARAMETER Experiment Name: At_10percent_PEG_P Parameter: Age (day) Value: 20
  misc_feature: MA Experiment 20000527 PARAMETER Experiment Name: At_10percent_PEG_P Parameter: Organism Value: A. thaliana
  misc_feature: MA Experiment 20000527 PARAMETER Experiment Name: At_10percent_PEG_P Parameter: Plant Line Value: WS
  misc_feature: MA Experiment 20000527 PARAMETER Experiment Name: At_10percent_PEG_P Parameter: Timepoint (day) Value: 20
  misc_feature: MA Experiment 20000527 PARAMETER Experiment Name: At_10percent_PEG_P Parameter: Tissue Value: Whole Plant
  misc_feature: MA Experiment 20000527 PARAMETER Experiment Name: At_10percent_PEG_P Parameter: Treatment Value: 10percent PEG vs. No Treatment
  misc_feature: MA Experiment ID: 20001450 Result: Down-regulated in Transcription
  misc_feature: MA Experiment 20001450 PARAMETER Experiment Name: At_Far-red-induction_P Parameter: Age (day) Value: 7
  misc_feature: MA Experiment 20001450 PARAMETER Experiment Name: At_Far-red-induction_P Parameter: Light Value: Far-red vs. White
  misc_feature: MA Experiment 20001450 PARAMETER Experiment Name: At_Far-red-induction_P Parameter: Organism Value: A. thaliana
  misc_feature: MA Experiment 20001450 PARAMETER Experiment Name: At_Far-red-induction_P Parameter: Plant Line Value: Columbia
  misc_feature: MA Experiment 20001450 PARAMETER Experiment Name: At_Far-red-induction_P Parameter: Timepoint (hr) Value: 8
  misc_feature: MA Experiment 20001450 PARAMETER Experiment Name: At_Far-red-induction_P Parameter: Tissue Value: Whole Plant
atgtgggcattgctcatttgggtttctttgcttctcataagtatcacacattgggtttatagttggagaaatcctaaatgcagagggaaacttccacctggttccatgggtttccctttactcggcgagagtatccaattcttcaagccaaacaaaacttcagacatccctccttttatcaaagagagagttaagaagtatggcccaattttcaagaccaatctggtggggagaccagttattgtatcaacagatgctgatttgagttattttgtgtttaaccaagagggacgttgtttccagagttggtatccagacacttttacacacatctttgggaagaagaatgtgggttcattacatggtttcatgtacaagtaccttaaaaacatggttttgactctctttggccatgatggtctcaagaagatgcttcctcaagtagaaatgactgccaataagaggttggagctttggtcaaatcaagattcagtagaactcaaagatgcaaccgcaagcatgatatttgatctcaccgcgaagaagttgatcagccatgatccagacaagtcatcagagaatctaagggcaaactttgttgctttcatacagggattgatctctttcccttttgatatcccaggcacagcttatcacaaatgtctacagggtagggcaaaggcaatgaaaatgttgaggaatatgcttcaagagaggcgtgagaaccctcggaagaatccaagtgatttctttgattatgttattgaagagattcagaaagaagggacaattctgacagaagagattgcactggatttgatgtttgtcttgctatttgccagctttgaaacaacttctttggctctaactttagctatcaagtttctctcagatgaccctgaagtcctaaagcgtttaacggaagaacatgagacaattctgagaaaccgggaagatgcagactctggacttacatgggaagaatacaagtcaatgacttacacatttcagttcataaacgaaaccgcgagactagcaaatatagttcctgcaatcttcagaaaggcgttgagagatataaaattcaaagagtttgtcaatgatacagattatacgattccagccggctgggcggtgatggtctgtccaccagctgtacatttgaatcccgaaatgtataaagatcctttagtctttaatccatcaagatgggagggatcaaaagttacaaacgcatcaaagcacttcatggcgtttggtggaggtatgaggttctgcgttggaaccgacttcacaaaattgcagatggctgcgtttcttcacagcttggtaacaaaatacaggtgggaggagataaaaggagggaatataactcgaacgcctggattacagtttccaaatggttaccatgtcaaactccataagaagagagactag

SEQ ID NO: 91616 - protein, 478 aa, Arabidopsis thaliana
  peptide (1)..(478): Ceres Seq. ID no. 12728505
  misc_feature (1)..(478): Homolog of NCBI NO: 9502380 NR Description: T12C24.27 [Arabidopsis thaliana]
  misc_feature (1)..(478): Homolog of NCBI NO: 30682922 NR Description: cytochrome P450, putative [Arabidopsis thaliana]
  misc_feature (3)..(476): Homolog of NCBI NO: 20520627 NR Description: putative cytochrome P450 [Oryza sativa (japonica
  misc_feature (3)..(476): Homolog of NCBI NO: 38567920 NR Description: OSJNBa0088I22.16 [Oryza sativa (japonica
  misc_feature (10)..(473): Homolog of NCBI NO: 38567916 NR Description: OSJNBa0088I22.12 [Oryza sativa (japonica
  misc_feature (8)..(476): Homolog of NCBI NO: 18483228 NR Description: putative cytochrome P450-like protein [Sorghum
  misc_feature (75)..(476): Homolog of NCBI NO: 27764671 NR Description: putative hydroxylase [Oryza sativa (japonica
  misc_feature (2)..(404): Homolog of NCBI NO: 38567917 NR Description: OSJNBa0088I22.13 [Oryza sativa (japonica
  misc_feature (1)..(465): Homolog of NCBI NO: 15222806 NR Description: cytochrome P450, putative; protein id:
  misc_feature (139)..(449): Homolog of NCBI NO: 28564842 NR Description: putative cytochrome P450 [Oryza sativa (japonica
MWALLIWVSLLLISITHWVYSWRNPKCRGKLPPGSMGFPLLGESIQFFKPNKTSDIPPFIKERVKKYGPIFKTNLVGRPVIVSTDADLSYFVFNQEGRCFQSWYPDTFTHIFGKKNVGSLHGFMYKYLKNMVLTLFGHDGLKKMLPQVEMTANKRLELWSNQDSVELKDATASMIFDLTAKKLISHDPDKSSENLRANFVAFIQGLISFPFDIPGTAYHKCLQGRAKAMKMLRNMLQERRENPRKNPSDFFDYVIEEIQKEGTILTEEIALDLMFVLLFASFETTSLALTLAIKFLSDDPEVLKRLTEEHETILRNREDADSGLTWEEYKSMTYTFQFINETARLANIVPAIFRKALRDIKFKEFVNDTDYTIPAGWAVMVCPPAVHLNPEMYKDPLVFNPSRWEGSKVTNASKHFMAFGGGMRFCVGTDFTKLQMAAFLHSLVTKYRWEEIKGGNITRTPGLQFPNGYHVKLHKKRD

SEQ ID NO: 91617 - protein, 443 aa, Arabidopsis thaliana
  peptide (1)..(443): Ceres Seq. ID no. 12728506
  misc_feature (1)..(443): Homolog of NCBI NO: 9502380 NR Description: T12C24.27 [Arabidopsis thaliana]
  misc_feature (1)..(443): Homolog of NCBI NO: 30682922 NR Description: cytochrome P450, putative [Arabidopsis thaliana]
  misc_feature (1)..(441): Homolog of NCBI NO: 20520627 NR Description: putative cytochrome P450 [Oryza sativa (japonica
  misc_feature (1)..(441): Homolog of NCBI NO: 38567920 NR Description: OSJNBa0088I22.16 [Oryza sativa (japonica
  misc_feature (1)..(438): Homolog of NCBI NO: 38567916 NR Description: OSJNBa0088I22.12 [Oryza sativa (japonica
  misc_feature (1)..(441): Homolog of NCBI NO: 18483228 NR Description: putative cytochrome P450-like protein [Sorghum
  misc_feature (40)..(441): Homolog of NCBI NO: 27764671 NR Description: putative hydroxylase [Oryza sativa (japonica
  misc_feature (1)..(369): Homolog of NCBI NO: 38567917 NR Description: OSJNBa0088I22.13 [Oryza sativa (japonica
  misc_feature (1)..(430): Homolog of NCBI NO: 15222806 NR Description: cytochrome P450, putative; protein id:
  misc_feature (104)..(414): Homolog of NCBI NO: 28564842 NR Description: putative cytochrome P450 [Oryza sativa (japonica
MGFPLLGESIQFFKPNKTSDIPPFIKERVKKYGPIFKTNLVGRPVIVSTDADLSYFVFNQEGRCFQSWYPDTFTHIFGKKNVGSLHGFMYKYLKNMVLTLFGHDGLKKMLPQVEMTANKRLELWSNQDSVELKDATASMIFDLTAKKLISHDPDKSSENLRANFVAFIQGLISFPFDIPGTAYHKCLQGRAKAMKMLRNMLQERRENPRKNPSDFFDYVIEEIQKEGTILTEEIALDLMFVLLFASFETTSLALTLAIKFLSDDPEVLKRLTEEHETILRNREDADSGLTWEEYKSMTYTFQFINETARLANIVPAIFRKALRDIKFKEFVNDTDYTIPAGWAVMVCPPAVHLNPEMYKDPLVFNPSRWEGSKVTNASKHFMAFGGGMRFCVGTDFTKLQMAAFLHSLVTKYRWEEIKGGNITRTPGLQFPNGYHVKLHKKRD

SEQ ID NO: 91618 - protein, 355 aa, Arabidopsis thaliana
  peptide (1)..(355): Ceres Seq. ID no. 12728507
  misc_feature (1)..(355): Homolog of NCBI NO: 9502380 NR Description: T12C24.27 [Arabidopsis thaliana]
  misc_feature (1)..(355): Homolog of NCBI NO: 30682922 NR Description: cytochrome P450, putative [Arabidopsis thaliana]
  misc_feature (1)..(353): Homolog of NCBI NO: 20520627 NR Description: putative cytochrome P450 [Oryza sativa (japonica
  misc_feature (1)..(353): Homolog of NCBI NO: 38567920 NR Description: OSJNBa0088I22.16 [Oryza sativa (japonica
  misc_feature (1)..(350): Homolog of NCBI NO: 38567916 NR Description: OSJNBa0088I22.12 [Oryza sativa (japonica
  misc_feature (1)..(353): Homolog of NCBI NO: 18483228 NR Description: putative cytochrome P450-like protein [Sorghum
  misc_feature (1)..(353): Homolog of NCBI NO: 27764671 NR Description: putative hydroxylase [Oryza sativa (japonica
  misc_feature (1)..(281): Homolog of NCBI NO: 38567917 NR Description: OSJNBa0088I22.13 [Oryza sativa (japonica
  misc_feature (1)..(342): Homolog of NCBI NO: 15222806 NR Description: cytochrome P450, putative; protein id:
  misc_feature (16)..(326): Homolog of NCBI NO: 28564842 NR Description: putative cytochrome P450 [Oryza sativa (japonica
MYKYLKNMVLTLFGHDGLKKMLPQVEMTANKRLELWSNQDSVELKDATASMIFDLTAKKLISHDPDKSSENLRANFVAFIQGLISFPFDIPGTAYHKCLQGRAKAMKMLRNMLQERRENPRKNPSDFFDYVIEEIQKEGTILTEEIALDLMFVLLFASFETTSLALTLAIKFLSDDPEVLKRLTEEHETILRNREDADSGLTWEEYKSMTYTFQFINETARLANIVPAIFRKALRDIKFKEFVNDTDYTIPAGWAVMVCPPAVHLNPEMYKDPLVFNPSRWEGSKVTNASKHFMAFGGGMRFCVGTDFTKLQMAAFLHSLVTKYRWEEIKGGNITRTPGLQFPNGYHVKLHKKRD

SEQ ID NO: 91619 - DNA, 1107 bp, Arabidopsis thaliana
  misc_feature (1)..(1107): Ceres Seq. ID no. 12728512
  misc_feature: MA Experiment ID: 20000355 Result: Down-regulated in Transcription
  misc_feature: MA Experiment 20000355 PARAMETER Experiment Name: At_Siliques_Sub_P Parameter: Age (day) Value: 21
  misc_feature: MA Experiment 20000355 PARAMETER Experiment Name: At_Siliques_Sub_P Parameter: Organism Value: A. thaliana
  misc_feature: MA Experiment 20000355 PARAMETER Experiment Name: At_Siliques_Sub_P Parameter: Plant Line Value: WS
  misc_feature: MA Experiment 20000355 PARAMETER Experiment Name: At_Siliques_Sub_P Parameter: Tissue Value: Less Than 5mm Siliques vs. Whole Plant
atgtcaacggagactaccacgggaaattcctcgttaattccagcatcatcatcatcgtcatcctccgacgcaatcgatccagctccgttgctttttaacggcgacgataatgaaggaaacaacggaggaggaggtggggaacggagatctgtcaggagacaagggttgagagaagctgcgaggtttcttagtcgtgctagtagcggacgcgtgatgcgtgagccatctatgcttgtgagagaagccgcggcggagcagctcgaggagaggcagagcgattgggcttattcgaagcctgtggtggtgcttgatatcgtttggaatctggcttttgtttctgttgctacggctattttggtgatgagcaggaaagaacatccgattatgccgcttagagtttggcttttggggtatgctttgcaatgcgtgttgcatatggtttgtgtctgtgttgagtatcggaggaggaacaggaggagaaccaataggacgacgacgacgactcctccacggtcacgttcttcttcttcctcttcatcttcttcttccttggaggaagaagctttgggttccaggaggaattcaggtgtgcaggacttgtcgcttggccacttggataccgaaagcagcaggctgtctattgtctttcttggtttcgatgtgttctttgttgtcttctgtgttgcgttggcctgcgttattggaattgcggtttgctgttgcctgccatgcatcattgcagttttgtacgctgttgctgatcaggaaggggcttcaaaagaagacattgagcagctcaccaaattcaagtttcgcaaactaggtgatgccaacaaacacactaatgatgaagcccaaggaactaccgagggaataatgactgagtgtggtacagattcacccattgaacatactcttttgcaagaagatgcagaatgttgcatctgtctctctgcatatgaagacggaacagagctaagggaactaccttgtggacaccatttccactgttcatgcgtagacaaatggctatacatcaacgcgacttgcccactctgcaaatacaacatcctcaagagtagcaacttggatcgagaggaagtctag

SEQ ID NO: 91620 - protein, 368 aa, Arabidopsis thaliana
  peptide (1)..(368): Ceres Seq. ID no. 12728513
  misc_feature (313)..(353): Pfam Name: Zinc finger, C3HC4 type (RING finger) Pfam Description: Zinc finger, C3HC4 type (RING finger)
  misc_feature (1)..(368): Homolog of NCBI NO: 15222059 NR Description: unknown protein; protein id: At1g12760.1
  misc_feature (1)..(213): Homolog of NCBI NO: 9502381 NR Description: T12C24.29 [Arabidopsis thaliana] unknown protein [Arabidopsis thaliana]
  misc_feature (205)..(368): Homolog of NCBI NO: 9502381 NR Description: T12C24.29 [Arabidopsis thaliana] unknown protein [Arabidopsis thaliana]
  misc_feature (194)..(368): Homolog of NCBI NO: 18407748 NR Description: expressed protein; protein id: At1g63170.1, by cDNA: 21249., supported by cDNA: gi_16604387 [Arabidopsis
  misc_feature (194)..(368): Homolog of NCBI NO: 21554228 NR Description: unknown [Arabidopsis thaliana]
  misc_feature (44)..(210): Homolog of NCBI NO: 18407748 NR Description: expressed protein; protein id: At1g63170.1, by cDNA: 21249., supported by cDNA: gi_16604387 [Arabidopsis
  misc_feature (44)..(210): Homolog of NCBI NO: 21554228 NR Description: unknown [Arabidopsis thaliana]
  misc_feature (194)..(361): Homolog of NCBI NO: 16604388 NR Description: At1g63170/F16M19_7 [Arabidopsis thaliana]
  misc_feature (44)..(210): Homolog of NCBI NO: 16604388 NR Description: At1g63170/F16M19_7 [Arabidopsis thaliana]
  misc_feature (49)..(362): Homolog of NCBI NO: 18413629 NR Description: putative protein; protein id: At4g11680.1, by cDNA: gi_16323217 [Arabidopsis thaliana]
MSTETTTGNSSLIPASSSSSSSDAIDPAPLLFNGDDNEGNNGGGGGERRSVRRQGLREAARFLSRASSGRVMREPSMLVREAAAEQLEERQSDWAYSKPVVVLDIVWNLAFVSVATAILVMSRKEHPIMPLRVWLLGYALQCVLHMVCVCVEYRRRNRRRTNRTTTTTPPRSRSSSSSSSSSSLEEEALGSRRNSGVQDLSLGHLDTESSRLSIVFLGFDVFFVVFCVALACVIGIAVCCCLPCIIAVLYAVADQEGASKEDIEQLTKFKFRKLGDANKHTNDEAQGTTEGIMTECGTDSPIEHTLLQEDAECCICLSAYEDGTELRELPCGHHFHCSCVDKWLYINATCPLCKYNILKSSNLDREEV

SEQ ID NO: 91621 - protein, 297 aa, Arabidopsis thaliana
  peptide (1)..(297): Ceres Seq. ID no. 12728514
  misc_feature (242)..(282): Pfam Name: Zinc finger, C3HC4 type (RING finger) Pfam Description: Zinc finger, C3HC4 type (RING finger)
  misc_feature (1)..(297): Homolog of NCBI NO: 15222059 NR Description: unknown protein; protein id: At1g12760.1
  misc_feature (1)..(142): Homolog of NCBI NO: 9502381 NR Description: T12C24.29 [Arabidopsis thaliana] unknown protein [Arabidopsis thaliana]
  misc_feature (134)..(297): Homolog of NCBI NO: 9502381 NR Description: T12C24.29 [Arabidopsis thaliana] unknown protein [Arabidopsis thaliana]
  misc_feature (123)..(297): Homolog of NCBI NO: 18407748 NR Description: expressed protein; protein id: At1g63170.1, by cDNA: 21249., supported by cDNA: gi_16604387 [Arabidopsis
  misc_feature (123)..(297): Homolog of NCBI NO: 21554228 NR Description: unknown [Arabidopsis thaliana]
  misc_feature (1)..(139): Homolog of NCBI NO: 18407748 NR Description: expressed protein; protein id: At1g63170.1, by cDNA: 21249., supported by cDNA: gi_16604387 [Arabidopsis
  misc_feature (1)..(139): Homolog of NCBI NO: 21554228 NR Description: unknown [Arabidopsis thaliana]
  misc_feature (123)..(290): Homolog of NCBI NO: 16604388 NR Description: At1g63170/F16M19_7 [Arabidopsis thaliana]
  misc_feature (1)..(139): Homolog of NCBI NO: 16604388 NR Description: At1g63170/F16M19_7 [Arabidopsis thaliana]
  misc_feature (1)..(291): Homolog of NCBI NO: 18413629 NR Description: putative protein; protein id: At4g11680.1, by cDNA: gi_16323217 [Arabidopsis thaliana]
MREPSMLVREAAAEQLEERQSDWAYSKPVVVLDIVWNLAFVSVATAILVMSRKEHPIMPLRVWLLGYALQCVLHMVCVCVEYRRRNRRRTNRTTTTTPPRSRSSSSSSSSSSLEEEALGSRRNSGVQDLSLGHLDTESSRLSIVFLGFDVFFVVFCVALACVIGIAVCCCLPCIIAVLYAVADQEGASKEDIEQLTKFKFRKLGDANKHTNDEAQGTTEGIMTECGTDSPIEHTLLQEDAECCICLSAYEDGTELRELPCGHHFHCSCVDKWLYINATCPLCKYNILKSSNLDREEV

SEQ ID NO: 91622 - protein, 292 aa, Arabidopsis thaliana
  peptide (1)..(292): Ceres Seq. ID no. 12728515
  misc_feature (237)..(277): Pfam Name: Zinc finger, C3HC4 type (RING finger) Pfam Description: Zinc finger, C3HC4 type (RING finger)
  misc_feature (1)..(292): Homolog of NCBI NO: 15222059 NR Description: unknown protein; protein id: At1g12760.1
  misc_feature (1)..(137): Homolog of NCBI NO: 9502381 NR Description: T12C24.29 [Arabidopsis thaliana] unknown protein [Arabidopsis thaliana]
  misc_feature (129)..(292): Homolog of NCBI NO: 9502381 NR Description: T12C24.29 [Arabidopsis thaliana] unknown protein [Arabidopsis thaliana]
  misc_feature (118)..(292): Homolog of NCBI NO: 18407748 NR Description: expressed protein; protein id: At1g63170.1, by cDNA: 21249., supported by cDNA: gi_16604387 [Arabidopsis
  misc_feature (118)..(292): Homolog of NCBI NO: 21554228 NR Description: unknown [Arabidopsis thaliana]
  misc_feature (1)..(134): Homolog of NCBI NO: 18407748 NR Description: expressed protein; protein id: At1g63170.1, by cDNA: 21249., supported by cDNA: gi_16604387 [Arabidopsis
  misc_feature (1)..(134): Homolog of NCBI NO: 21554228 NR Description: unknown [Arabidopsis thaliana]
  misc_feature (118)..(285): Homolog of NCBI NO: 16604388 NR Description: At1g63170/F16M19_7 [Arabidopsis thaliana]
  misc_feature (1)..(134): Homolog of NCBI NO: 16604388 NR Description: At1g63170/F16M19_7 [Arabidopsis thaliana]
  misc_feature (1)..(286): Homolog of NCBI NO: 18413629 NR Description: putative protein; protein id: At4g11680.1, by cDNA: gi_16323217 [Arabidopsis thaliana]
MLVREAAAEQLEERQSDWAYSKPVVVLDIVWNLAFVSVATAILVMSRKEHPIMPLRVWLLGYALQCVLHMVCVCVEYRRRNRRRTNRTTTTTPPRSRSSSSSSSSSSLEEEALGSRRNSGVQDLSLGHLDTESSRLSIVFLGFDVFFVVFCVALACVIGIAVCCCLPCIIAVLYAVADQEGASKEDIEQLTKFKFRKLGDANKHTNDEAQGTTEGIMTECGTDSPIEHTLLQEDAECCICLSAYEDGTELRELPCGHHFHCSCVDKWLYINATCPLCKYNILKSSNLDREEV

SEQ ID NO: 91623 - DNA, 1002 bp, Arabidopsis thaliana
  misc_feature (1)..(1002): Ceres Seq. ID no. 12728522
  misc_feature: MA Experiment ID: 20000173 Result: Down-regulated in Transcription
  misc_feature: MA Experiment 20000173 PARAMETER Experiment Name: At_42deg_Heat_P Parameter: Age (day) Value: 14
  misc_feature: MA Experiment 20000173 PARAMETER Experiment Name: At_42deg_Heat_P Parameter: Organism Value: A. thaliana
  misc_feature: MA Experiment 20000173 PARAMETER Experiment Name: At_42deg_Heat_P Parameter: Plant Line Value: WS
  misc_feature: MA Experiment 20000173 PARAMETER Experiment Name: At_42deg_Heat_P Parameter: Temperature (deg C) Value: 42 vs. 22
  misc_feature: MA Experiment 20000173 PARAMETER Experiment Name: At_42deg_Heat_P Parameter: Timepoint (hr) Value: 6
  misc_feature: MA Experiment 20000173 PARAMETER Experiment Name: At_42deg_Heat_P Parameter: Tissue Value: Aerial
  misc_feature: MA Experiment ID: 20000179 Result: Up-regulated in Transcription
  misc_feature: MA Experiment 20000179 PARAMETER Experiment Name: At_Germinating_Seeds_P Parameter: Age (hr) Value: 6 vs. 0
  misc_feature: MA Experiment 20000179 PARAMETER Experiment Name: At_Germinating_Seeds_P Parameter: Tissue Value: Germinating Seeds
  misc_feature: MA Experiment ID: 20000264 Result: Up-regulated in Transcription
  misc_feature: MA Experiment 20000264 PARAMETER Experiment Name: At_Open_Flower_P Parameter: Age (day) Value: 21
  misc_feature: MA Experiment 20000264 PARAMETER Experiment Name: At_Open_Flower_P Parameter: Plant Line Value: WS
  misc_feature: MA Experiment 20000264 PARAMETER Experiment Name: At_Open_Flower_P Parameter: Tissue Value: Open Flower vs. Whole Plant
  misc_feature: MA Experiment ID: 20000286 Result: Up-regulated in Transcription
  misc_feature: MA Experiment 20000286 PARAMETER Experiment Name: At_Open_Flower_P Parameter: Age (day) Value: 21
  misc_feature: MA Experiment 20000286 PARAMETER Experiment Name: At_Open_Flower_P Parameter: Plant Line Value: WS
  misc_feature: MA Experiment 20000286 PARAMETER Experiment Name: At_Open_Flower_P Parameter: Tissue Value: Half Open vs. Whole Plant
  misc_feature: MA Experiment ID: 20000437 Result: Up-regulated in Transcription
  misc_feature: MA Experiment 20000437 PARAMETER Experiment Name: At_Drought_P Parameter: Age (day) Value: 8
  misc_feature: MA Experiment 20000437 PARAMETER Experiment Name: At_Drought_P Parameter: Organism Value: A. thaliana
  misc_feature: MA Experiment 20000437 PARAMETER Experiment Name: At_Drought_P Parameter: Plant Line Value: WS
  misc_feature: MA Experiment 20000437 PARAMETER Experiment Name: At_Drought_P Parameter: Timepoint (hr) Value: 24
  misc_feature: MA Experiment 20000437 PARAMETER Experiment Name: At_Drought_P Parameter: Tissue Value: Whole Plant
  misc_feature: MA Experiment 20000437 PARAMETER Experiment Name: At_Drought_P Parameter: Treatment Value: Drought vs. No Drought
  misc_feature: MA Experiment ID: 20000438 Result: Down-regulated in Transcription
  misc_feature: MA Experiment 20000438 PARAMETER Experiment Name: At_Shoots__P Parameter: Age (day) Value: 14
  misc_feature: MA Experiment 20000438 PARAMETER Experiment Name: At_Shoots__P Parameter: Tissue Value: Shoots vs. Whole Plant
  misc_feature: MA Experiment ID: 20000495 Result: Up-regulated in Transcription
  misc_feature: MA Experiment 20000495 PARAMETER Experiment Name: At_Guard_Cells_P Parameter: Harvest Date Value: 8/2/2002
  misc_feature: MA Experiment 20000495 PARAMETER Experiment Name: At_Guard_Cells_P Parameter: Organism Value: A. thaliana
  misc_feature: MA Experiment 20000495 PARAMETER Experiment Name: At_Guard_Cells_P Parameter: Tissue Value: Guard Cells vs. Leaves
  misc_feature: MA Experiment ID: 20000794 Result: Up-regulated in Transcription
  misc_feature: MA Experiment 20000794 PARAMETER Experiment Name: At_Petals_P Parameter: Age (day) Value: 23-25 days
  misc_feature: MA Experiment 20000794 PARAMETER Experiment Name: At_Petals_P Parameter: Plant Line Value: WS
  misc_feature: MA Experiment 20000794 PARAMETER Experiment Name: At_Petals_P Parameter: Tissue Value: Petals vs. Whole plant
  misc_feature: MA Experiment ID: 20001757 Result: Down-regulated in Transcription
  misc_feature: MA Experiment 20001757 PARAMETER Experiment Name: At_50mM_NH4NO3_L-to-H_P Parameter: Timepoint (hr) Value: 6
  misc_feature: MA Experiment 20001757 PARAMETER Experiment Name: At_50mM_NH4NO3_L-to-H_P Parameter: Tissue Value: Leaf
  misc_feature: MA Experiment 20001757 PARAMETER Experiment Name: At_50mM_NH4NO3_L-to-H_P Parameter: Treatment Value: 50mM NH4NO3 vs 100mM Mannitol
tgaatgctcgttggtacaactcctcattcttctccgcaaaaatagcaagttatttaacaaacaaaaaaattcatataaacgattttatttttttgtgacttttgagattcgttaattctggaaaatttgtttattttcaaaacaagaatatggattcgtcataaaagctaggctatgatcaacatgtttcatacaaacaagaacagggcttttcaagaaagtagcattctctgtttctgttgtctcaatcccttttgattttttttgtgttggcagattcatcaaatgtcggttctttcttctcggacaggacgagatcgtcaacgttacgacaacaacttccgtctcgtttctggatgcattccttataggctgatgaaagctgacgaaactgaagaagactcaggtgttgactttgtaaacaaacttgaagttcttatggtttcatctcctaatcgtcatgatcttgtcttcccaaagggaggatgggaagatgatgagactgttcttgaagctgcttctcgtgaagccattgaagaagcaggagttaaaggaatacttagagaacttcctttaggagtttgggaatttagaagcaaaagtagcacagtggaggatgaatgtttaggtggatgtaaaggatatatgtttgcattaaaagttaccgaagaactcgaggattggccagagcgaaagaatcgtgaacgaagatggttgactgttaaagaagcgttggagctttgtcggtatgagtggatgcagagagcacttgaagagtttttgagagtaatggaagatgaaagaagattgagaacagaggaagagacagtgcatgattcttcaaagctagaggaggagagtcaaatagatccttggtactgttttgtagttaactagtttttcatattctttagctaacgtaaacaaattgaaaaaatgagaagtaaagtgactgcaacacatgtgacatgatataatctcaaatcatctgtcttgaatctt

SEQ ID NO: 91624 - protein, 203 aa, Arabidopsis thaliana
  peptide (1)..(203): Ceres Seq. ID no. 12728523
  misc_feature (19)..(168): Pfam Name: NUDIX domain Pfam Description: NUDIX domain
  misc_feature (1)..(203): Homolog of NCBI NO: 18391450 NR Description: expressed protein; protein id: At1g12880.1, by cDNA: gi_15810278, supported by cDNA: gi_20258974 [Arabidopsis >gi|15810279|gb|AAL07027.1| unknown protein [Arabidopsis
  misc_feature (1)..(196): Homolog of NCBI NO: 25518008 NR Description: F13K23.14 protein - Arabidopsis thaliana
  misc_feature (1)..(202): Homolog of NCBI NO: 15231598 NR Description: MutT-like protein; protein id: At3g26690.1
  misc_feature (1)..(181): Homolog of NCBI NO: 18399682 NR Description: expressed protein; protein id: At3g12600.1 thaliana] >gi|9294354|dbj|BAB02251.1| to unknown protein [Arabidopsis thaliana]
  misc_feature (1)..(162): Homolog of NCBI NO: 38175436 NR Description: MutT-like protein [Oryza sativa (japonica
  misc_feature (1)..(168): Homolog of NCBI NO: 15221055 NR Description: unknown protein; protein id: At1g18300.1 thaliana] >gi|6714298|gb|AAF25994.1|AC013354_13 F15H18.18 thaliana] >gi|8671772|gb|AAF78378.1|AC069551_11 T10O22.27
  misc_feature (1)..(162): Homolog of NCBI NO: 34900054 NR Description: MutT-like protein~contains ESTs
  misc_feature (1)..(182): Homolog of NCBI NO: 18379275 NR Description: expressed protein; protein id: At2g01670.1, by cDNA: 8247., supported by cDNA: gi_13272382, supported by gi_15293192, supported by cDNA: gi_15724325 [Arabidopsis
  misc_feature (1)..(182): Homolog of NCBI NO: 21595695 NR Description: unknown [Arabidopsis thaliana]
  misc_feature (1)..(163): Homolog of NCBI NO: 15223919 NR Description: hypothetical protein; protein id: At1g14860.1
MSVLSSRTGRDRQRYDNNFRLVSGCIPYRLMKADETEEDSGVDFVNKLEVLMVSSPNRHDLVFPKGGWEDDETVLEAASREAIEEAGVKGILRELPLGVWEFRSKSSTVEDECLGGCKGYMFALKVTEELEDWPERKNRERRWLTVKEALELCRYEWMQRALEEFLRVMEDERRLRTEEETVHDSSKLEEESQIDPWYCFVVN

SEQ ID NO: 91625 - protein, 173 aa, Arabidopsis thaliana
  peptide (1)..(173): Ceres Seq. ID no. 12728524
  misc_feature (1)..(138): Pfam Name: NUDIX domain Pfam Description: NUDIX domain
  misc_feature (1)..(173): Homolog of NCBI NO: 18391450 NR Description: expressed protein; protein id: At1g12880.1, by cDNA: gi_15810278, supported by cDNA: gi_20258974 [Arabidopsis >gi|15810279|gb|AAL07027.1| unknown protein [Arabidopsis
  misc_feature (1)..(166): Homolog of NCBI NO: 25518008 NR Description: F13K23.14 protein - Arabidopsis thaliana
  misc_feature (1)..(172): Homolog of NCBI NO: 15231598 NR Description: MutT-like protein; protein id: At3g26690.1
  misc_feature (1)..(151): Homolog of NCBI NO: 18399682 NR Description: expressed protein; protein id: At3g12600.1 thaliana] >gi|9294354|dbj|BAB02251.1| to unknown protein [Arabidopsis thaliana]
  misc_feature (1)..(132): Homolog of NCBI NO: 38175436 NR Description: MutT-like protein [Oryza sativa (japonica
  misc_feature (1)..(138): Homolog of NCBI NO: 15221055 NR Description: unknown protein; protein id: At1g18300.1 thaliana] >gi|6714298|gb|AAF25994.1|AC013354_13 F15H18.18 thaliana] >gi|8671772|gb|AAF78378.1|AC069551_11 T10O22.27
  misc_feature (1)..(132): Homolog of NCBI NO: 34900054 NR Description: MutT-like protein~contains ESTs
  misc_feature (1)..(152): Homolog of NCBI NO: 18379275 NR Description: expressed protein; protein id: At2g01670.1, by cDNA: 8247., supported by cDNA: gi_13272382, supported by gi_15293192, supported by cDNA: gi_15724325 [Arabidopsis
  misc_feature (1)..(152): Homolog of NCBI NO: 21595695 NR Description: unknown [Arabidopsis thaliana]
  misc_feature (1)..(133): Homolog of NCBI NO: 15223919 NR Description: hypothetical protein; protein id: At1g14860.1
MKADETEEDSGVDFVNKLEVLMVSSPNRHDLVFPKGGWEDDETVLEAASREAIEEAGVKGILRELPLGVWEFRSKSSTVEDECLGGCKGYMFALKVTEELEDWPERKNRERRWLTVKEALELCRYEWMQRALEEFLRVMEDERRLRTEEETVHDSSKLEEESQIDPWYCFVVN

SEQ ID NO: 91626 - protein, 152 aa, Arabidopsis thaliana
  peptide (1)..(152): Ceres Seq. ID no. 12728525
  misc_feature (1)..(117): Pfam Name: NUDIX domain Pfam Description: NUDIX domain
  misc_feature (1)..(152): Homolog of NCBI NO: 18391450 NR Description: expressed protein; protein id: At1g12880.1, by cDNA: gi_15810278, supported by cDNA: gi_20258974 [Arabidopsis >gi|15810279|gb|AAL07027.1| unknown protein [Arabidopsis
  misc_feature (1)..(145): Homolog of NCBI NO: 25518008 NR Description: F13K23.14 protein - Arabidopsis thaliana
  misc_feature (1)..(151): Homolog of NCBI NO: 15231598 NR Description: MutT-like protein; protein id: At3g26690.1
  misc_feature (1)..(130): Homolog of NCBI NO: 18399682 NR Description: expressed protein; protein id: At3g12600.1 thaliana] >gi|9294354|dbj|BAB02251.1| to unknown protein [Arabidopsis thaliana]
  misc_feature (1)..(111): Homolog of NCBI NO: 38175436 NR Description: MutT-like protein [Oryza sativa (japonica
  misc_feature (1)..(117): Homolog of NCBI NO: 15221055 NR Description: unknown protein; protein id: At1g18300.1 thaliana] >gi|6714298|gb|AAF25994.1|AC013354_13 F15H18.18 thaliana] >gi|8671772|gb|AAF78378.1|AC069551_11 T10O22.27
  misc_feature (1)..(111): Homolog of NCBI NO: 34900054 NR Description: MutT-like protein~contains ESTs
  misc_feature (1)..(131): Homolog of NCBI NO: 18379275 NR Description: expressed protein; protein id: At2g01670.1, by cDNA: 8247., supported by cDNA: gi_13272382, supported by gi_15293192, supported by cDNA: gi_15724325 [Arabidopsis
  misc_feature (1)..(131): Homolog of NCBI NO: 21595695 NR Description: unknown [Arabidopsis thaliana]
  misc_feature (1)..(112): Homolog of NCBI NO: 15223919 NR Description: hypothetical protein; protein id: At1g14860.1
MVSSPNRHDLVFPKGGWEDDETVLEAASREAIEEAGVKGILRELPLGVWEFRSKSSTVEDECLGGCKGYMFALKVTEELEDWPERKNRERRWLTVKEALELCRYEWMQRALEEFLRVMEDERRLRTEEETVHDSSKLEEESQIDPWYCFVVN

SEQ ID NO: 91627 - DNA, 1569 bp, Arabidopsis thaliana
  misc_feature (1)..(1569): Ceres Seq. ID no. 12728530
  misc_feature: MA Experiment ID: 20000180 Result: Up-regulated in Transcription
  misc_feature: MA Experiment 20000180 PARAMETER Experiment Name: At_Germinating_Seeds_P Parameter: Age (hr) Value: 24 vs. 0
  misc_feature: MA Experiment 20000180 PARAMETER Experiment Name: At_Germinating_Seeds_P Parameter: Tissue Value: Germinating Seeds
  misc_feature: MA Experiment ID: 20000185 Result: Up-regulated in Transcription
  misc_feature: MA Experiment 20000185 PARAMETER Experiment Name: At_Roots__P Parameter: Age (day) Value: 7 vs. 21
  misc_feature: MA Experiment 20000185 PARAMETER Experiment Name: At_Roots__P Parameter: Organism Value: A. thaliana
  misc_feature: MA Experiment 20000185 PARAMETER Experiment Name: At_Roots__P Parameter: Tissue Value: Roots vs. Whole Plant
  misc_feature: MA Experiment ID: 20000269 Result: Up-regulated in Transcription
  misc_feature: MA Experiment 20000269 PARAMETER Experiment Name: At_1mM_KNO3_L-vs-H_Roots_P Parameter: Age (day) Value: 7,10,12
  misc_feature: MA Experiment 20000269 PARAMETER Experiment Name: At_1mM_KNO3_L-vs-H_Roots_P Parameter: Organism Value: A. thaliana
  misc_feature: MA Experiment 20000269 PARAMETER Experiment Name: At_1mM_KNO3_L-vs-H_Roots_P Parameter: Plant Line Value: WS
  misc_feature: MA Experiment 20000269 PARAMETER Experiment Name: At_1mM_KNO3_L-vs-H_Roots_P Parameter: Timepoint (day) Value: 7,10,12
  misc_feature: MA Experiment 20000269 PARAMETER Experiment Name: At_1mM_KNO3_L-vs-H_Roots_P Parameter: Tissue Value: Roots
  misc_feature: MA Experiment 20000269 PARAMETER Experiment Name: At_1mM_KNO3_L-vs-H_Roots_P Parameter: Treatment Value: 1mM KNO3 vs. 50mM KNO3
  misc_feature: MA Experiment ID: 20000439 Result: Up-regulated in Transcription
  misc_feature: MA Experiment 20000439 PARAMETER Experiment Name: At_Roots__P Parameter: Age (day) Value: 14 vs. 21
  misc_feature: MA Experiment 20000439 PARAMETER Experiment Name: At_Roots__P Parameter: Organism Value: A. thaliana
  misc_feature: MA Experiment 20000439 PARAMETER Experiment Name: At_Roots__P Parameter: Tissue Value: Roots vs. Whole Plant
  misc_feature: MA Experiment ID: 20000527 Result: Down-regulated in Transcription
  misc_feature: MA Experiment 20000527 PARAMETER Experiment Name: At_10percent_PEG_P Parameter: Age (day) Value: 20
  misc_feature: MA Experiment 20000527 PARAMETER Experiment Name: At_10percent_PEG_P Parameter: Organism Value: A. thaliana
  misc_feature: MA Experiment 20000527 PARAMETER Experiment Name: At_10percent_PEG_P Parameter: Plant Line Value: WS
  misc_feature: MA Experiment 20000527 PARAMETER Experiment Name: At_10percent_PEG_P Parameter: Timepoint (day) Value: 20
  misc_feature: MA Experiment 20000527 PARAMETER Experiment Name: At_10percent_PEG_P Parameter: Tissue Value: Whole Plant
  misc_feature: MA Experiment 20000527 PARAMETER Experiment Name: At_10percent_PEG_P Parameter: Treatment Value: 10percent PEG vs. No Treatment
  misc_feature: MA Experiment ID: 20001557 Result: Up-regulated in Transcription
  misc_feature: MA Experiment 20001557 PARAMETER Experiment Name: At_Drought_Soil_Dry_P Parameter: Age (day) Value: 27
  misc_feature: MA Experiment 20001557 PARAMETER Experiment Name: At_Drought_Soil_Dry_P Parameter: Organism Value: A. thaliana
  misc_feature: MA Experiment 20001557 PARAMETER Experiment Name: At_Drought_Soil_Dry_P Parameter: Plant Line Value: WS
  misc_feature: MA Experiment 20001557 PARAMETER Experiment Name: At_Drought_Soil_Dry_P Parameter: Post Timepoint (hr) Value: 3
  misc_feature: MA Experiment 20001557 PARAMETER Experiment Name: At_Drought_Soil_Dry_P Parameter: Post-Treatment Value: Re-Water vs. No Drought
  misc_feature: MA Experiment 20001557 PARAMETER Experiment Name: At_Drought_Soil_Dry_P Parameter: Timepoint (day) Value: 13
  misc_feature: MA Experiment 20001557 PARAMETER Experiment Name: At_Drought_Soil_Dry_P Parameter: Treatment Value: Drought vs. No Drought
  misc_feature: MA Experiment ID: 20001910 Result: Down-regulated in Transcription
  misc_feature: MA Experiment 20001910 PARAMETER Experiment Name: At_Drought_Reproduction_P Parameter: Age (day) Value: 37
  misc_feature: MA Experiment 20001910 PARAMETER Experiment Name: At_Drought_Reproduction_P Parameter: Organism Value: A. thaliana
  misc_feature: MA Experiment 20001910 PARAMETER Experiment Name: At_Drought_Reproduction_P Parameter: Plant Line Value: WS
  misc_feature: MA Experiment 20001910 PARAMETER Experiment Name: At_Drought_Reproduction_P Parameter: Timepoint (day) Value: 7
  misc_feature: MA Experiment 20001910 PARAMETER Experiment Name: At_Drought_Reproduction_P Parameter: Tissue Value: Flowers
  misc_feature: MA Experiment 20001910 PARAMETER Experiment Name: At_Drought_Reproduction_P Parameter: Treatment Value: Drought vs. No Drought
atggagaaagataatgacttcaaggatccgtttctggcgtcaactgaggaggaggagctcgacccggcgacccaaaaagcattgatggagtatcttggagtcggaagcagagcatcttctcttgtctccttctcctctaccgccgtcgatatccctccaatctccggtgtcggagactttgtcagagagtttagaatcgagtctagaaagctatggaaactagctggccctgccatttttacaacgatgagccaatactctctcggagccgtcactcaagttttcgccggacatattagcactcttgctcttgccgccgtctccattgagaactccgtcatcgccggcttttcatttggtatcatgcttggaatgggaagtgcgttggaaacgctatgcggacaagcgtttggagcagggaaagtatcaatgcttggcgtttacttacaacgctcgtgggttattctaagcgtaaccgctctcttcctttctctaatctatatcttcgcggctccaatcctgacctttataggccaaaccgctgcaatctcggccatggcagggattttctccatttacatgatcccacaaatctttgcctacgctatcaacttcccaacggcgaagtttttgcaatcacaaagcaagatcatggtcatggctggaatatccggtgtggttcttgtgatccatagtttcttcacgtggctagtcatgtctaggttacactggggacttcctggtttagctttagtgcttaacacgtcgtggtgggtcatcgttgttgcacaacttgtgtatatctttaattgtacgtgtggagaggcttggtctggatttacgtgggaggcttttcacaatttgtgggggtttgttaaattgtctttggcttctgctgccatgctctgtttggagatttggtattttatggcactcgtattatttgctggatatttgaagaatgctgaagtctccgtagctgcactctccatatgcatgaacattttgggatgggcagctatggttgcgtttgggacaaacgcagcagtaagtgtgagagtgtcaaatgagctaggagctagccacccaagaacggccaagttttctctagttgtggctgtgatattgtcgacagcaattgggatgtttatagcagccggcctactcttcttccgcaatgagtacccggttttgtttgtggaagatgaagaagttagaaatgtggttagagaactcacgccaatgcttgccttttgcattgtcatcaacaatgttcaacctgtattgtctggagtggctgtgggagcgggatggcaagcagttgtagcgtatgtgaacatagcatgctactacttgttcggagtcccatttggtctattattgggatttaagcttgaatatggagtaatgggaatttggtgggggatggtgacgggaacttttgttcaatcgatagtcctgacttggatgatctgcaaaaccaattgggagaaagaggcttcaatggcagaggaaaggataaaagaatggggaggagtacctgcagagaaagagactcttttgaactag

SEQ ID NO: 91628 - protein, 522 aa, Arabidopsis thaliana
  peptide (1)..(522): Ceres Seq. ID no. 12728531
  misc_feature (1)..(522): Homolog of NCBI NO: 15222119 NR Description: unknown protein; protein id: At1g12950.1
  misc_feature (23)..(522): Homolog of NCBI NO: 15231577 NR Description: integral membrane protein, putative; protein id: supported by cDNA: gi_16323120 [Arabidopsis thaliana] unknown [Arabidopsis thaliana] >gi|9293938|dbj|BAB01841.1|
  misc_feature (26)..(522): Homolog of NCBI NO: 15240824 NR Description: putative transmembrane protein; protein id: supported by cDNA: gi_13937233 [Arabidopsis thaliana] emb|CAA66809.1~gene_id:F16F17.3~strong similarity to unknown
  misc_feature (23)..(430): Homolog of NCBI NO: 1495259 NR Description: orf04 [Arabidopsis thaliana]
  misc_feature (50)..(520): Homolog of NCBI NO: 15220701 NR Description: conserved hypothetical protein; protein id:
  misc_feature (50)..(499): Homolog of NCBI NO: 25402978 NR Description: protein F26F24.14 [imported] - Arabidopsis >gi|9295710|gb|AAF87016.1|AC005292_25 F26F24.14 [Arabidopsis
  misc_feature (60)..(516): Homolog of NCBI NO: 15220246 NR Description: unknown protein; protein id: At1g47530.1, by cDNA: gi_16604504 [Arabidopsis thaliana]
  misc_feature (60)..(516): Homolog of NCBI NO: 16604505 NR Description: At1g47530/F16N3_20 [Arabidopsis thaliana]
  misc_feature (31)..(518): Homolog of NCBI NO: 33867697 NR Description: putative anthocyanin permease [Lycopersicon
  misc_feature (50)..(521): Homolog of NCBI NO: 30686958 NR Description: MATE efflux protein family [Arabidopsis thaliana]
MEKDNDFKDPFLASTEEEELDPATQKALMEYLGVGSRASSLVSFSSTAVDIPPISGVGDFVREFRIESRKLWKLAGPAIFTTMSQYSLGAVTQVFAGHISTLALAAVSIENSVIAGFSFGIMLGMGSALETLCGQAFGAGKVSMLGVYLQRSWVILSVTALFLSLIYIFAAPILTFIGQTAAISAMAGIFSIYMIPQIFAYAINFPTAKFLQSQSKIMVMAGISGVVLVIHSFFTWLVMSRLHWGLPGLALVLNTSWWVIVVAQLVYIFNCTCGEAWSGFTWEAFHNLWGFVKLSLASAAMLCLEIWYFMALVLFAGYLKNAEVSVAALSICMNILGWAAMVAFGTNAAVSVRVSNELGASHPRTAKFSLVVAVILSTAIGMFIAAGLLFFRNEYPVLFVEDEEVRNVVRELTPMLAFCIVINNVQPVLSGVAVGAGWQAVVAYVNIACYYLFGVPFGLLLGFKLEYGVMGIWWGMVTGTFVQSIVLTWMICKTNWEKEASMAEERIKEWGGVPAEKETLLN

SEQ ID NO: 91629 - protein, 494 aa, Arabidopsis thaliana
  peptide (1)..(494): Ceres Seq. ID no. 12728532
  misc_feature (1)..(494): Homolog of NCBI NO: 15222119 NR Description: unknown protein; protein id: At1g12950.1
  misc_feature (1)..(494): Homolog of NCBI NO: 15231577 NR Description: integral membrane protein, putative; protein id: supported by cDNA: gi_16323120 [Arabidopsis thaliana] unknown [Arabidopsis thaliana] >gi|9293938|dbj|BAB01841.1|
  misc_feature (1)..(494): Homolog of NCBI NO: 15240824 NR Description: putative transmembrane protein; protein id: supported by cDNA: gi_13937233 [Arabidopsis thaliana] emb|CAA66809.1~gene_id:F16F17.3~strong similarity to unknown
  misc_feature (1)..(402): Homolog of NCBI NO: 1495259 NR Description: orf04 [Arabidopsis thaliana]
  misc_feature (22)..(492): Homolog of NCBI NO: 15220701 NR Description: conserved hypothetical protein; protein id:
  misc_feature (22)..(471): Homolog of NCBI NO: 25402978 NR Description: protein F26F24.14 [imported] - Arabidopsis >gi|9295710|gb|AAF87016.1|AC005292_25 F26F24.14 [Arabidopsis
  misc_feature (32)..(488): Homolog of NCBI NO: 15220246 NR Description: unknown protein; protein id: At1g47530.1, by cDNA: gi_16604504 [Arabidopsis thaliana]
  misc_feature (32)..(488): Homolog of NCBI NO: 16604505 NR Description: At1g47530/F16N3_20 [Arabidopsis thaliana]
  misc_feature (3)..(490): Homolog of NCBI NO: 33867697 NR Description: putative anthocyanin permease [Lycopersicon
  misc_feature (22)..(493): Homolog of NCBI NO: 30686958 NR Description: MATE efflux protein family [Arabidopsis thaliana]
MEYLGVGSRASSLVSFSSTAVDIPPISGVGDFVREFRIESRKLWKLAGPAIFTTMSQYSLGAVTQVFAGHISTLALAAVSIENSVIAGFSFGIMLGMGSALETLCGQAFGAGKVSMLGVYLQRSWVILSVTALFLSLIYIFAAPILTFIGQTAAISAMAGIFSIYMIPQIFAYAINFPTAKFLQSQSKIMVMAGISGVVLVIHSFFTWLVMSRLHWGLPGLALVLNTSWWVIVVAQLVYIFNCTCGEAWSGFTWEAFHNLWGFVKLSLASAAMLCLEIWYFMALVLFAGYLKNAEVSVAALSICMNILGWAAMVAFGTNAAVSVRVSNELGASHPRTAKFSLVVAVILSTAIGMFIAAGLLFFRNEYPVLFVEDEEVRNVVRELTPMLAFCIVINNVQPVLSGVAVGAGWQAVVAYVNIACYYLFGVPFGLLLGFKLEYGVMGIWWGMVTGTFVQSIVLTWMICKTNWEKEASMAEERIKEWGGVPAEKETLLN

SEQ ID NO: 91630 - protein, 440 aa, Arabidopsis thaliana
  peptide (1)..(440): Ceres Seq. ID no. 12728533
  misc_feature (1)..(440): Homolog of NCBI NO: 15222119 NR Description: unknown protein; protein id: At1g12950.1
  misc_feature (1)..(440): Homolog of NCBI NO: 15231577 NR Description: integral membrane protein, putative; protein id: supported by cDNA: gi_16323120 [Arabidopsis thaliana] unknown [Arabidopsis thaliana] >gi|9293938|dbj|BAB01841.1|
  misc_feature (1)..(440): Homolog of NCBI NO: 15240824 NR Description: putative transmembrane protein; protein id: supported by cDNA: gi_13937233 [Arabidopsis thaliana] emb|CAA66809.1~gene_id:F16F17.3~strong similarity to unknown
  misc_feature (1)..(348): Homolog of NCBI NO: 1495259 NR Description: orf04 [Arabidopsis thaliana]
  misc_feature (1)..(438): Homolog of NCBI NO: 15220701 NR Description: conserved hypothetical protein; protein id:
  misc_feature (1)..(417): Homolog of NCBI NO: 25402978 NR Description: protein F26F24.14 [imported] - Arabidopsis >gi|9295710|gb|AAF87016.1|AC005292_25 F26F24.14 [Arabidopsis
  misc_feature (1)..(434): Homolog of NCBI NO: 15220246 NR Description: unknown protein; protein id: At1g47530.1, by cDNA: gi_16604504 [Arabidopsis thaliana]
  misc_feature (1)..(434): Homolog of NCBI NO: 16604505 NR Description: At1g47530/F16N3_20 [Arabidopsis thaliana]
  misc_feature (1)..(436): Homolog of NCBI NO: 33867697 NR Description: putative anthocyanin permease [Lycopersicon
  misc_feature (1)..(439): Homolog of NCBI NO: 30686958 NR Description: MATE efflux protein family [Arabidopsis thaliana]
MSQYSLGAVTQVFAGHISTLALAAVSIENSVIAGFSFGIMLGMGSALETLCGQAFGAGKVSMLGVYLQRSWVILSVTALFLSLIYIFAAPILTFIGQTAAISAMAGIFSIYMIPQIFAYAINFPTAKFLQSQSKIMVMAGISGVVLVIHSFFTWLVMSRLHWGLPGLALVLNTSWWVIVVAQLVYIFNCTCGEAWSGFTWEAFHNLWGFVKLSLASAAMLCLEIWYFMALVLFAGYLKNAEVSVAALSICMNILGWAAMVAFGTNAAVSVRVSNELGASHPRTAKFSLVVAVILSTAIGMFIAAGLLFFRNEYPVLFVEDEEVRNVVRELTPMLAFCIVINNVQPVLSGVAVGAGWQAVVAYVNIACYYLFGVPFGLLLGFKLEYGVMGIWWGMVTGTFVQSIVLTWMICKTNWEKEASMAEERIKEWGGVPAEKETLLN

SEQ ID NO: 91631 - DNA, 1637 bp, Arabidopsis thaliana
  misc_feature (1)..(1637): Ceres Seq. ID no. 12728534
  misc_feature: MA Experiment ID: 20000227 Result: Down-regulated in Transcription
  misc_feature: MA Experiment 20000227 PARAMETER Experiment Name: At_Root-Tips-vs-Tops_P Parameter: Tissue Value: Root Tips vs. Root Tops
  misc_feature: MA Experiment ID: 20001451 Result: Up-regulated in Transcription
  misc_feature: MA Experiment 20001451 PARAMETER Experiment Name: At_Far-red-induction_P Parameter: Age (day) Value: 7
  misc_feature: MA Experiment 20001451 PARAMETER Experiment Name: At_Far-red-induction_P Parameter: Light Value: Far-red vs. White
  misc_feature: MA Experiment 20001451 PARAMETER Experiment Name: At_Far-red-induction_P Parameter: Organism Value: A. thaliana
  misc_feature: MA Experiment 20001451 PARAMETER Experiment Name: At_Far-red-induction_P Parameter: Plant Line Value: Columbia
  misc_feature: MA Experiment 20001451 PARAMETER Experiment Name: At_Far-red-induction_P Parameter: Timepoint (hr) Value: 24
  misc_feature: MA Experiment 20001451 PARAMETER Experiment Name: At_Far-red-induction_P Parameter: Tissue Value: Whole Plant
aatttcgtttctttccttcttcactcgttaaattttcgtttaatcagacatcgatctcaaaagctctcatcttcaatctcattgagaatggatcatgatctcgagatcttccctttactctcctacgtcctccaccattccgatcccgcttctcacgcgccaccgtctctagcgattcagcaatctcttgcgaatcgttatccccttctcaccaatccttatgtaatctcctcgttgattgaatcaattcccagtacaatcacgcagacccttttcgtatttggctctcttgggccacgacctgatcctttagctgtctcttctgctcggtctaagatccgagagatcaaagagaatgattctttatcgccggaagatgcggctaaggaagagcaggtttacgctgcggttgtgagtttagaggaagttcatgaaggatatgagaagcagttaagagatttggaggaggagattggtagggtttatgcttcggcggttgaatcattgagcggtggtgatgaagtgaatgaggaggttttagcggtgattaaagacgctgaagatggtggagtcgttgaaaggattgatctttctgatcatgagcttaagcttcttcctgatgctttagggaaaatcgtcggtttggtttcactgaatgtctctcgtaacaatctcaggtttctacctgatacaatctcaggacttgagaaactggaggagctagatttatcttcaaaccgtctcgtgtttcttcccgactctattggactgttacttaatttgaggatcttaaatgtgacggggaacaagctaactttactcccagaaagcattgcgcaatgcaggtcactggtagagttagatgccagcttcaacaacttgacttctttgcctgcaaacttcggatacggattactcaatctcgaaaggctatcgatccagctgaacaaaatccgtttcttccccaattccatatgtgagatgcgttctctaaggtatctcgacgcacacatgaacgaaatccacggccttccaatcgctatagggagactcacaaaccttgaagtcatgaacttgagcagcaacttcagcgacttgattgaacttcctgacacaatctctgatttagctaacttgagggagctagatctcagcaacaaccagatcagagtcttgcctgactcgtttttcaggctggagaagctggagaaactgaacttggaccagaaccctttggagtatcccccacaagagatggttaaccaaagcgctgaagcagttcgagagttcatgaggaagaggtgggaagagatggtggaggaagagcaattgaggagtgtgattgaagctgagaagcaacaaggaggagcaacaggttggctctcatgggggagctccattgttactagccttttctctggaggtactcatggtggtgcagctaagaagcctaaaaactcatttttggatgaacagctctgatttttttttttttggctttactatatctagctagctttgacgttttttagaaaaagaaaaaaatccggagtttggacgtttgacttgactgtatttcaatgggcctttaataacccttctgaggcccatcttggggttatgtttgggtaacatta

SEQ ID NO: 91632 - protein, 493 aa, Arabidopsis thaliana
  peptide (1)..(493): Ceres Seq. ID no. 12728535
  misc_feature (30)..(493): Homolog of NCBI NO: 18391461 NR Description: expressed protein; protein id: At1g12970.1, by cDNA: gi_17063164 [Arabidopsis thaliana] At1g12970/F13K23_18 [Arabidopsis thaliana]
  misc_feature (30)..(493): Homolog of NCBI NO: 30688342 NR Description: leucine rich repeat protein family [Arabidopsis
  misc_feature (30)..(416): Homolog of NCBI NO: 25518616 NR Description: hypothetical protein F13K23.23 - Arabidopsis >gi|8698744|gb|AAF78502.1|AC012187_22 Contains similarity to CYR1 Candida albicans gb|AB034965 and contains multiple Leucine Rich
  misc_feature (106)..(493): Homolog of NCBI NO: 25518616 NR Description: hypothetical protein F13K23.23 - Arabidopsis >gi|8698744|gb|AAF78502.1|AC012187_22 Contains similarity to CYR1 Candida albicans gb|AB034965 and contains multiple Leucine Rich
  misc_feature (97)..(492): Homolog of NCBI NO: 38605760 NR Description: OSJNBa0044K18.1 [Oryza sativa (japonica
  misc_feature (24)..(493): Homolog of NCBI NO: 15239256 NR Description: putative protein; protein id: At5g05850.1 thaliana] >gi|9759110|dbj|BAB09679.1|
  misc_feature (120)..(493): Homolog of NCBI NO: 22330985 NR Description: hypothetical protein; protein id: At3g11330.1, by cDNA: gi_18175637 [Arabidopsis thaliana] unknown protein [Arabidopsis thaliana]
  misc_feature (129)..(484): Homolog of NCBI NO: 7489337 NR Description: leucine-rich protein - common sunflower
  misc_feature (228)..(493): Homolog of NCBI NO: 12321872 NR Description: hypothetical protein; 91861-89496 [Arabidopsis
  misc_feature (49)..(453): Homolog of NCBI NO: 20148766 NR Description: PSR9 [Brassica nigra]
NFVSFLLHSLNFRLIRHRSQKLSSSISLRMDHDLEIFPLLSYVLHHSDPASHAPPSLAIQQSLANRYPLLTNPYVISSLIESIPSTITQTLFVFGSLGPRPDPLAVSSARSKIREIKENDSLSPEDAAKEEQVYAAVVSLEEVHEGYEKQLRDLEEEIGRVYASAVESLSGGDEVNEEVLAVIKDAEDGGVVERIDLSDHELKLLPDALGKIVGLVSLNVSRNNLRFLPDTISGLEKLEELDLSSNRLVFLPDSIGLLLNLRILNVTGNKLTLLPESIAQCRSLVELDASFNNLTSLPANFGYGLLNLERLSIQLNKIRFFPNSICEMRSLRYLDAHMNEIHGLPIAIGRLTNLEVMNLSSNFSDLIELPDTISDLANLRELDLSNNQIRVLPDSFFRLEKLEKLNLDQNPLEYPPQEMVNQSAEAVREFMRKRWEEMVEEEQLRSVIEAEKQQGGATGWLSWGSSIVTSLFSGGTHGGAAKKPKNSFLDEQL

SEQ ID NO: 91633 - protein, 464 aa, Arabidopsis thaliana
  peptide (1)..(464): Ceres Seq. ID no. 12728536
  misc_feature (1)..(464): Homolog of NCBI NO: 18391461 NR Description: expressed protein; protein id: At1g12970.1, by cDNA: gi_17063164 [Arabidopsis thaliana] At1g12970/F13K23_18 [Arabidopsis thaliana]
  misc_feature (1)..(464): Homolog of NCBI NO: 30688342 NR Description: leucine rich repeat protein family [Arabidopsis
  misc_feature (1)..(387): Homolog of NCBI NO: 25518616 NR Description: hypothetical protein F13K23.23 - Arabidopsis >gi|8698744|gb|AAF78502.1|AC012187_22 Contains similarity to CYR1 Candida albicans gb|AB034965 and contains multiple Leucine Rich
  misc_feature (77)..(464): Homolog of NCBI NO: 25518616 NR Description: hypothetical protein F13K23.23 - Arabidopsis >gi|8698744|gb|AAF78502.1|AC012187_22 Contains similarity to CYR1 Candida albicans gb|AB034965 and contains multiple Leucine Rich
  misc_feature (68)..(463): Homolog of NCBI NO: 38605760 NR Description: OSJNBa0044K18.1 [Oryza sativa (japonica
  misc_feature (1)..(464): Homolog of NCBI NO: 15239256 NR Description: putative protein; protein id: At5g05850.1 thaliana] >gi|9759110|dbj|BAB09679.1|
  misc_feature (91)..(464): Homolog of NCBI NO: 22330985 NR Description: hypothetical protein; protein id: At3g11330.1, by cDNA: gi_18175637 [Arabidopsis thaliana] unknown protein [Arabidopsis thaliana]
  misc_feature (100)..(455): Homolog of NCBI NO: 7489337 NR Description: leucine-rich protein - common sunflower
  misc_feature (199)..(464): Homolog of NCBI NO: 12321872 NR Description: hypothetical protein; 91861-89496 [Arabidopsis
  misc_feature (20)..(424): Homolog of NCBI NO: 20148766 NR Description: PSR9 [Brassica nigra]
MDHDLEIFPLLSYVLHHSDPASHAPPSLAIQQSLANRYPLLTNPYVISSLIESIPSTITQTLFVFGSLGPRPDPLAVSSARSKIREIKENDSLSPEDAAKEEQVYAAVVSLEEVHEGYEKQLRDLEEEIGRVYASAVESLSGGDEVNEEVLAVIKDAEDGGVVERIDLSDHELKLLPDALGKIVGLVSLNVSRNNLRFLPDTISGLEKLEELDLSSNRLVFLPDSIGLLLNLRILNVTGNKLTLLPESIAQCRSLVELDASFNNLTSLPANFGYGLLNLERLSIQLNKIRFFPNSICEMRSLRYLDAHMNEIHGLPIAIGRLTNLEVMNLSSNFSDLIELPDTISDLANLRELDLSNNQIRVLPDSFFRLEKLEKLNLDQNPLEYPPQEMVNQSAEAVREFMRKRWEEMVEEEQLRSVIEAEKQQGGATGWLSWGSSIVTSLFSGGTHGGAAKKPKNSFLDEQL

SEQ ID NO: 91634 - DNA, 1785 bp, Arabidopsis thaliana
  misc_feature (1)..(1785): Ceres Seq. ID no. 12728541
  misc_feature: MA Experiment ID: 20000171 Result: Down-regulated in Transcription
  misc_feature: MA Experiment 20000171 PARAMETER Experiment Name: At_42deg_Heat_P Parameter: Age (day) Value: 14
  misc_feature: MA Experiment 20000171 PARAMETER Experiment Name: At_42deg_Heat_P Parameter: Organism Value: A. thaliana
  misc_feature: MA Experiment 20000171 PARAMETER Experiment Name: At_42deg_Heat_P Parameter: Plant Line Value: WS
  misc_feature: MA Experiment 20000171 PARAMETER Experiment Name: At_42deg_Heat_P Parameter: Temperature (deg C) Value: 42 vs. 22
  misc_feature: MA Experiment 20000171 PARAMETER Experiment Name: At_42deg_Heat_P Parameter: Timepoint (hr) Value: 1
  misc_feature: MA Experiment 20000171 PARAMETER Experiment Name: At_42deg_Heat_P Parameter: Tissue Value: Aerial
  misc_feature: MA Experiment ID: 20000173 Result: Down-regulated in Transcription
  misc_feature: MA Experiment 20000173 PARAMETER Experiment Name: At_42deg_Heat_P Parameter: Age (day) Value: 14
  misc_feature: MA Experiment 20000173 PARAMETER Experiment Name: At_42deg_Heat_P Parameter: Organism Value: A. thaliana
  misc_feature: MA Experiment 20000173 PARAMETER Experiment Name: At_42deg_Heat_P Parameter: Plant Line Value: WS
  misc_feature: MA Experiment 20000173 PARAMETER Experiment Name: At_42deg_Heat_P Parameter: Temperature (deg C) Value: 42 vs. 22
  misc_feature: MA Experiment 20000173 PARAMETER Experiment Name: At_42deg_Heat_P Parameter: Timepoint (hr) Value: 6
  misc_feature: MA Experiment 20000173 PARAMETER Experiment Name: At_42deg_Heat_P Parameter: Tissue Value: Aerial
  misc_feature: MA Experiment ID: 20000182 Result: Up-regulated in Transcription
  misc_feature: MA Experiment 20000182 PARAMETER Experiment Name: At_2mM_SA_P Parameter: Age (day) Value: 14
  misc_feature: MA Experiment 20000182 PARAMETER Experiment Name: At_2mM_SA_P Parameter: Organism Value: A. thaliana
  misc_feature: MA Experiment 20000182 PARAMETER Experiment Name: At_2mM_SA_P Parameter: Plant Line Value: WS
  misc_feature: MA Experiment 20000182 PARAMETER Experiment Name: At_2mM_SA_P Parameter: Timepoint (hr) Value: 6
  misc_feature: MA Experiment 20000182 PARAMETER Experiment Name: At_2mM_SA_P Parameter: Tissue Value: Aerial
  misc_feature: MA Experiment 20000182 PARAMETER Experiment Name: At_2mM_SA_P Parameter: Treatment Value: 2mM SA vs. No Treatment
  misc_feature: MA Experiment ID: 20000184 Result: Down-regulated in Transcription
  misc_feature: MA Experiment 20000184 PARAMETER Experiment Name: At_Shoots__P Parameter: Age (day) Value: 7
  misc_feature: MA Experiment 20000184 PARAMETER Experiment Name: At_Shoots__P Parameter: Tissue Value: Shoots vs. Whole Plant
  misc_feature: MA Experiment ID: 20001905 Result: Down-regulated in Transcription
  misc_feature: MA Experiment 20001905 PARAMETER Experiment Name: At_Drought_Reproduction_P Parameter: Age (day) Value: 40
  misc_feature: MA Experiment 20001905 PARAMETER Experiment Name: At_Drought_Reproduction_P Parameter: Organism Value: A. thaliana
  misc_feature: MA Experiment 20001905 PARAMETER Experiment Name: At_Drought_Reproduction_P Parameter: Plant Line Value: WS
  misc_feature: MA Experiment 20001905 PARAMETER Experiment Name: At_Drought_Reproduction_P Parameter: Timepoint (day) Value: 10
  misc_feature: MA Experiment 20001905 PARAMETER Experiment Name: At_Drought_Reproduction_P Parameter: Tissue Value: Rosettes
  misc_feature: MA Experiment 20001905 PARAMETER Experiment Name: At_Drought_Reproduction_P Parameter: Treatment Value: Drought vs. No Drought
aaaaaaaaaatctcagtcaagttcgtccgaaagttttcaacgacgacggctttttagagatttgattcgtttcactcttctgggtattgattttcttccttaaatttgcatcctttttaacgtttatccaacgatcttgctccgttactgaaactctgtttctccgttgcttctctcgtctcatttattgttcgtaacgtgattttactacttctgttactcgagtagagattacccttcttatgtccgaatctgattcgtcgtctttaagctttgtcttctcccaattagctcaaagttcgtaactttgtttacttgccaataagaaatttccagagactgaagtttccattgaatgtattgttcttggagaacttaaccggattcaggacatggctaaccgaacagacaactcgaatcgctgttcgaatggtaaaaagccaaatgatggaatgagactcattatagcgacattcgtaggaatagttgtcggtttcttcttggggatatctttccctacactatcactaacaaaactaaattttccctctggcattcttccctctgttgatattacttacgtagaagatgagacaccagaaacatcgagtgaaacgcttttgcatacatggtcatctaggggtccgttacatggggctaattcaagtgatgcaccgcattggaagatttgggttccatcgaatccccgaggtgcagagatgctgactcctggtatcattgcacctgaatcagattactacttacgcagactttggggattacctgaggaggatgttcctgtgaagccaaagtatctcattgcgtttactgtcggttttggtcagaaagtgaacgttgatgcttgtgtcaagaagttttcaaaagattttacaattgttctattccactacgacggacgaaccacagaatgggaagaattagaatggtccaaacgcgcaatacacgtgagcgtgccaaagcaaaccaaatggtggtatgctaaaaggtttctgcatcctgacattgtggcaccttatgactatgtattcatctgggatgaagacctcggccttgaaaacttcgatgtagaagagtacatcaggcttataaagaaacacggtctagagatatcgcagcctgctgttgagtctaagaaaaagatcacatgggagataacaaagagaaaaaccaaaggagaagttcacaaagatgcgaaggagaaaccaggtcgatgcaatgaccctcacttgcctccctgtgcagcgtttatagagattatggctccagtattctcaagagatgcatggcgttgcgtgtggcatatgattcagaacgatttggttcacggttggggtcttgatttcgcactccgtaaatgcgttgagcctgcacatgagaagataggagttgtggattctcaatggatcatacatcaatctcttccttctttaggcagccagggagaggcacaagacggtaaagcagggtggcaaggggtgagagacagatgtaaacgggaatggacaatgttccaaagccgaatggctagttccgagaagcagtatctcaaggaaatcgcaaactcaacgattcattagctgaagaaactaaacaaatagaaagacaagtgaaggattatacaatgacatggtagagtccagaaatgtttacgagtgttcatacgatgattatgcaaatccaagttatattgttcatatgataactaagcaactatacacaggacacaattttttacagaaactattagagatcatttttgtcgtt

SEQ ID NO: 91635 - protein, 401 aa, Arabidopsis thaliana
  peptide (1)..(401): Ceres Seq. ID no. 12728542
  misc_feature (98)..(293): Pfam Name: Protein of unknown function (DUF707) Pfam Description: Protein of unknown function (DUF707)
  misc_feature (1)..(401): Homolog of NCBI NO: 22329525 NR Description: unknown protein; protein id: At1g13000.1, by cDNA: gi_18175818, supported by cDNA: gi_20465546 [Arabidopsis >gi|18175819|gb|AAL59933.1| unknown protein [Arabidopsis
  misc_feature (98)..(293): Homolog of NCBI NO: 25402748 NR Description: protein F3F19.3 [imported] - Arabidopsis thaliana
  misc_feature (292)..(401): Homolog of NCBI NO: 25402748 NR Description: protein F3F19.3 [imported] - Arabidopsis thaliana
  misc_feature (1)..(53): Homolog of NCBI NO: 25402748 NR Description: protein F3F19.3 [imported] - Arabidopsis thaliana
  misc_feature (1)..(399): Homolog of NCBI NO: 18404941 NR Description: expressed protein; protein id: At3g26440.1,
  misc_feature (1)..(399): Homolog of NCBI NO: 16612300 NR Description: AT3g26440/F20C19_16 [Arabidopsis thaliana]
  misc_feature (9)..(395): Homolog of NCBI NO: 18408876 NR Description: F12A21.2; protein id: At1g67850.1, supported by gi_14326581 [Arabidopsis thaliana] At1g67850/F12A21_2 [Arabidopsis thaliana]
  misc_feature (98)..(272): Homolog of NCBI NO: 9294303 NR Description: gb|AAD31054.1~gene_id:F20C19.17~strong similarity
  misc_feature (292)..(399): Homolog of NCBI NO: 9294303 NR Description: gb|AAD31054.1~gene_id:F20C19.17~strong similarity
  misc_feature (1)..(53): Homolog of NCBI NO: 9294303 NR Description: gb|AAD31054.1~gene_id:F20C19.17~strong similarity
MANRTDNSNRCSNGKKPNDGMRLIIATFVGIVVGFFLGISFPTLSLTKLNFPSGILPSVDITYVEDETPETSSETLLHTWSSRGPLHGANSSDAPHWKIWVPSNPRGAEMLTPGIIAPESDYYLRRLWGLPEEDVPVKPKYLIAFTVGFGQKVNVDACVKKFSKDFTIVLFHYDGRTTEWEELEWSKRAIHVSVPKQTKWWYAKRFLHPDIVAPYDYVFIWDEDLGLENFDVEEYIRLIKKHGLEISQPAVESKKKITWEITKRKTKGEVHKDAKEKPGRCNDPHLPPCAAFIEIMAPVFSRDAWRCVWHMIQNDLVHGWGLDFALRKCVEPAHEKIGVVDSQWIIHQSLPSLGSQGEAQDGKAGWQGVRDRCKREWTMFQSRMASSEKQYLKEIANSTIH

SEQ ID NO: 91636 - protein, 381 aa, Arabidopsis thaliana
  peptide (1)..(381): Ceres Seq. ID no. 12728543
  misc_feature (78)..(273): Pfam Name: Protein of unknown function (DUF707) Pfam Description: Protein of unknown function (DUF707)
  misc_feature (1)..(381): Homolog of NCBI NO: 22329525 NR Description: unknown protein; protein id: At1g13000.1, by cDNA: gi_18175818, supported by cDNA: gi_20465546 [Arabidopsis >gi|18175819|gb|AAL59933.1| unknown protein [Arabidopsis
  misc_feature (78)..(273): Homolog of NCBI NO: 25402748 NR Description: protein F3F19.3 [imported] - Arabidopsis thaliana
  misc_feature (272)..(381): Homolog of NCBI NO: 25402748 NR Description: protein F3F19.3 [imported] - Arabidopsis thaliana
  misc_feature (1)..(33): Homolog of NCBI NO: 25402748 NR Description: protein F3F19.3 [imported] - Arabidopsis thaliana
  misc_feature (1)..(379): Homolog of NCBI NO: 18404941 NR Description: expressed protein; protein id: At3g26440.1,
  misc_feature (1)..(379): Homolog of NCBI NO: 16612300 NR Description: AT3g26440/F20C19_16 [Arabidopsis thaliana]
  misc_feature (1)..(375): Homolog of NCBI NO: 18408876 NR Description: F12A21.2; protein id: At1g67850.1, supported by gi_14326581 [Arabidopsis thaliana] At1g67850/F12A21_2 [Arabidopsis thaliana]
  misc_feature (78)..(252): Homolog of NCBI NO: 9294303 NR Description: gb|AAD31054.1~gene_id:F20C19.17~strong similarity
  misc_feature (272)..(379): Homolog of NCBI NO: 9294303 NR Description: gb|AAD31054.1~gene_id:F20C19.17~strong similarity
  misc_feature (1)..(33): Homolog of NCBI NO: 9294303 NR Description: gb|AAD31054.1~gene_id:F20C19.17~strong similarity
MRLIIATFVGIVVGFFLGISFPTLSLTKLNFPSGILPSVDITYVEDETPETSSETLLHTWSSRGPLHGANSSDAPHWKIWVPSNPRGAEMLTPGIIAPESDYYLRRLWGLPEEDVPVKPKYLIAFTVGFGQKVNVDACVKKFSKDFTIVLFHYDGRTTEWEELEWSKRAIHVSVPKQTKWWYAKRFLHPDIVAPYDYVFIWDEDLGLENFDVEEYIRLIKKHGLEISQPAVESKKKITWEITKRKTKGEVHKDAKEKPGRCNDPHLPPCAAFIEIMAPVFSRDAWRCVWHMIQNDLVHGWGLDFALRKCVEPAHEKIGVVDSQWIIHQSLPSLGSQGEAQDGKAGWQGVRDRCKREWTMFQSRMASSEKQYLKEIANSTIH

SEQ ID NO: 91637 - protein, 292 aa, Arabidopsis thaliana
  peptide (1)..(292): Ceres Seq. ID no. 12728544
  misc_feature (1)..(184): Pfam Name: Protein of unknown function (DUF707) Pfam Description: Protein of unknown function (DUF707)
  misc_feature (1)..(292): Homolog of NCBI NO: 22329525 NR Description: unknown protein; protein id: At1g13000.1, by cDNA: gi_18175818, supported by cDNA: gi_20465546 [Arabidopsis >gi|18175819|gb|AAL59933.1| unknown protein [Arabidopsis
  misc_feature (1)..(184): Homolog of NCBI NO: 25402748 NR Description: protein F3F19.3 [imported] - Arabidopsis thaliana
  misc_feature (183)..(292): Homolog of NCBI NO: 25402748 NR Description: protein F3F19.3 [imported] - Arabidopsis thaliana
  misc_feature (1)..(290): Homolog of NCBI NO: 18404941 NR Description: expressed protein; protein id: At3g26440.1,
  misc_feature (1)..(290): Homolog of NCBI NO: 16612300 NR Description: AT3g26440/F20C19_16 [Arabidopsis thaliana]
  misc_feature (1)..(286): Homolog of NCBI NO: 18408876 NR Description: F12A21.2; protein id: At1g67850.1, supported by gi_14326581 [Arabidopsis thaliana] At1g67850/F12A21_2 [Arabidopsis thaliana]
  misc_feature (1)..(163): Homolog of NCBI NO: 9294303 NR Description: gb|AAD31054.1~gene_id:F20C19.17~strong similarity
  misc_feature (183)..(290): Homolog of NCBI NO: 9294303 NR Description: gb|AAD31054.1~gene_id:F20C19.17~strong similarity
  misc_feature (1)..(288): Homolog of NCBI NO: 22331371 NR Description: unknown protein; protein id: At3g27470.1, by cDNA: gi_19698930 [Arabidopsis thaliana] unknown protein [Arabidopsis thaliana]
  misc_feature (1)..(282): Homolog of NCBI NO: 34906848 NR Description: P0470A12.1 [Oryza sativa (japonica
MLTPGIIAPESDYYLRRLWGLPEEDVPVKPKYLIAFTVGFGQKVNVDACVKKFSKDFTIVLFHYDGRTTEWEELEWSKRAIHVSVPKQTKWWYAKRFLHPDIVAPYDYVFIWDEDLGLENFDVEEYIRLIKKHGLEISQPAVESKKKITWEITKRKTKGEVHKDAKEKPGRCNDPHLPPCAAFIEIMAPVFSRDAWRCVWHMIQNDLVHGWGLDFALRKCVEPAHEKIGVVDSQWIIHQSLPSLGSQGEAQDGKAGWQGVRDRCKREWTMFQSRMASSEKQYLKEIANSTIH

SEQ ID NO: 91638 - DNA, 2165 bp, Arabidopsis thaliana
  misc_feature (1)..(2165): Ceres Seq. ID no. 12728545
  misc_feature: MA Experiment ID: 20000180 Result: Down-regulated in Transcription
  misc_feature: MA Experiment 20000180 PARAMETER Experiment Name: At_Germinating_Seeds_P Parameter: Age (hr) Value: 24 vs. 0
  misc_feature: MA Experiment 20000180 PARAMETER Experiment Name: At_Germinating_Seeds_P Parameter: Tissue Value: Germinating Seeds
  misc_feature: MA Experiment ID: 20000286 Result: Up-regulated in Transcription
  misc_feature: MA Experiment 20000286 PARAMETER Experiment Name: At_Open_Flower_P Parameter: Age (day) Value: 21
  misc_feature: MA Experiment 20000286 PARAMETER Experiment Name: At_Open_Flower_P Parameter: Plant Line Value: WS
  misc_feature: MA Experiment 20000286 PARAMETER Experiment Name: At_Open_Flower_P Parameter: Tissue Value: Half Open vs. Whole Plant
  misc_feature: MA Experiment ID: 20001558 Result: Up-regulated in Transcription
  misc_feature: MA Experiment 20001558 PARAMETER Experiment Name: At_Drought_Soil_Dry_P Parameter: Age (day) Value: 27
  misc_feature: MA Experiment 20001558 PARAMETER Experiment Name: At_Drought_Soil_Dry_P Parameter: Organism Value: A. thaliana
  misc_feature: MA Experiment 20001558 PARAMETER Experiment Name: At_Drought_Soil_Dry_P Parameter: Plant Line Value: WS
  misc_feature: MA Experiment 20001558 PARAMETER Experiment Name: At_Drought_Soil_Dry_P Parameter: Post Timepoint (hr) Value: 6
  misc_feature: MA Experiment 20001558 PARAMETER Experiment Name: At_Drought_Soil_Dry_P Parameter: Post-Treatment Value: Re-Water vs. No Drought
  misc_feature: MA Experiment 20001558 PARAMETER Experiment Name: At_Drought_Soil_Dry_P Parameter: Timepoint (day) Value: 13
  misc_feature: MA Experiment 20001558 PARAMETER Experiment Name: At_Drought_Soil_Dry_P Parameter: Treatment Value: Drought vs. No Drought
  misc_feature: MA Experiment ID: 20001757 Result: Up-regulated in Transcription
  misc_feature: MA Experiment 20001757 PARAMETER Experiment Name: At_50mM_NH4NO3_L-to-H_P Parameter: Timepoint (hr) Value: 6
  misc_feature: MA Experiment 20001757 PARAMETER Experiment Name: At_50mM_NH4NO3_L-to-H_P Parameter: Tissue Value: Leaf
  misc_feature: MA Experiment 20001757 PARAMETER Experiment Name: At_50mM_NH4NO3_L-to-H_P Parameter: Treatment Value: 50mM NH4NO3 vs 100mM Mannitol
ggctttcagtttctccccttctccttcttctccgtctttggagctcaacaggggtttaaggattttctccgaaagctcaaaacttgagtgaaatttctctcattttacttatctgaagttcgtctacgatggaggaagagaaggtgagggttcgtctggtgtttgaagaccgacggattctgagtaagtatcaaaagaagcaaggtttaacacggagctgggttgttctaaatcgtaaatgtcaccgaactatatcagagttttctgatcatatctttcacacatttagcctctgtgaagcgtgtcctcatggcctctctctatctatggaaggtttcgttttgccacctttcgagtccagctgtgtattgaaggataaagatatcgtttgtgttaagaagaagaaagagtctttgttggagattgttggggaagacagtgatgagaatgtttacaacgctattgaggttgaggaaaggcctcagattcgtcctggtgaaatgctgcttgctaatgaggaattccagaaggaaactggaggatatgaaagtgagtctgaggaagatgagcttgaagaggaagcagaagagtttgtgccagagaagaaggcttcgaagaaacgtaaaacttcaagcaaaaaccagagcaccaagaggaagaagtgtaagttagatactactgaagaatctcccgacgaaagagaaaacacagctgttgttagcaatgttgtgaagaagaagaagaagaagaaatcattggatgtacaaagtgctaacaatgatgaacagaataacgatagtaccaaacccatgaccaaatcaaagaggtcatcacaacaagaagagagcaaagagcataacgatctgtgccaactatctgctgaaactaaaaagacacctagcagaagtgcccgacgtaaaaaggcgaaacggcaatggctgagagagaaaacaaaactagagaaggaagagcttctacagacgcagttggttgtagcacccagccaaaaaccagtcatcactatagatcaccaagcaaccaaggaaaagcactgtgaaactcttgaaaatcaacaggcagaagaagttagtgatggtttcggggatgaagttgtacctgtggaagtgaggccaggccacatacgcttcaagcctctcgctggaacagatgaagcctctcttgatagtgaacctcttgtggaaaatgtcttgtggaatggaaacatgacgaagaagaagggacagaaatggggcacagagaagtcagggttttccaaacgatatgctcaggattttaatgaagatgctacgacacagcccgctgaagcagagacacttgctaattgtccgattgattatgaacagcttgtggcttacactggctcagtaaagaaaggagatgttattgcataccgcctcattgagttaacatcatcttggacacccgaggtttcctcttttcgggttgggaagataagctactatgatccagactccaagatggtgactttgatgcctgttcaagaatttccaatcgagaaaaagacagaagaggacgacgatttctgtatgcaacctgatacatctctttataaagaagatggatccctggagatagaattttctgctctgctcgatgttcgcagtgtcaaaactagcagctcagattctgcagaagtcgccaagtcagcactgcccgagcctgaccagtcagctaaaaagccaaagctaagcgcaaacaaagaattgcaaacccctgcaaaagaaaatggagaagtgagcccttgggaagaactaagtgaagctttaagtgcaaagaaagcagcgttgtctcaggccaacaatgggtggaacaagaaagggagttcaagtggaggctcatggtcttacaaggcactgcgaggcagtgctatgggtcctgtaatgaactatctcagatctcagaaagagatttgagaaactaggtcacatctctctagaagaaactctgctgcttttgtcttcattttggatatgaaaaactcagacaaagggtagagaaagccattttgtttttgatgctgtaaacgcacagtttagctttctaaggttaaaggtttatgtatagagaaaaacgatgaatgtgtaatactctctcaagatctttttgaatttcacgtttgaatc

SEQ ID NO: 91639 - protein, 608 aa, Arabidopsis thaliana [sequence omitted]

SEQ ID NO: 91640 - protein, 542 aa, Arabidopsis thaliana
  peptide (1)..(542): Ceres Seq. ID no. 12728547
  misc_feature (37)..(483): Pfam Name: Protein of unknown function, DUF612 Pfam Description: Protein of unknown function, DUF612
  misc_feature (1)..(542): Homolog of NCBI NO: 25402750 NR Description: protein F3F19.5 [imported] - Arabidopsis thaliana
  misc_feature (24)..(314): Homolog of NCBI NO: 17367114 NR Description: Transcriptional regulator ATRX homolog (X-linked
  misc_feature (24)..(314): Homolog of NCBI NO: 17509687 NR Description: Human XNP gene related XNP-1 (156.2 kD) (xnp-1)
  misc_feature (27)..(254): Homolog of NCBI NO: 30721677 NR Description: phoshoprotein 300 [Plasmodium falciparum]
  misc_feature (63)..(262): Homolog of NCBI NO: 28850293 NR Description: similar to Required for the transfer of to cell wall mannans.; Mnn4p [Saccharomyces cerevisiae]
  misc_feature (26)..(259): Homolog of NCBI NO: 17556242 NR Description: Chromo domain of heterochromatin protein like kD) [Caenorhabditis elegans]
  misc_feature (24)..(215): Homolog of NCBI NO: 17556242 NR Description: Chromo domain of heterochromatin protein like kD) [Caenorhabditis elegans]
  misc_feature (24)..(250): Homolog of NCBI NO: 34899982 NR Description: P0039H02.8 [Oryza sativa (japonica
  misc_feature (16)..(268): Homolog of NCBI NO: 8096269 NR Description: KED [Nicotiana tabacum]
  misc_feature (24)..(256): Homolog of NCBI NO: 8096269 NR Description: KED [Nicotiana tabacum]
MEGFVLPPFESSCVLKDKDIVCVKKKKESLLEIVGEDSDENVYNAIEVEERPQIRPGEMLLANEEFQKETGGYESESEEDELEEEAEEFVPEKKASKKRKTSSKNQSTKRKKCKLDTTEESPDERENTAVVSNVVKKKKKKKSLDVQSANNDEQNNDSTKPMTKSKRSSQQEESKEHNDLCQLSAETKKTPSRSARRKKAKRQWLREKTKLEKEELLQTQLVVAPSQKPVITIDHQATKEKHCETLENQQAEEVSDGFGDEVVPVEVRPGHIRFKPLAGTDEASLDSEPLVENVLWNGNMTKKKGQKWGTEKSGFSKRYAQDFNEDATTQPAEAETLANCPIDYEQLVAYTGSVKKGDVIAYRLIELTSSWTPEVSSFRVGKISYYDPDSKMVTLMPVQEFPIEKKTEEDDDFCMQPDTSLYKEDGSLEIEFSALLDVRSVKTSSSDSAEVAKSALPEPDQSAKKPKLSANKELQTPAKENGEVSPWEELSEALSAKKAALSQANNGWNKKGSSSGGSWSYKALRGSAMGPVMNYLRSQKEI

SEQ ID NO: 91641 - protein, 484 aa, Arabidopsis thaliana
  peptide (1)..(484): Ceres Seq. ID no. 12728548
  misc_feature (1)..(425): Pfam Name: Protein of unknown function, DUF612 Pfam Description: Protein of unknown function, DUF612
  misc_feature (1)..(484): Homolog of NCBI NO: 25402750 NR Description: protein F3F19.5 [imported] - Arabidopsis thaliana
  misc_feature (1)..(256): Homolog of NCBI NO: 17367114 NR Description: Transcriptional regulator ATRX homolog (X-linked
  misc_feature (1)..(256): Homolog of NCBI NO: 17509687 NR Description: Human XNP gene related XNP-1 (156.2 kD) (xnp-1)
  misc_feature (1)..(196): Homolog of NCBI NO: 30721677 NR Description: phoshoprotein 300 [Plasmodium falciparum]
  misc_feature (5)..(204): Homolog of NCBI NO: 28850293 NR Description: similar to Required for the transfer of to cell wall mannans.; Mnn4p [Saccharomyces cerevisiae]
  misc_feature (1)..(201): Homolog of NCBI NO: 17556242 NR Description: Chromo domain of heterochromatin protein like kD) [Caenorhabditis elegans]
  misc_feature (1)..(157): Homolog of NCBI NO: 17556242 NR Description: Chromo domain of heterochromatin protein like kD) [Caenorhabditis elegans]
  misc_feature (1)..(192): Homolog of NCBI NO: 34899982 NR Description: P0039H02.8 [Oryza sativa (japonica
  misc_feature (1)..(210): Homolog of NCBI NO: 8096269 NR Description: KED [Nicotiana tabacum]
  misc_feature (1)..(198): Homolog of NCBI NO: 8096269 NR Description: KED [Nicotiana tabacum]
MLLANEEFQKETGGYESESEEDELEEEAEEFVPEKKASKKRKTSSKNQSTKRKKCKLDTTEESPDERENTAVVSNVVKKKKKKKSLDVQSANNDEQNNDSTKPMTKSKRSSQQEESKEHNDLCQLSAETKKTPSRSARRKKAKRQWLREKTKLEKEELLQTQLVVAPSQKPVITIDHQATKEKHCETLENQQAEEVSDGFGDEVVPVEVRPGHIRFKPLAGTDEASLDSEPLVENVLWNGNMTKKKGQKWGTEKSGFSKRYAQDFNEDATTQPAEAETLANCPIDYEQLVAYTGSVKKGDVIAYRLIELTSSWTPEVSSFRVGKISYYDPDSKMVTLMPVQEFPIEKKTEEDDDFCMQPDTSLYKEDGSLEIEFSALLDVRSVKTSSSDSAEVAKSALPEPDQSAKKPKLSANKELQTPAKENGEVSPWEELSEALSAKKAALSQANNGWNKKGSSSGGSWSYKALRGSAMGPVMNYLRSQKEI

SEQ ID NO: 91642 - DNA, 1620 bp, Arabidopsis thaliana
  misc_feature (1)..(1620): Ceres Seq. ID no. 12728556
  misc_feature: MA Experiment ID: 20000173 Result: Up-regulated in Transcription
  misc_feature: MA Experiment 20000173 PARAMETER Experiment Name: At_42deg_Heat_P Parameter: Age (day) Value: 14
  misc_feature: MA Experiment 20000173 PARAMETER Experiment Name: At_42deg_Heat_P Parameter: Organism Value: A. thaliana
  misc_feature: MA Experiment 20000173 PARAMETER Experiment Name: At_42deg_Heat_P Parameter: Plant Line Value: WS
  misc_feature: MA Experiment 20000173 PARAMETER Experiment Name: At_42deg_Heat_P Parameter: Temperature (deg C) Value: 42 vs. 22
  misc_feature: MA Experiment 20000173 PARAMETER Experiment Name: At_42deg_Heat_P Parameter: Timepoint (hr) Value: 6
  misc_feature: MA Experiment 20000173 PARAMETER Experiment Name: At_42deg_Heat_P Parameter: Tissue Value: Aerial
  misc_feature: MA Experiment ID: 20000182 Result: Up-regulated in Transcription
  misc_feature: MA Experiment 20000182 PARAMETER Experiment Name: At_2mM_SA_P Parameter: Age (day) Value: 14
  misc_feature: MA Experiment 20000182 PARAMETER Experiment Name: At_2mM_SA_P Parameter: Organism Value: A. thaliana
  misc_feature: MA Experiment 20000182 PARAMETER Experiment Name: At_2mM_SA_P Parameter: Plant Line Value: WS
  misc_feature: MA Experiment 20000182 PARAMETER Experiment Name: At_2mM_SA_P Parameter: Timepoint (hr) Value: 6
  misc_feature: MA Experiment 20000182 PARAMETER Experiment Name: At_2mM_SA_P Parameter: Tissue Value: Aerial
  misc_feature: MA Experiment 20000182 PARAMETER Experiment Name: At_2mM_SA_P Parameter: Treatment Value: 2mM SA vs. No Treatment
  misc_feature: MA Experiment ID: 20000184 Result: Up-regulated in Transcription
  misc_feature: MA Experiment 20000184 PARAMETER Experiment Name: At_Shoots__P Parameter: Age (day) Value: 7
  misc_feature: MA Experiment 20000184 PARAMETER Experiment Name: At_Shoots__P Parameter: Tissue Value: Shoots vs. Whole Plant
  misc_feature: MA Experiment ID: 20000185 Result: Up-regulated in Transcription
  misc_feature: MA Experiment 20000185 PARAMETER Experiment Name: At_Roots__P Parameter: Age (day) Value: 7 vs. 21
  misc_feature: MA Experiment 20000185 PARAMETER Experiment Name: At_Roots__P Parameter: Organism Value: A. thaliana
  misc_feature: MA Experiment 20000185 PARAMETER Experiment Name: At_Roots__P Parameter: Tissue Value: Roots vs. Whole Plant
  misc_feature: MA Experiment ID: 20000227 Result: Down-regulated in Transcription
  misc_feature: MA Experiment 20000227 PARAMETER Experiment Name: At_Root-Tips-vs-Tops_P Parameter: Tissue Value: Root Tips vs. Root Tops
  misc_feature: MA Experiment ID: 20000269 Result: Down-regulated in Transcription
  misc_feature: MA Experiment 20000269 PARAMETER Experiment Name: At_1mM_KNO3_L-vs-H_Roots_P Parameter: Age (day) Value: 7,10,12
  misc_feature: MA Experiment 20000269 PARAMETER Experiment Name: At_1mM_KNO3_L-vs-H_Roots_P Parameter: Organism Value: A. thaliana
  misc_feature: MA Experiment 20000269 PARAMETER Experiment Name: At_1mM_KNO3_L-vs-H_Roots_P Parameter: Plant Line Value: WS
  misc_feature: MA Experiment 20000269 PARAMETER Experiment Name: At_1mM_KNO3_L-vs-H_Roots_P Parameter: Timepoint (day) Value: 7,10,12
  misc_feature: MA Experiment 20000269 PARAMETER Experiment Name: At_1mM_KNO3_L-vs-H_Roots_P Parameter: Tissue Value: Roots
  misc_feature: MA Experiment 20000269 PARAMETER Experiment Name: At_1mM_KNO3_L-vs-H_Roots_P Parameter: Treatment Value: 1mM KNO3 vs. 50mM KNO3
  misc_feature: MA Experiment ID: 20000437 Result: Down-regulated in Transcription
  misc_feature: MA Experiment 20000437 PARAMETER Experiment Name: At_Drought_P Parameter: Age (day) Value: 8
  misc_feature: MA Experiment 20000437 PARAMETER Experiment Name: At_Drought_P Parameter: Organism Value: A. thaliana
  misc_feature: MA Experiment 20000437 PARAMETER Experiment Name: At_Drought_P Parameter: Plant Line Value: WS
  misc_feature: MA Experiment 20000437 PARAMETER Experiment Name: At_Drought_P Parameter: Timepoint (hr) Value: 24
  misc_feature: MA Experiment 20000437 PARAMETER Experiment Name: At_Drought_P Parameter: Tissue Value: Whole Plant
  misc_feature: MA Experiment 20000437 PARAMETER Experiment Name: At_Drought_P Parameter: Treatment Value: Drought vs. No Drought
  misc_feature: MA Experiment ID: 20000438 Result: Up-regulated in Transcription
  misc_feature: MA Experiment 20000438 PARAMETER Experiment Name: At_Shoots__P Parameter: Age (day) Value: 14
  misc_feature: MA Experiment 20000438 PARAMETER Experiment Name: At_Shoots__P Parameter: Tissue Value: Shoots vs. Whole Plant
  misc_feature: MA Experiment ID: 20000439 Result: Up-regulated in Transcription
  misc_feature: MA Experiment 20000439 PARAMETER Experiment Name: At_Roots__P Parameter: Age (day) Value: 14 vs. 21
  misc_feature: MA Experiment 20000439 PARAMETER Experiment Name: At_Roots__P Parameter: Organism Value: A. thaliana
  misc_feature: MA Experiment 20000439 PARAMETER Experiment Name: At_Roots__P Parameter: Tissue Value: Roots vs. Whole Plant
  misc_feature: MA Experiment ID: 20000441 Result: Up-regulated in Transcription
  misc_feature: MA Experiment 20000441 PARAMETER Experiment Name: At_1uM_BR-BRZ__P Parameter: Tissue Value: Shoot Apices
  misc_feature: MA Experiment 20000441 PARAMETER Experiment Name: At_1uM_BR-BRZ__P Parameter: Treatment Value: 1uM BR vs. No Treatment
  misc_feature: MA Experiment ID: 20000443 Result: Up-regulated in Transcription
  misc_feature: MA Experiment 20000443 PARAMETER Experiment Name: At_1uM_BR-BRZ__P Parameter: Tissue Value: Shoot Apices
  misc_feature: MA Experiment 20000443 PARAMETER Experiment Name: At_1uM_BR-BRZ__P Parameter: Treatment Value: 1uM BRZ vs. No Treatment
  misc_feature: MA Experiment ID: 20000573 Result: Down-regulated in Transcription
  misc_feature: MA Experiment 20000573 PARAMETER Experiment Name: At_100uM_ABA_Mutants__P Parameter: Organism Value: A. thaliana
  misc_feature: MA Experiment 20000573 PARAMETER Experiment Name: At_100uM_ABA_Mutants__P Parameter: Plant Line Value: CS22 vs. Ler wt
  misc_feature: MA Experiment 20000573 PARAMETER Experiment Name: At_100uM_ABA_Mutants__P Parameter: Timepoint (hr) Value: N/A
  misc_feature: MA Experiment 20000573 PARAMETER Experiment Name: At_100uM_ABA_Mutants__P Parameter: Tissue Value: Whole Plant
  misc_feature: MA Experiment 20000573 PARAMETER Experiment Name: At_100uM_ABA_Mutants__P Parameter: Treatment Value: None
  misc_feature: MA Experiment ID: 20000794 Result: Up-regulated in Transcription
  misc_feature: MA Experiment 20000794 PARAMETER Experiment Name: At_Petals_P Parameter: Age (day) Value: 23-25 days
  misc_feature: MA Experiment 20000794 PARAMETER Experiment Name: At_Petals_P Parameter: Plant Line Value: WS
  misc_feature: MA Experiment 20000794 PARAMETER Experiment Name: At_Petals_P Parameter: Tissue Value: Petals vs. Whole plant
  misc_feature: MA Experiment ID: 20001248 Result: Down-regulated in Transcription
  misc_feature: MA Experiment 20001248 PARAMETER Experiment Name: At_Far-red-induction_P Parameter: Age (day) Value: 7
  misc_feature: MA Experiment 20001248 PARAMETER Experiment Name: At_Far-red-induction_P Parameter: Light Value: Far-red vs. White
  misc_feature: MA Experiment 20001248 PARAMETER Experiment Name: At_Far-red-induction_P Parameter: Organism Value: A. thaliana
  misc_feature: MA Experiment 20001248 PARAMETER Experiment Name: At_Far-red-induction_P Parameter: Plant Line Value: Columbia
  misc_feature: MA Experiment 20001248 PARAMETER Experiment Name: At_Far-red-induction_P Parameter: Timepoint (hr) Value: 4
  misc_feature: MA Experiment 20001248 PARAMETER Experiment Name: At_Far-red-induction_P Parameter: Tissue Value: Whole Plant
  misc_feature: MA Experiment ID: 20001557 Result: Down-regulated in Transcription
  misc_feature: MA Experiment 20001557 PARAMETER Experiment Name: At_Drought_Soil_Dry_P Parameter: Age (day) Value: 27
  misc_feature: MA Experiment 20001557 PARAMETER Experiment Name: At_Drought_Soil_Dry_P Parameter: Organism Value: A. thaliana
  misc_feature: MA Experiment 20001557 PARAMETER Experiment Name: At_Drought_Soil_Dry_P Parameter: Plant Line Value: WS
  misc_feature: MA Experiment 20001557 PARAMETER Experiment Name: At_Drought_Soil_Dry_P Parameter: Post Timepoint (hr) Value: 3
  misc_feature: MA Experiment 20001557 PARAMETER Experiment Name: At_Drought_Soil_Dry_P Parameter: Post-Treatment Value: Re-Water vs. No Drought
  misc_feature: MA Experiment 20001557 PARAMETER Experiment Name: At_Drought_Soil_Dry_P Parameter: Timepoint (day) Value: 13
  misc_feature: MA Experiment 20001557 PARAMETER Experiment Name: At_Drought_Soil_Dry_P Parameter: Treatment Value: Drought vs. No Drought
  misc_feature: MA Experiment ID: 20001559 Result: Down-regulated in Transcription
  misc_feature: MA Experiment 20001559 PARAMETER Experiment Name: At_Drought_Soil_Dry_P Parameter: Age (day) Value: 28
  misc_feature: MA Experiment 20001559 PARAMETER Experiment Name: At_Drought_Soil_Dry_P Parameter: Organism Value: A. thaliana
  misc_feature: MA Experiment 20001559 PARAMETER Experiment Name: At_Drought_Soil_Dry_P Parameter: Plant Line Value: WS
  misc_feature: MA Experiment 20001559 PARAMETER Experiment Name: At_Drought_Soil_Dry_P Parameter: Post Timepoint (hr) Value: 29
  misc_feature: MA Experiment 20001559 PARAMETER Experiment Name: At_Drought_Soil_Dry_P Parameter: Post-Treatment Value: Re-Water vs. No Drought
  misc_feature: MA Experiment 20001559 PARAMETER Experiment Name: At_Drought_Soil_Dry_P Parameter: Timepoint (day) Value: 14
  misc_feature: MA Experiment 20001559 PARAMETER Experiment Name: At_Drought_Soil_Dry_P Parameter: Treatment Value: Drought vs. No Drought
gaaaaacaaaaatgacgatcttgctctgtttcttcttagtttcacttcttactatcgtatcatcaatctttcttaaacagaataaaacctcaaaattcaatcttcccccaagcccttcaagccttccgatcattggaaacttacaccatctcgcaggattgcctcacagatgttttcataagctctctatcaaatacggacccttggtctttcttcgtctcgggtctgttccggttgttgtgatctcatcgagtgaagcagctgaagcagttctcaaaaccaatgacttggaatgttgcagccgaccaaagacggtggggagcggaaaactctcttacggtttcaaagacatcactttcgcaccatacggtgagtattggcgagaagtgcgaaaactcgcggttatcgagctttttagctctaaaaaggttcaatctttcaggtatataagagaggaagaggtcgacttcgtggtcaagaaagtgtcagaatcagctttgaagcaatctcctgtggatttaagcaaaacctttttctccctcaccgctagtatcatttgtagagtcgccttaggacagaatttcaatgaaagcggctttgttatcgatcaagacaggatcgaagaacttgttaccgaatcagcagaagctctagggactttcactttctctgacttcttccctggtggacttggaagatttgtagattggttgtttcaacgacacaagaagatcaacaaagtctttaaggaacttgatgctttttatcagcatgtgattgatgatcacttgaagccagagggaagaaagaatcaagatattgtcaccttgattttggatatgatcgataaacaagaagattcagattctttcaaactcaacatggataatctcaaggcaattgtcatggatgtatttctcgcggggatagatacaagcgcggtaacaatgatttgggcgatgacagaacttattagaaaccctagagtgatgaagaaggctcaagaaagtattcgaaccactctgggtctcaagaaggaaagaatcactgaagaagatttaggcaaagttgagtatttgaaccacatactcaaggaaacttttaggttacacccggcacttccatttgtggtgccaagggaaacaatgtctcacatcaagatccaaggctatgatattccaccgaaaacacaaatccagcttaacgtgtggacgatcggacgtgaccctaagcgttggaatgaccctgaagaattcaaccctgaaaggtttgcaaatagctctgtagattttagaggacaacattttgacctattaccgtttggttctggtcgaaggatttgtcccggaatgccaatggcgattgctagtgtggaactagcattgatgaatttgctttattattttgattggagtatgcctgatgggactaaaggtgaagacattgatatggaagaagctggtaatatctctattgtcaagaaaatacctcttcaacttgtgcctgttcaacgttattgatgagcaataatataagctcgataacatggaaagtgtatgaagcaaaaaacataagattctttagattttgttgtgttatataagaaagaaatgttccaat

SEQ ID NO: 91643 - protein, 505 aa, Arabidopsis thaliana
  peptide (1)..(505): Ceres Seq. ID no. 12728557
  misc_feature (4)..(505): Homolog of NCBI NO: 15222174 NR Description: cytochrome p450 family; protein id: At1g13080.1, by cDNA: gi_3164139 [Arabidopsis thaliana]
  misc_feature (4)..(505): Homolog of NCBI NO: 25282603 NR Description: cytochrome P450 monooxygenase [imported] - thaliana >gi|3164140|dbj|BAA28537.1| cytochrome P450
  misc_feature (4)..(505): Homolog of NCBI NO: 13878395 NR Description: CYTOCHROME P450 71B27
  misc_feature (138)..(505): Homolog of NCBI NO: 30683097 NR Description: cytochrome P450 family [Arabidopsis thaliana]
  misc_feature (192)..(505): Homolog of NCBI NO: 25282611 NR Description: F3F19 hypothetical protein - Arabidopsis thaliana Strong similarity to gb|D78605 cytochrome P450 monooxygenase from
  misc_feature (4)..(184): Homolog of NCBI NO: 25282611 NR Description: F3F19 hypothetical protein - Arabidopsis thaliana Strong similarity to gb|D78605 cytochrome P450 monooxygenase from
  misc_feature (8)..(503): Homolog of NCBI NO: 15231520 NR Description: cytochrome p450 family; protein id: At3g26170.1, by cDNA: 262802. [Arabidopsis thaliana] Cytochrome P450 71B19 >gi|11994436|dbj|BAB02438.1| cytochrome
  misc_feature (8)..(503): Homolog of NCBI NO: 15231522 NR Description: cytochrome p450 family; protein id: At3g26180.1, by cDNA: gi_15810462, supported by cDNA: gi_16226473 [Arabidopsis >gi|13878386|sp|Q9LTM3|C72K_ARATH Cytochrome P450 71B20
  misc_feature (8)..(503): Homolog of NCBI NO: 21554748 NR Description: cytochrome P450, putative [Arabidopsis thaliana]
  misc_feature (8)..(503): Homolog of NCBI NO: 16226474 NR Description: AT3g26180/MTC11_8 [Arabidopsis thaliana]
KTKMTILLCFFLVSLLTIVSSIFLKQNKTSKFNLPPSPSSLPIIGNLHHLAGLPHRCFHKLSIKYGPLVFLRLGSVPVVVISSSEAAEAVLKTNDLECCSRPKTVGSGKLSYGFKDITFAPYGEYWREVRKLAVIELFSSKKVQSFRYIREEEVDFVVKKVSESALKQSPVDLSKTFFSLTASIICRVALGQNFNESGFVIDQDRIEELVTESAEALGTFTFSDFFPGGLGRFVDWLFQRHKKINKVFKELDAFYQHVIDDHLKPEGRKNQDIVTLILDMIDKQEDSDSFKLNMDNLKAIVMDVFLAGIDTSAVTMIWAMTELIRNPRVMKKAQESIRTTLGLKKERITEEDLGKVEYLNHILKETFRLHPALPFVVPRETMSHIKIQGYDIPPKTQIQLNVWTIGRDPKRWNDPEEFNPERFANSSVDFRGQHFDLLPFGSGRRICPGMPMAIASVELALMNLLYYFDWSMPDGTKGEDIDMEEAGNISIVKKIPLQLVPVQRY

SEQ ID NO: 91644 - protein, 502 aa, Arabidopsis thaliana
  peptide (1)..(502): Ceres Seq. ID no. 12728558
  misc_feature (1)..(502): Homolog of NCBI NO: 15222174 NR Description: cytochrome p450 family; protein id: At1g13080.1, by cDNA: gi_3164139 [Arabidopsis thaliana]
  misc_feature (1)..(502): Homolog of NCBI NO: 25282603 NR Description: cytochrome P450 monooxygenase [imported] - thaliana >gi|3164140|dbj|BAA28537.1| cytochrome P450
  misc_feature (1)..(502): Homolog of NCBI NO: 13878395 NR Description: CYTOCHROME P450 71B27
  misc_feature (135)..(502): Homolog of NCBI NO: 30683097 NR Description: cytochrome P450 family [Arabidopsis thaliana]
  misc_feature (189)..(502): Homolog of NCBI NO: 25282611 NR Description: F3F19 hypothetical protein - Arabidopsis thaliana Strong similarity to gb|D78605 cytochrome P450 monooxygenase from
  misc_feature (1)..(181): Homolog of NCBI NO: 25282611 NR Description: F3F19 hypothetical protein - Arabidopsis thaliana Strong similarity to gb|D78605 cytochrome P450 monooxygenase from
  misc_feature (5)..(500): Homolog of NCBI NO: 15231520 NR Description: cytochrome p450 family; protein id: At3g26170.1, by cDNA: 262802. [Arabidopsis thaliana] Cytochrome P450 71B19 >gi|11994436|dbj|BAB02438.1| cytochrome
  misc_feature (5)..(500): Homolog of NCBI NO: 15231522 NR Description: cytochrome p450 family; protein id: At3g26180.1, by cDNA: gi_15810462, supported by cDNA: gi_16226473 [Arabidopsis >gi|13878386|sp|Q9LTM3|C72K_ARATH Cytochrome P450 71B20
  misc_feature (5)..(500): Homolog of NCBI NO: 21554748 NR Description: cytochrome P450, putative [Arabidopsis thaliana]
  misc_feature (5)..(500): Homolog of NCBI NO: 16226474 NR Description: AT3g26180/MTC11_8 [Arabidopsis thaliana]
MTILLCFFLVSLLTIVSSIFLKQNKTSKFNLPPSPSSLPIIGNLHHLAGLPHRCFHKLSIKYGPLVFLRLGSVPVVVISSSEAAEAVLKTNDLECCSRPKTVGSGKLSYGFKDITFAPYGEYWREVRKLAVIELFSSKKVQSFRYIREEEVDFVVKKVSESALKQSPVDLSKTFFSLTASIICRVALGQNFNESGFVIDQDRIEELVTESAEALGTFTFSDFFPGGLGRFVDWLFQRHKKINKVFKELDAFYQHVIDDHLKPEGRKNQDIVTLILDMIDKQEDSDSFKLNMDNLKAIVMDVFLAGIDTSAVTMIWAMTELIRNPRVMKKAQESIRTTLGLKKERITEEDLGKVEYLNHILKETFRLHPALPFVVPRETMSHIKIQGYDIPPKTQIQLNVWTIGRDPKRWNDPEEFNPERFANSSVDFRGQHFDLLPFGSGRRICPGMPMAIASVELALMNLLYYFDWSMPDGTKGEDIDMEEAGNISIVKKIPLQLVPVQRY

SEQ ID NO: 91645 - DNA, 1473 bp, Arabidopsis thaliana
  misc_feature (1)..(1473): Ceres Seq. ID no. 12728559
  misc_feature: MA Experiment ID: 20000184 Result: Down-regulated in Transcription
  misc_feature: MA Experiment 20000184 PARAMETER Experiment Name: At_Shoots__P Parameter: Age (day) Value: 7
  misc_feature: MA Experiment 20000184 PARAMETER Experiment Name: At_Shoots__P Parameter: Tissue Value: Shoots vs. Whole Plant
  misc_feature: MA Experiment ID: 20000264 Result: Down-regulated in Transcription
  misc_feature: MA Experiment 20000264 PARAMETER Experiment Name: At_Open_Flower_P Parameter: Age (day) Value: 21
  misc_feature: MA Experiment 20000264 PARAMETER Experiment Name: At_Open_Flower_P Parameter: Plant Line Value: WS
  misc_feature: MA Experiment 20000264 PARAMETER Experiment Name: At_Open_Flower_P Parameter: Tissue Value: Open Flower vs. Whole Plant
  misc_feature: MA Experiment ID: 20000265 Result: Down-regulated in Transcription
  misc_feature: MA Experiment 20000265 PARAMETER Experiment Name: At_Open_Flower_P Parameter: Age (day) Value: 21
  misc_feature: MA Experiment 20000265 PARAMETER Experiment Name: At_Open_Flower_P Parameter: Plant Line Value: WS
  misc_feature: MA Experiment 20000265 PARAMETER Experiment Name: At_Open_Flower_P Parameter: Tissue Value: Closed Flower vs. Whole Plant
  misc_feature: MA Experiment ID: 20000286 Result: Down-regulated in Transcription
  misc_feature: MA Experiment 20000286 PARAMETER Experiment Name: At_Open_Flower_P Parameter: Age (day) Value: 21
  misc_feature: MA Experiment 20000286 PARAMETER Experiment Name: At_Open_Flower_P Parameter: Plant Line Value: WS
  misc_feature: MA Experiment 20000286 PARAMETER Experiment Name: At_Open_Flower_P Parameter: Tissue Value: Half Open vs. Whole Plant
  misc_feature: MA Experiment ID: 20000496 Result: Down-regulated in Transcription
  misc_feature: MA Experiment 20000496 PARAMETER Experiment Name: At_Guard_Cells_P Parameter: Harvest Date Value: 7/19/2002
  misc_feature: MA Experiment 20000496 PARAMETER Experiment Name: At_Guard_Cells_P Parameter: Organism Value: Canola
  misc_feature: MA Experiment 20000496 PARAMETER Experiment Name: At_Guard_Cells_P Parameter: Tissue Value: Guard Cells vs. Leaves
  misc_feature: MA Experiment ID: 20000794 Result: Down-regulated in Transcription
  misc_feature: MA Experiment 20000794 PARAMETER Experiment Name: At_Petals_P Parameter: Age (day) Value: 23-25 days
  misc_feature: MA Experiment 20000794 PARAMETER Experiment Name: At_Petals_P Parameter: Plant Line Value: WS
  misc_feature: MA Experiment 20000794 PARAMETER Experiment Name: At_Petals_P Parameter: Tissue Value: Petals vs. Whole plant
  misc_feature: MA Experiment ID: 20001555 Result: Down-regulated in Transcription
  misc_feature: MA Experiment 20001555 PARAMETER Experiment Name: At_Drought_Soil_Dry_P Parameter: Age (day) Value: 24
  misc_feature: MA Experiment 20001555 PARAMETER Experiment Name: At_Drought_Soil_Dry_P Parameter: Organism Value: A. thaliana
  misc_feature: MA Experiment 20001555 PARAMETER Experiment Name: At_Drought_Soil_Dry_P Parameter: Plant Line Value: WS
  misc_feature: MA Experiment 20001555 PARAMETER Experiment Name: At_Drought_Soil_Dry_P Parameter: Post Timepoint (hr) Value: None
  misc_feature: MA Experiment 20001555 PARAMETER Experiment Name: At_Drought_Soil_Dry_P Parameter: Post-Treatment Value: None
  misc_feature: MA Experiment 20001555 PARAMETER Experiment Name: At_Drought_Soil_Dry_P Parameter: Timepoint (day) Value: 10
  misc_feature: MA Experiment 20001555 PARAMETER Experiment Name: At_Drought_Soil_Dry_P Parameter: Treatment Value: Drought vs. No Drought
  misc_feature: MA Experiment ID: 20001560 Result: Down-regulated in Transcription
  misc_feature: MA Experiment 20001560 PARAMETER Experiment Name: At_Drought_Soil_Dry_P Parameter: Age (day) Value: 28
  misc_feature: MA Experiment 20001560 PARAMETER Experiment Name: At_Drought_Soil_Dry_P Parameter: Organism Value: A. thaliana
  misc_feature: MA Experiment 20001560 PARAMETER Experiment Name: At_Drought_Soil_Dry_P Parameter: Plant Line Value: WS
  misc_feature: MA Experiment 20001560 PARAMETER Experiment Name: At_Drought_Soil_Dry_P Parameter: Post Timepoint (hr) Value: None
  misc_feature: MA Experiment 20001560 PARAMETER Experiment Name: At_Drought_Soil_Dry_P Parameter: Post-Treatment Value: None
  misc_feature: MA Experiment 20001560 PARAMETER Experiment Name: At_Drought_Soil_Dry_P Parameter: Timepoint (day) Value: 14
  misc_feature: MA Experiment 20001560 PARAMETER Experiment Name: At_Drought_Soil_Dry_P Parameter: Treatment Value: Drought vs. No Drought
atggcaatcatcctctgtttcctcattctcttaccccttatcttaatcttcttgaaaaaactcaaacattcgaaatggaagcttcctccggggccaccaaagcttccgttcattggaaacttacaccaactccaagaactacctcccaggaatctcaaccacaagtacgggccagtgatacttctccgtttcggattcgtccccttggtcgtgatctcatctaaagaagcagcagaggaagttctcaagattcacgatcttgaatgttgtagccgaccagagacggccgggactagaaagatctcttacaactttaaagacatcggattcgcgccttacggtgaggaatggaaggccatgcgaaagctctcggtggtcgaactcttcaccgccaaaaaacatcagtattttaggtctatcagagaggaagagaatgacttgttggtcaagaaactaacagaattggctctgacacgatccccggtgaatttgaagaagacccttttcactttagtcgggagtattgtgtgtcggatcggattcgggtttaatcttcatgagtgtgagttcatcgatgaaaatagcatctccgaccttgttgacaagtctgagatacttgagatgacttctatgttctctgatttctttccaggaggaatcggtagattcatcgattggatctccggtcaaaacaagcgattcgataatgttttctcggacctcgacactttctttcaaaacattcttgattatcatcttaagcctggaagaaaagtagcagatagctctgatataatcgacgtggtgatcaacatgataaagaagcaagagaaagatggagactctttcaagctcacaacggatcatcttaaagggatgatctcggacatatttctagctggagttagcacaagtgcctccacactgatatgggcgataacagagttagttaggaaccgtaaagtgatgaagaaagtgcaagaagagattaggacaacactcggagacaagaaggagagaatcacagagcaagatctcaccaatctccattacttcaagcttgtggtcaaagagatattcagattacacccagcagttccatttttgctaccaagagagacattatctcatgtcaagattcaaggctacgacattcccgccaaaacccagatcatgatcaacgtctatgcgattgctcgcgatccaaaactttggacaaacccagatgagtttaaccctgacaggttcctagacagttccatagattacaaaggactaaattttgaactgttaccgtttgggtctggtaggagaatctgtccaggaatgacgatgggaatcacacttgttgaatttgctttattgaatttgctttacttctttgattggggtttgccggagaaggaagaggcggacaagatcatcaccggcaatggagttgctgttggcctagttcaagttcttctccactga

SEQ ID NO: 91646 - protein, 490 aa, Arabidopsis thaliana
  peptide (1)..(490): Ceres Seq. ID no. 12728560
  misc_feature (29)..(489): Pfam Name: Cytochrome P450 Pfam Description: Cytochrome P450
  misc_feature (1)..(490): Homolog of NCBI NO: 15222180 NR Description: cytochrome p450 family; protein id: At1g13100.1
  misc_feature (1)..(490): Homolog of NCBI NO: 15222177 NR Description: cytochrome p450 family; protein id: At1g13090.1, by cDNA: 35385., supported by cDNA: gi_13272452, supported by gi_17065513 [Arabidopsis thaliana]
  misc_feature (1)..(490): Homolog of NCBI NO: 21618278 NR Description: putative cytochrome P450 monooxygenase
  misc_feature (1)..(490): Homolog of NCBI NO: 15222182 NR Description: cytochrome p450 family; protein id: At1g13110.1, by cDNA: gi_18087622 [Arabidopsis thaliana]
  misc_feature (1)..(490): Homolog of NCBI NO: 15231632 NR Description: cytochrome p450 family; protein id: At3g26830.1 thaliana] >gi|13878391|sp|Q9LW27|C72F_ARATH Cytochrome P450 71B15
  misc_feature (1)..(485): Homolog of NCBI NO: 15231526 NR Description: cytochrome P450 family; protein id: At3g26210.1 thaliana] >gi|13878383|sp|Q9LTM0|C72N_ARATH Cytochrome P450 71B23
  misc_feature (1)..(299): Homolog of NCBI NO: 26449645 NR Description: putative cytochrome P450 monooxygenase
  misc_feature (1)..(488): Homolog of NCBI NO: 15231524 NR Description: cytochrome p450 family; protein id: At3g26190.1 thaliana] >gi|13878385|sp|Q9LTM2|C72L_ARATH Cytochrome P450 71B21
  misc_feature (1)..(467): Homolog of NCBI NO: 15231520 NR Description: cytochrome p450 family; protein id: At3g26170.1, by cDNA: 262802. [Arabidopsis thaliana] Cytochrome P450 71B19 >gi|11994436|dbj|BAB02438.1| cytochrome
  misc_feature (1)..(474): Homolog of NCBI NO: 15222174 NR Description: cytochrome p450 family; protein id: At1g13080.1, by cDNA: gi_3164139 [Arabidopsis thaliana]
MAIILCFLILLPLILIFLKKLKHSKWKLPPGPPKLPFIGNLHQLQELPPRNLNHKYGPVILLRFGFVPLVVISSKEAAEEVLKIHDLECCSRPETAGTRKISYNFKDIGFAPYGEEWKAMRKLSVVELFTAKKHQYFRSIREEENDLLVKKLTELALTRSPVNLKKTLFTLVGSIVCRIGFGFNLHECEFIDENSISDLVDKSEILEMTSMFSDFFPGGIGRFIDWISGQNKRFDNVFSDLDTFFQNILDYHLKPGRKVADSSDIIDVVINMIKKQEKDGDSFKLTTDHLKGMISDIFLAGVSTSASTLIWAITELVRNRKVMKKVQEEIRTTLGDKKERITEQDLTNLHYFKLVVKEIFRLHPAVPFLLPRETLSHVKIQGYDIPAKTQIMINVYAIARDPKLWTNPDEFNPDRFLDSSIDYKGLNFELLPFGSGRRICPGMTMGITLVEFALLNLLYFFDWGLPEKEEADKIITGNGVAVGLVQVLLH

SEQ ID NO: 91647 - protein, 371 aa, Arabidopsis thaliana
  peptide (1)..(371): Ceres Seq. ID no. 12728561
  misc_feature (1)..(370): Pfam Name: Cytochrome P450 Pfam Description: Cytochrome P450
  misc_feature (1)..(371): Homolog of NCBI NO: 15222180 NR Description: cytochrome p450 family; protein id: At1g13100.1
  misc_feature (1)..(371): Homolog of NCBI NO: 15222177 NR Description: cytochrome p450 family; protein id: At1g13090.1, by cDNA: 35385., supported by cDNA: gi_13272452, supported by gi_17065513 [Arabidopsis thaliana]
  misc_feature (1)..(371): Homolog of NCBI NO: 21618278 NR Description: putative cytochrome P450 monooxygenase
  misc_feature (1)..(371): Homolog of NCBI NO: 15222182 NR Description: cytochrome p450 family; protein id: At1g13110.1, by cDNA: gi_18087622 [Arabidopsis thaliana]
  misc_feature (1)..(371): Homolog of NCBI NO: 15231632 NR Description: cytochrome p450 family; protein id: At3g26830.1 thaliana] >gi|13878391|sp|Q9LW27|C72F_ARATH Cytochrome P450 71B15
  misc_feature (1)..(366): Homolog of NCBI NO: 15231526 NR Description: cytochrome P450 family; protein id: At3g26210.1 thaliana] >gi|13878383|sp|Q9LTM0|C72N_ARATH Cytochrome P450 71B23
  misc_feature (1)..(180): Homolog of NCBI NO: 26449645 NR Description: putative cytochrome P450 monooxygenase
  misc_feature (1)..(369): Homolog of NCBI NO: 15231524 NR Description: cytochrome p450 family; protein id: At3g26190.1 thaliana] >gi|13878385|sp|Q9LTM2|C72L_ARATH Cytochrome P450 71B21
  misc_feature (1)..(348): Homolog of NCBI NO: 15231520 NR Description: cytochrome p450 family; protein id: At3g26170.1, by cDNA: 262802. [Arabidopsis thaliana] Cytochrome P450 71B19 >gi|11994436|dbj|BAB02438.1| cytochrome
  misc_feature (1)..(355): Homolog of NCBI NO: 15222174 NR Description: cytochrome p450 family; protein id: At1g13080.1, by cDNA: gi_3164139 [Arabidopsis thaliana]
MRKLSVVELFTAKKHQYFRSIREEENDLLVKKLTELALTRSPVNLKKTLFTLVGSIVCRIGFGFNLHECEFIDENSISDLVDKSEILEMTSMFSDFFPGGIGRFIDWISGQNKRFDNVFSDLDTFFQNILDYHLKPGRKVADSSDIIDVVINMIKKQEKDGDSFKLTTDHLKGMISDIFLAGVSTSASTLIWAITELVRNRKVMKKVQEEIRTTLGDKKERITEQDLTNLHYFKLVVKEIFRLHPAVPFLLPRETLSHVKIQGYDIPAKTQIMINVYAIARDPKLWTNPDEFNPDRFLDSSIDYKGLNFELLPFGSGRRICPGMTMGITLVEFALLNLLYFFDWGLPEKEEADKIITGNGVAVGLVQVLLH

SEQ ID NO: 91648 - protein, 283 aa, Arabidopsis thaliana
  peptide (1)..(283): Ceres Seq. ID no. 12728562
  misc_feature (1)..(282): Pfam Name: Cytochrome P450 Pfam Description: Cytochrome P450
  misc_feature (1)..(283): Homolog of NCBI NO: 15222180 NR Description: cytochrome p450 family; protein id: At1g13100.1
  misc_feature (1)..(283): Homolog of NCBI NO: 15222177 NR Description: cytochrome p450 family; protein id: At1g13090.1, by cDNA: 35385., supported by cDNA: gi_13272452, supported by gi_17065513 [Arabidopsis thaliana]
  misc_feature (1)..(283): Homolog of NCBI NO: 21618278 NR Description: putative cytochrome P450 monooxygenase
  misc_feature (1)..(283): Homolog of NCBI NO: 15222182 NR Description: cytochrome p450 family; protein id: At1g13110.1, by cDNA: gi_18087622 [Arabidopsis thaliana]
  misc_feature (1)..(283): Homolog of NCBI NO: 15231632 NR Description: cytochrome p450 family; protein id: At3g26830.1 thaliana] >gi|13878391|sp|Q9LW27|C72F_ARATH Cytochrome P450 71B15
  misc_feature (1)..(278): Homolog of NCBI NO: 15231526 NR Description: cytochrome P450 family; protein id: At3g26210.1 thaliana] >gi|13878383|sp|Q9LTM0|C72N_ARATH Cytochrome P450 71B23
  misc_feature (1)..(92): Homolog of NCBI NO: 26449645 NR Description: putative cytochrome P450 monooxygenase
  misc_feature (1)..(281): Homolog of NCBI NO: 15231524 NR Description: cytochrome p450 family; protein id: At3g26190.1 thaliana] >gi|13878385|sp|Q9LTM2|C72L_ARATH Cytochrome P450 71B21
  misc_feature (1)..(260): Homolog of NCBI NO: 15231520 NR Description: cytochrome p450 family; protein id: At3g26170.1, by cDNA: 262802. [Arabidopsis thaliana] Cytochrome P450 71B19 >gi|11994436|dbj|BAB02438.1| cytochrome
  misc_feature (1)..(267): Homolog of NCBI NO: 15222174 NR Description: cytochrome p450 family; protein id: At1g13080.1, by cDNA: gi_3164139 [Arabidopsis thaliana]
MTSMFSDFFPGGIGRFIDWISGQNKRFDNVFSDLDTFFQNILDYHLKPGRKVADSSDIIDVVINMIKKQEKDGDSFKLTTDHLKGMISDIFLAGVSTSASTLIWAITELVRNRKVMKKVQEEIRTTLGDKKERITEQDLTNLHYFKLVVKEIFRLHPAVPFLLPRETLSHVKIQGYDIPAKTQIMINVYAIARDPKLWTNPDEFNPDRFLDSSIDYKGLNFELLPFGSGRRICPGMTMGITLVEFALLNLLYFFDWGLPEKEEADKIITGNGVAVGLVQVLLH

SEQ ID NO: 91649 - DNA, 1691 bp, Arabidopsis thaliana
  misc_feature (1)..(1691): Ceres Seq. ID no. 12728563
  misc_feature: MA Experiment ID: 20000166 Result: Down-regulated in Transcription
  misc_feature: MA Experiment 20000166 PARAMETER Experiment Name: At_100uM_ABA_P Parameter: Age (day) Value: 14
  misc_feature: MA Experiment 20000166 PARAMETER Experiment Name: At_100uM_ABA_P Parameter: Organism Value: A. thaliana
  misc_feature: MA Experiment 20000166 PARAMETER Experiment Name: At_100uM_ABA_P Parameter: Plant Line Value: WS
  misc_feature: MA Experiment 20000166 PARAMETER Experiment Name: At_100uM_ABA_P Parameter: Timepoint (hr) Value: 1
  misc_feature: MA Experiment 20000166 PARAMETER Experiment Name: At_100uM_ABA_P Parameter: Tissue Value: Aerial
  misc_feature: MA Experiment 20000166 PARAMETER Experiment Name: At_100uM_ABA_P Parameter: Treatment Value: 100uM ABA vs. No Treatment
  misc_feature: MA Experiment ID: 20000169 Result: Down-regulated in Transcription
  misc_feature: MA Experiment 20000169 PARAMETER Experiment Name: At_100uM_ABA_P Parameter: Age (day) Value: 14
  misc_feature: MA Experiment 20000169 PARAMETER Experiment Name: At_100uM_ABA_P Parameter: Organism Value: A. thaliana
  misc_feature: MA Experiment 20000169 PARAMETER Experiment Name: At_100uM_ABA_P Parameter: Plant Line Value: WS
  misc_feature: MA Experiment 20000169 PARAMETER Experiment Name: At_100uM_ABA_P Parameter: Timepoint (hr) Value: 6
  misc_feature: MA Experiment 20000169 PARAMETER Experiment Name: At_100uM_ABA_P Parameter: Tissue Value: Aerial
  misc_feature: MA Experiment 20000169 PARAMETER Experiment Name: At_100uM_ABA_P Parameter: Treatment Value: 100uM ABA vs. No Treatment
  misc_feature: MA Experiment ID: 20000171 Result: Down-regulated in Transcription
  misc_feature: MA Experiment 20000171 PARAMETER Experiment Name: At_42deg_Heat_P Parameter: Age (day) Value: 14
  misc_feature: MA Experiment 20000171 PARAMETER Experiment Name: At_42deg_Heat_P Parameter: Organism Value: A. thaliana
  misc_feature: MA Experiment 20000171 PARAMETER Experiment Name: At_42deg_Heat_P Parameter: Plant Line Value: WS
  misc_feature: MA Experiment 20000171 PARAMETER Experiment Name: At_42deg_Heat_P Parameter: Temperature (deg C) Value: 42 vs. 22
  misc_feature: MA Experiment 20000171 PARAMETER Experiment Name: At_42deg_Heat_P Parameter: Timepoint (hr) Value: 1
  misc_feature: MA Experiment 20000171 PARAMETER Experiment Name: At_42deg_Heat_P Parameter: Tissue Value: Aerial
  misc_feature: MA Experiment ID: 20000173 Result: Down-regulated in Transcription
  misc_feature: MA Experiment 20000173 PARAMETER Experiment Name: At_42deg_Heat_P Parameter: Age (day) Value: 14
  misc_feature: MA Experiment 20000173 PARAMETER Experiment Name: At_42deg_Heat_P Parameter: Organism Value: A. thaliana
  misc_feature: MA Experiment 20000173 PARAMETER Experiment Name: At_42deg_Heat_P Parameter: Plant Line Value: WS
  misc_feature: MA Experiment 20000173 PARAMETER Experiment Name: At_42deg_Heat_P Parameter: Temperature (deg C) Value: 42 vs. 22
  misc_feature: MA Experiment 20000173 PARAMETER Experiment Name: At_42deg_Heat_P Parameter: Timepoint (hr) Value: 6
  misc_feature: MA Experiment 20000173 PARAMETER Experiment Name: At_42deg_Heat_P Parameter: Tissue Value: Aerial
  misc_feature: MA Experiment ID: 20000180 Result: Up-regulated in Transcription
  misc_feature: MA Experiment 20000180 PARAMETER Experiment Name: At_Germinating_Seeds_P Parameter: Age (hr) Value: 24 vs. 0
  misc_feature: MA Experiment 20000180 PARAMETER Experiment Name: At_Germinating_Seeds_P Parameter: Tissue Value: Germinating Seeds
  misc_feature: MA Experiment ID: 20000227 Result: Down-regulated in Transcription
  misc_feature: MA Experiment 20000227 PARAMETER Experiment Name: At_Root-Tips-vs-Tops_P Parameter: Tissue Value: Root Tips vs. Root Tops
  misc_feature: MA Experiment ID: 20000234 Result: Down-regulated in Transcription
  misc_feature: MA Experiment 20000234 PARAMETER Experiment Name: At_Siliques_P Parameter: Age (day) Value: 21
  misc_feature: MA Experiment 20000234 PARAMETER Experiment Name: At_Siliques_P Parameter: Organism Value: A. thaliana
  misc_feature: MA Experiment 20000234 PARAMETER Experiment Name: At_Siliques_P Parameter: Plant Line Value: WS
  misc_feature: MA Experiment 20000234 PARAMETER Experiment Name: At_Siliques_P Parameter: Tissue Value: Less Than 5mm Siliques vs. Whole Plant
  misc_feature: MA Experiment ID: 20000264 Result: Down-regulated in Transcription
  misc_feature: MA Experiment 20000264 PARAMETER Experiment Name: At_Open_Flower_P Parameter: Age (day) Value: 21
  misc_feature: MA Experiment 20000264 PARAMETER Experiment Name: At_Open_Flower_P Parameter: Plant Line Value: WS
  misc_feature: MA Experiment 20000264 PARAMETER Experiment Name: At_Open_Flower_P Parameter: Tissue Value: Open Flower vs. Whole Plant
  misc_feature: MA Experiment ID: 20000265 Result: Down-regulated in Transcription
  misc_feature: MA Experiment 20000265 PARAMETER Experiment Name: At_Open_Flower_P Parameter: Age (day) Value: 21
  misc_feature: MA Experiment 20000265 PARAMETER Experiment Name: At_Open_Flower_P Parameter: Plant Line Value: WS
  misc_feature: MA Experiment 20000265 PARAMETER Experiment Name: At_Open_Flower_P Parameter: Tissue Value: Closed Flower vs. Whole Plant
  misc_feature: MA Experiment ID: 20000286 Result: Down-regulated in Transcription
  misc_feature: MA Experiment 20000286 PARAMETER Experiment Name: At_Open_Flower_P Parameter: Age (day) Value: 21
  misc_feature: MA Experiment 20000286 PARAMETER Experiment Name: At_Open_Flower_P Parameter: Plant Line Value: WS
  misc_feature: MA Experiment 20000286 PARAMETER Experiment Name: At_Open_Flower_P Parameter: Tissue Value: Half Open vs. Whole Plant
  misc_feature: MA Experiment ID: 20000436 Result: Down-regulated in Transcription
  misc_feature: MA Experiment 20000436 PARAMETER Experiment Name: At_Drought_P Parameter: Age (day) Value: 7
  misc_feature: MA Experiment 20000436 PARAMETER Experiment Name: At_Drought_P Parameter: Organism Value: A. thaliana
  misc_feature: MA Experiment 20000436 PARAMETER Experiment Name: At_Drought_P Parameter: Plant Line Value: WS
  misc_feature: MA Experiment 20000436 PARAMETER Experiment Name: At_Drought_P Parameter: Timepoint (hr) Value: 12
  misc_feature: MA Experiment 20000436 PARAMETER Experiment Name: At_Drought_P Parameter: Tissue Value: Whole Plant
  misc_feature: MA Experiment 20000436 PARAMETER Experiment Name: At_Drought_P Parameter: Treatment Value: Drought vs. No Drought
  misc_feature: MA Experiment ID: 20000437 Result: Down-regulated in Transcription
  misc_feature: MA Experiment 20000437 PARAMETER Experiment Name: At_Drought_P Parameter: Age (day) Value: 8
  misc_feature: MA Experiment 20000437 PARAMETER Experiment Name: At_Drought_P Parameter: Organism Value: A. thaliana
  misc_feature: MA Experiment 20000437 PARAMETER Experiment Name: At_Drought_P Parameter: Plant Line Value: WS
  misc_feature: MA Experiment 20000437 PARAMETER Experiment Name: At_Drought_P Parameter: Timepoint (hr) Value: 24
  misc_feature: MA Experiment 20000437 PARAMETER Experiment Name: At_Drought_P Parameter: Tissue Value: Whole Plant
  misc_feature: MA Experiment 20000437 PARAMETER Experiment Name: At_Drought_P Parameter: Treatment Value: Drought vs. No Drought
  misc_feature: MA Experiment ID: 20000441 Result: Up-regulated in Transcription
  misc_feature: MA Experiment 20000441 PARAMETER Experiment Name: At_1uM_BR-BRZ__P Parameter: Tissue Value: Shoot Apices
  misc_feature: MA Experiment 20000441 PARAMETER Experiment Name: At_1uM_BR-BRZ__P Parameter: Treatment Value: 1uM BR vs. No Treatment
  misc_feature: MA Experiment ID: 20000453 Result: Down-regulated in Transcription
  misc_feature: MA Experiment 20000453 PARAMETER Experiment Name: At_100uM_ABA_P Parameter: Age (day) Value: 15
  misc_feature: MA Experiment 20000453 PARAMETER Experiment Name: At_100uM_ABA_P Parameter: Organism Value: A. thaliana
  misc_feature: MA Experiment 20000453 PARAMETER Experiment Name: At_100uM_ABA_P Parameter: Plant Line Value: WS
  misc_feature: MA Experiment 20000453 PARAMETER Experiment Name: At_100uM_ABA_P Parameter: Timepoint (hr) Value: 24
  misc_feature: MA Experiment 20000453 PARAMETER Experiment Name: At_100uM_ABA_P Parameter: Tissue Value: Aerial
  misc_feature: MA Experiment 20000453 PARAMETER Experiment Name: At_100uM_ABA_P Parameter: Treatment Value: 100uM ABA vs. No Treatment
  misc_feature: MA Experiment ID: 20000455 Result: Down-regulated in Transcription
  misc_feature: MA Experiment 20000455 PARAMETER Experiment Name: At_100uM_ABA_P Parameter: Age (day) Value: 16
  misc_feature: MA Experiment 20000455 PARAMETER Experiment Name: At_100uM_ABA_P Parameter: Organism Value: A. thaliana
  misc_feature: MA Experiment 20000455 PARAMETER Experiment Name: At_100uM_ABA_P Parameter: Plant Line Value: WS
  misc_feature: MA Experiment 20000455 PARAMETER Experiment Name: At_100uM_ABA_P Parameter: Timepoint (hr) Value: 48
  misc_feature: MA Experiment 20000455 PARAMETER Experiment Name: At_100uM_ABA_P Parameter: Tissue Value: Aerial
  misc_feature: MA Experiment 20000455 PARAMETER Experiment Name: At_100uM_ABA_P Parameter: Treatment Value: 100uM ABA vs. No Treatment
  misc_feature: MA Experiment ID: 20000575 Result: Down-regulated in Transcription
  misc_feature: MA Experiment 20000575 PARAMETER Experiment Name: At_100uM_ABA_Mutants__P Parameter: Organism Value: A. thaliana
  misc_feature: MA Experiment 20000575 PARAMETER Experiment Name: At_100uM_ABA_Mutants__P Parameter: Plant Line Value: CS22
  misc_feature: MA Experiment 20000575 PARAMETER Experiment Name: At_100uM_ABA_Mutants__P Parameter: Timepoint (hr) Value: 6
  misc_feature: MA Experiment 20000575 PARAMETER Experiment Name: At_100uM_ABA_Mutants__P Parameter: Tissue Value: Whole Plant
  misc_feature: MA Experiment 20000575 PARAMETER Experiment Name: At_100uM_ABA_Mutants__P Parameter: Treatment Value: 1uM ABA vs. No Treatment
  misc_feature: MA Experiment ID: 20000576 Result: Down-regulated in Transcription
  misc_feature: MA Experiment 20000576 PARAMETER Experiment Name: At_100uM_ABA_Mutants__P Parameter: Organism Value: A. thaliana
  misc_feature: MA Experiment 20000576 PARAMETER Experiment Name: At_100uM_ABA_Mutants__P Parameter: Plant Line Value: CS23
  misc_feature: MA Experiment 20000576 PARAMETER Experiment Name: At_100uM_ABA_Mutants__P Parameter: Timepoint (hr) Value: 6
  misc_feature: MA Experiment 20000576 PARAMETER Experiment Name: At_100uM_ABA_Mutants__P Parameter: Tissue Value: Whole Plant
  misc_feature: MA Experiment 20000576 PARAMETER Experiment Name: At_100uM_ABA_Mutants__P Parameter: Treatment Value: 1uM ABA vs. No Treatment
  misc_feature: MA Experiment ID: 20000794 Result: Down-regulated in Transcription
  misc_feature: MA Experiment 20000794 PARAMETER Experiment Name: At_Petals_P Parameter: Age (day) Value: 23-25 days
  misc_feature: MA Experiment 20000794 PARAMETER Experiment Name: At_Petals_P Parameter: Plant Line Value: WS
  misc_feature: MA Experiment 20000794 PARAMETER Experiment Name: At_Petals_P Parameter: Tissue Value: Petals vs. Whole plant
  misc_feature: MA Experiment ID: 20001248 Result: Down-regulated in Transcription
  misc_feature: MA Experiment 20001248 PARAMETER Experiment Name: At_Far-red-induction_P Parameter: Age (day) Value: 7
  misc_feature: MA Experiment 20001248 PARAMETER Experiment Name: At_Far-red-induction_P Parameter: Light Value: Far-red vs. White
  misc_feature: MA Experiment 20001248 PARAMETER Experiment Name: At_Far-red-induction_P Parameter: Organism Value: A. thaliana
  misc_feature: MA Experiment 20001248 PARAMETER Experiment Name: At_Far-red-induction_P Parameter: Plant Line Value: Columbia
  misc_feature: MA Experiment 20001248 PARAMETER Experiment Name: At_Far-red-induction_P Parameter: Timepoint (hr) Value: 4
  misc_feature: MA Experiment 20001248 PARAMETER Experiment Name: At_Far-red-induction_P Parameter: Tissue Value: Whole Plant
  misc_feature: MA Experiment ID: 20001450 Result: Down-regulated in Transcription
  misc_feature: MA Experiment 20001450 PARAMETER Experiment Name: At_Far-red-induction_P Parameter: Age (day) Value: 7
  misc_feature: MA Experiment 20001450 PARAMETER Experiment Name: At_Far-red-induction_P Parameter: Light Value: Far-red vs. White
  misc_feature: MA Experiment 20001450 PARAMETER Experiment Name: At_Far-red-induction_P Parameter: Organism Value: A. thaliana
  misc_feature: MA Experiment 20001450 PARAMETER Experiment Name: At_Far-red-induction_P Parameter: Plant Line Value: Columbia
  misc_feature: MA Experiment 20001450 PARAMETER Experiment Name: At_Far-red-induction_P Parameter: Timepoint (hr) Value: 8
  misc_feature: MA Experiment 20001450 PARAMETER Experiment Name: At_Far-red-induction_P Parameter: Tissue Value: Whole Plant
  misc_feature: MA Experiment ID: 20001554 Result: Down-regulated in Transcription
  misc_feature: MA Experiment 20001554 PARAMETER Experiment Name: At_Drought_Soil_Dry_P Parameter: Age (day) Value: 21
  misc_feature: MA Experiment 20001554 PARAMETER Experiment Name: At_Drought_Soil_Dry_P Parameter: Organism Value: A. thaliana
  misc_feature: MA Experiment 20001554 PARAMETER Experiment Name: At_Drought_Soil_Dry_P Parameter: Plant Line Value: WS
  misc_feature: MA Experiment 20001554 PARAMETER Experiment Name: At_Drought_Soil_Dry_P Parameter: Post Timepoint (hr) Value: None
  misc_feature: MA Experiment 20001554 PARAMETER Experiment Name: At_Drought_Soil_Dry_P Parameter: Post-Treatment Value: None
  misc_feature: MA Experiment 20001554 PARAMETER Experiment Name: At_Drought_Soil_Dry_P Parameter: Timepoint (day) Value: 7
  misc_feature: MA Experiment 20001554 PARAMETER Experiment Name: At_Drought_Soil_Dry_P Parameter: Treatment Value: Drought vs. No Drought
  misc_feature: MA Experiment ID: 20001555 Result: Down-regulated in Transcription
  misc_feature: MA Experiment 20001555 PARAMETER Experiment Name: At_Drought_Soil_Dry_P Parameter: Age (day) Value: 24
  misc_feature: MA Experiment 20001555 PARAMETER Experiment Name: At_Drought_Soil_Dry_P Parameter: Organism Value: A. thaliana
  misc_feature: MA Experiment 20001555 PARAMETER Experiment Name: At_Drought_Soil_Dry_P Parameter: Plant Line Value: WS
  misc_feature: MA Experiment 20001555 PARAMETER Experiment Name: At_Drought_Soil_Dry_P Parameter: Post Timepoint (hr) Value: None
  misc_feature: MA Experiment 20001555 PARAMETER Experiment Name: At_Drought_Soil_Dry_P Parameter: Post-Treatment Value: None
  misc_feature: MA Experiment 20001555 PARAMETER Experiment Name: At_Drought_Soil_Dry_P Parameter: Timepoint (day) Value: 10
  misc_feature: MA Experiment 20001555 PARAMETER Experiment Name: At_Drought_Soil_Dry_P Parameter: Treatment Value: Drought vs. No Drought
  misc_feature: MA Experiment ID: 20001556 Result: Down-regulated in Transcription
  misc_feature: MA Experiment 20001556 PARAMETER Experiment Name: At_Drought_Soil_Dry_P Parameter: Age (day) Value: 26
  misc_feature: MA Experiment 20001556 PARAMETER Experiment Name: At_Drought_Soil_Dry_P Parameter: Organism Value: A. thaliana
  misc_feature: MA Experiment 20001556 PARAMETER Experiment Name: At_Drought_Soil_Dry_P Parameter: Plant Line Value: WS
  misc_feature: MA Experiment 20001556 PARAMETER Experiment Name: At_Drought_Soil_Dry_P Parameter: Post Timepoint (hr) Value: None
  misc_feature: MA Experiment 20001556 PARAMETER Experiment Name: At_Drought_Soil_Dry_P Parameter: Post-Treatment Value: None
  misc_feature: MA Experiment 20001556 PARAMETER Experiment Name: At_Drought_Soil_Dry_P Parameter: Timepoint (day) Value: 12
  misc_feature: MA Experiment 20001556 PARAMETER Experiment Name: At_Drought_Soil_Dry_P Parameter: Treatment Value: Drought vs. No Drought
  misc_feature: MA Experiment ID: 20001559 Result: Down-regulated in Transcription
  misc_feature: MA Experiment 20001559 PARAMETER Experiment Name: At_Drought_Soil_Dry_P Parameter: Age (day) Value: 28
  misc_feature: MA Experiment 20001559 PARAMETER Experiment Name: At_Drought_Soil_Dry_P Parameter: Organism Value: A. thaliana
  misc_feature: MA Experiment 20001559 PARAMETER Experiment Name: At_Drought_Soil_Dry_P Parameter: Plant Line Value: WS
  misc_feature: MA Experiment 20001559 PARAMETER Experiment Name: At_Drought_Soil_Dry_P Parameter: Post Timepoint (hr) Value: 29
  misc_feature: MA Experiment 20001559 PARAMETER Experiment Name: At_Drought_Soil_Dry_P Parameter: Post-Treatment Value: Re-Water vs. No Drought
  misc_feature: MA Experiment 20001559 PARAMETER Experiment Name: At_Drought_Soil_Dry_P Parameter: Timepoint (day) Value: 14
  misc_feature: MA Experiment 20001559 PARAMETER Experiment Name: At_Drought_Soil_Dry_P Parameter: Treatment Value: Drought vs. No Drought
  misc_feature: MA Experiment ID: 20001560 Result: Down-regulated in Transcription
  misc_feature: MA Experiment 20001560 PARAMETER Experiment Name: At_Drought_Soil_Dry_P Parameter: Age (day) Value: 28
  misc_feature: MA Experiment 20001560 PARAMETER Experiment Name: At_Drought_Soil_Dry_P Parameter: Organism Value: A. thaliana
  misc_feature: MA Experiment 20001560 PARAMETER Experiment Name: At_Drought_Soil_Dry_P Parameter: Plant Line Value: WS
  misc_feature: MA Experiment 20001560 PARAMETER Experiment Name: At_Drought_Soil_Dry_P Parameter: Post Timepoint (hr) Value: None
  misc_feature: MA Experiment 20001560 PARAMETER Experiment Name: At_Drought_Soil_Dry_P Parameter: Post-Treatment Value: None
  misc_feature: MA Experiment 20001560 PARAMETER Experiment Name: At_Drought_Soil_Dry_P Parameter: Timepoint (day) Value: 14
  misc_feature: MA Experiment 20001560 PARAMETER Experiment Name: At_Drought_Soil_Dry_P Parameter: Treatment Value: Drought vs. No Drought
  misc_feature: MA Experiment ID: 20001760 Result: Down-regulated in Transcription
  misc_feature: MA Experiment 20001760 PARAMETER Experiment Name: At_50mM_NH4NO3_L-to-H_P Parameter: Timepoint (hr) Value: 2
  misc_feature: MA Experiment 20001760 PARAMETER Experiment Name: At_50mM_NH4NO3_L-to-H_P Parameter: Tissue Value: Siliques
  misc_feature: MA Experiment 20001760 PARAMETER Experiment Name: At_50mM_NH4NO3_L-to-H_P Parameter: Treatment Value: 50mM NH4NO3 vs 100mM Mannitol
  misc_feature: MA Experiment ID: 20001904 Result: Down-regulated in Transcription
  misc_feature: MA Experiment 20001904 PARAMETER Experiment Name: At_Drought_Reproduction_P Parameter: Age (day) Value: 37
  misc_feature: MA Experiment 20001904 PARAMETER Experiment Name: At_Drought_Reproduction_P Parameter: Organism Value: A. thaliana
  misc_feature: MA Experiment 20001904 PARAMETER Experiment Name: At_Drought_Reproduction_P Parameter: Plant Line Value: WS
  misc_feature: MA Experiment 20001904 PARAMETER Experiment Name: At_Drought_Reproduction_P Parameter: Timepoint (day) Value: 7
  misc_feature: MA Experiment 20001904 PARAMETER Experiment Name: At_Drought_Reproduction_P Parameter: Tissue Value: Rosettes
  misc_feature: MA Experiment 20001904 PARAMETER Experiment Name: At_Drought_Reproduction_P Parameter: Treatment Value: Drought vs. No Drought
  misc_feature: MA Experiment ID: 20001905 Result: Down-regulated in Transcription
  misc_feature: MA Experiment 20001905 PARAMETER Experiment Name: At_Drought_Reproduction_P Parameter: Age (day) Value: 40
  misc_feature: MA Experiment 20001905 PARAMETER Experiment Name: At_Drought_Reproduction_P Parameter: Organism Value: A. thaliana
  misc_feature: MA Experiment 20001905 PARAMETER Experiment Name: At_Drought_Reproduction_P Parameter: Plant Line Value: WS
  misc_feature: MA Experiment 20001905 PARAMETER Experiment Name: At_Drought_Reproduction_P Parameter: Timepoint (day) Value: 10
  misc_feature: MA Experiment 20001905 PARAMETER Experiment Name: At_Drought_Reproduction_P Parameter: Tissue Value: Rosettes
  misc_feature: MA Experiment 20001905 PARAMETER Experiment Name: At_Drought_Reproduction_P Parameter: Treatment Value: Drought vs. No Drought
aaatcgaaccaactaacacaaaagaaaagaaaaaaaaaacagagtatcaaacatgtcaatcttgctctgtttcctctgtcttttacctgttttcttagtttctttatcaatcttgtcaaaaaggctaaaaccctcaaaatggaagcttcctccgggaccaaagacgctcccgatcatcggaaacttacacaacctcacaggtttgcctcacacatgttttcgaaatctctcacaaaagttcggaccagtgatgcttctccacttcggattcgtccccgtagtcgtgatctcatcgaaagaaggagcagaagaagctctcaagacccaagatcttgaatgttgcagccgaccagagactgtagcgacaagaatgatctcttacaacttcaaagacattggattcgctccttacggtgaggaatggaaagcgttgaggaagctcgtggttatggagctcttgaacacgaaaaagtttcagtctttcaggtatataagagaggaagagaatgacttgttgatcaagaaactaaccgaatccgctctgaaaaaatcaccggtgaatctgaagaagacccttttcacgctagtcgcgagtatcgtgtgtaggctcgcgttcggggtgaatatccacaagtgcgagttcgtagacgaggacaacgttgctgatctagttaacaagtttgagatgctagtcgctggtgttgccttcactgatttcttccctggagtgggttggcttgtagaccgaatctcaggtcagaacaagacactaaacaatgttttctcagaacttgacactttcttccaaaacgtgctcgatgatcatattaagcctggaagacaagtatctgagaaccctgacgtcgtagatgtgatgcttgatctaatgaagaagcaagagaaagatggagaatctttcaaactcacaacagatcatctcaaaggaatcatctcggacatatttcttgcaggagtaaacacaagcgccgtcactttgaactgggcgatggccgagctgatcagaaacccgagagtgatgaagaaagtgcaagacgagattaggacaacacttggggacaagaaacagagaatcacagagcaagatctaagccaagttcactacttcaagcttgtggtcaaggagatatttagattacatccagcagctccacttttgcttccaagagagacaatgtctcatgtcaagatccaaggctacgatattcctgtgaaaacacagatgatgatcaacatctactcgatcgcacgtgatccaaaactatggacaaaccctgatgagtttaaccctgacaggtttcttgacagctccatagattacagaggactaaactttgagctgttaccatttggttctggccggagaatctgtcccgggatgacgctgggaatcaccaccgtggaattgggactgttgaatttgctttacttcttcgattgggtagtgcctgtagggaagaatgtgaaggacatcaacttggaagaaacaggatcaatcattattagcaagaagacaacccttgagcttgttccacttgttcatcattgaaatgacgatcatgaaacaattagtccataagattatgtatttgtatccagcttctttatcttgatatggttgtaatcataatctgaatagtgatatcaacacaagtttttgttttttaaacaac

SEQ ID NO: 91650 - protein, 504 aa, Arabidopsis thaliana; identical to SEQ ID NO: 76886
  peptide (1)..(504): Ceres Seq. ID no. 12728564
  misc_feature (33)..(498): Pfam Name: Cytochrome P450 Pfam Description: Cytochrome P450
  misc_feature (1)..(504): Homolog of NCBI NO: 15222182 NR Description: cytochrome p450 family; protein id: At1g13110.1, by cDNA: gi_18087622 [Arabidopsis thaliana]
  misc_feature (1)..(500): Homolog of NCBI NO: 15231526 NR Description: cytochrome P450 family; protein id: At3g26210.1 thaliana] >gi|13878383|sp|Q9LTM0|C72N_ARATH Cytochrome P450 71B23
  misc_feature (1)..(504): Homolog of NCBI NO: 15222177 NR Description: cytochrome p450 family; protein id: At1g13090.1, by cDNA: 35385., supported by cDNA: gi_13272452, supported by gi_17065513 [Arabidopsis thaliana]
  misc_feature (1)..(504): Homolog of NCBI NO: 21618278 NR Description: putative cytochrome P450 monooxygenase
  misc_feature (1)..(504): Homolog of NCBI NO: 15222180 NR Description: cytochrome p450 family; protein id: At1g13100.1
  misc_feature (1)..(504): Homolog of NCBI NO: 15231524 NR Description: cytochrome p450 family; protein id: At3g26190.1 thaliana] >gi|13878385|sp|Q9LTM2|C72L_ARATH Cytochrome P450 71B21
  misc_feature (1)..(503): Homolog of NCBI NO: 15231525 NR Description: cytochrome p450 family; protein id: At3g26200.1, by cDNA: gi_13430717 [Arabidopsis thaliana] Cytochrome P450 71B22 >gi|11994439|dbj|BAB02441.1| cytochrome
  misc_feature (1)..(484): Homolog of NCBI NO: 15231632 NR Description: cytochrome p450 family; protein id: At3g26830.1 thaliana] >gi|13878391|sp|Q9LW27|C72F_ARATH Cytochrome P450 71B15
  misc_feature (5)..(501): Homolog of NCBI NO: 15231520 NR Description: cytochrome p450 family; protein id: At3g26170.1, by cDNA: 262802. [Arabidopsis thaliana] Cytochrome P450 71B19 >gi|11994436|dbj|BAB02438.1| cytochrome
  misc_feature (5)..(501): Homolog of NCBI NO: 21554748 NR Description: cytochrome P450, putative [Arabidopsis thaliana]

SEQ ID NO: 91651 - protein, 438 aa, Arabidopsis thaliana; identical to SEQ ID NO: 76887
  peptide (1)..(438): Ceres Seq. ID no. 12728565
  misc_feature (1)..(432): Pfam Name: Cytochrome P450 Pfam Description: Cytochrome P450
  misc_feature (1)..(438): Homolog of NCBI NO: 15222182 NR Description: cytochrome p450 family; protein id: At1g13110.1, by cDNA: gi_18087622 [Arabidopsis thaliana]
  misc_feature (1)..(434): Homolog of NCBI NO: 15231526 NR Description: cytochrome P450 family; protein id: At3g26210.1 thaliana] >gi|13878383|sp|Q9LTM0|C72N_ARATH Cytochrome P450 71B23
  misc_feature (1)..(438): Homolog of NCBI NO: 15222177 NR Description: cytochrome p450 family; protein id: At1g13090.1, by cDNA: 35385., supported by cDNA: gi_13272452, supported by gi_17065513 [Arabidopsis thaliana]
  misc_feature (1)..(438): Homolog of NCBI NO: 21618278 NR Description: putative cytochrome P450 monooxygenase
  misc_feature (1)..(438): Homolog of NCBI NO: 15222180 NR Description: cytochrome p450 family; protein id: At1g13100.1
  misc_feature (1)..(438): Homolog of NCBI NO: 15231524 NR Description: cytochrome p450 family; protein id: At3g26190.1 thaliana] >gi|13878385|sp|Q9LTM2|C72L_ARATH Cytochrome P450 71B21
  misc_feature (1)..(437): Homolog of NCBI NO: 15231525 NR Description: cytochrome p450 family; protein id: At3g26200.1, by cDNA: gi_13430717 [Arabidopsis thaliana] Cytochrome P450 71B22 >gi|11994439|dbj|BAB02441.1| cytochrome
  misc_feature (1)..(418): Homolog of NCBI NO: 15231632 NR Description: cytochrome p450 family; protein id: At3g26830.1 thaliana] >gi|13878391|sp|Q9LW27|C72F_ARATH Cytochrome P450 71B15
  misc_feature (1)..(435): Homolog of NCBI NO: 15231520 NR Description: cytochrome p450 family; protein id: At3g26170.1, by cDNA: 262802. [Arabidopsis thaliana] Cytochrome P450 71B19 >gi|11994436|dbj|BAB02438.1| cytochrome
  misc_feature (1)..(435): Homolog of NCBI NO: 21554748 NR Description: cytochrome P450, putative [Arabidopsis thaliana]

SEQ ID NO: 91652 - protein, 398 aa, Arabidopsis thaliana
  peptide (1)..(398): Ceres Seq. ID no. 12728566
  misc_feature (1)..(392): Pfam Name: Cytochrome P450 Pfam Description: Cytochrome P450
  misc_feature (1)..(398): Homolog of NCBI NO: 15222182 NR Description: cytochrome p450 family; protein id: At1g13110.1, by cDNA: gi_18087622 [Arabidopsis thaliana]
  misc_feature (1)..(394): Homolog of NCBI NO: 15231526 NR Description: cytochrome P450 family; protein id: At3g26210.1 thaliana] >gi|13878383|sp|Q9LTM0|C72N_ARATH Cytochrome P450 71B23
  misc_feature (1)..(398): Homolog of NCBI NO: 15222177 NR Description: cytochrome p450 family; protein id: At1g13090.1, by cDNA: 35385., supported by cDNA: gi_13272452, supported by gi_17065513 [Arabidopsis thaliana]
  misc_feature (1)..(398): Homolog of NCBI NO: 21618278 NR Description: putative cytochrome P450 monooxygenase
  misc_feature (1)..(398): Homolog of NCBI NO: 15222180 NR Description: cytochrome p450 family; protein id: At1g13100.1
  misc_feature (1)..(398): Homolog of NCBI NO: 15231524 NR Description: cytochrome p450 family; protein id: At3g26190.1 thaliana] >gi|13878385|sp|Q9LTM2|C72L_ARATH Cytochrome P450 71B21
  misc_feature (1)..(397): Homolog of NCBI NO: 15231525 NR Description: cytochrome p450 family; protein id: At3g26200.1, by cDNA: gi_13430717 [Arabidopsis thaliana] Cytochrome P450 71B22 >gi|11994439|dbj|BAB02441.1| cytochrome
  misc_feature (1)..(378): Homolog of NCBI NO: 15231632 NR Description: cytochrome p450 family; protein id: At3g26830.1 thaliana] >gi|13878391|sp|Q9LW27|C72F_ARATH Cytochrome P450 71B15
  misc_feature (1)..(395): Homolog of NCBI NO: 15231520 NR Description: cytochrome p450 family; protein id: At3g26170.1, by cDNA: 262802. [Arabidopsis thaliana] Cytochrome P450 71B19 >gi|11994436|dbj|BAB02438.1| cytochrome
  misc_feature (1)..(395): Homolog of NCBI NO: 21554748 NR Description: cytochrome P450, putative [Arabidopsis thaliana]
MISYNFKDIGFAPYGEEWKALRKLVVMELLNTKKFQSFRYIREEENDLLIKKLTESALKKSPVNLKKTLFTLVASIVCRLAFGVNIHKCEFVDEDNVADLVNKFEMLVAGVAFTDFFPGVGWLVDRISGQNKTLNNVFSELDTFFQNVLDDHIKPGRQVSENPDVVDVMLDLMKKQEKDGESFKLTTDHLKGIISDIFLAGVNTSAVTLNWAMAELIRNPRVMKKVQDEIRTTLGDKKQRITEQDLSQVHYFKLVVKEIFRLHPAAPLLLPRETMSHVKIQGYDIPVKTQMMINIYSIARDPKLWTNPDEFNPDRFLDSSIDYRGLNFELLPFGSGRRICPGMTLGITTVELGLLNLLYFFDWVVPVGKNVKDINLEETGSIIISKKTTLELVPLVHH

SEQ ID NO: 91653 - DNA, 1170 bp, Arabidopsis thaliana
  misc_feature (1)..(1170): Ceres Seq. ID no. 12728599
  misc_feature: MA Experiment ID: 20000180 Result: Down-regulated in Transcription
  misc_feature: MA Experiment 20000180 PARAMETER Experiment Name: At_Germinating_Seeds_P Parameter: Age (hr) Value: 24 vs. 0
  misc_feature: MA Experiment 20000180 PARAMETER Experiment Name: At_Germinating_Seeds_P Parameter: Tissue Value: Germinating Seeds
atggacaaaagagaacgtgaagccttgtactctgcgattcaaggatttgttggtgattcttggaacggatctgctctctatcctgatccttgtggttggactccaattcagggtgtttcttgtgacatctacaatgacctgtggtatgtcacggatttgagtttagggcttatttatgaaaactcgcttccttgctcctcaagtcttcagataagaccagagttatttgagctcaagcatttaagatctctctccttcttcaactgctttatctctcccatggtgatagctaaagaggagttgtggacaaactttgcatctaacttagaatctctcgagtttagatccaatcccggtctcattggggaacttcctgaaacaattggaaatctcacaaagctgaagtctttagtggttctcgaaaatggatttagtggagagctacccgcgagtatctgcaacttaaagagactaaagaggctggttttcgcagggaactcgtttgcgggaatgatcccaaactgtttcaaagggttaaaagagctcttgatcttggatttgagccgcaactctttctcagggacattgcctacatcttttggagatttggtttcattgctcaagcttgacctaagcaataacctcttagaagggaacttacctcaagaactaggatttttgaagaatttgacacttttggacctgaggaacaacagattctctggtgggctgtccaagaatattgaaaatatccaatctctaacggaattagttttatctaacaatccaatgggtgaagaggatatggtgggaacaaattgggggaagatgagcaatttggtagttttggacttatccaaaatgggtttgagaggtgagattcctacaagtctaaccaacctgaagaggttaaggtttcttggtctgaacaacaacaatctaaccggttttgttccatcgaagaagcttgaagctttgccttgccttggtgctttatacatcaatggaaacaacctaacaggtgagcttagattctctacaaagttctatgagaagatgggaagaagatttaaagcttcaaagaatccaaatctgtgtcaacctttagagatggtaatgtcagaatctcataaacatttaagtcctcttggagtgaagccatgcacttaa

SEQ ID NO: 91654 - protein, 389 aa, Arabidopsis thaliana
  peptide (1)..(389): Ceres Seq. ID no. 12728600
  misc_feature (108)..(132): Pfam Name: Leucine Rich Repeat Pfam Description: Leucine Rich Repeat
  misc_feature (1)..(389): Homolog of NCBI NO: 15222215 NR Description: leucine rich repeat protein family; protein id:
  misc_feature (1)..(388): Homolog of NCBI NO: 11994758 NR Description: contains similarity to elicitor-inducible
  misc_feature (1)..(388): Homolog of NCBI NO: 15230865 NR Description: leucine rich repeat protein family; protein id:
  misc_feature (1)..(388): Homolog of NCBI NO: 18409119 NR Description: leucine rich repeat protein family; protein id: supported by cDNA: gi_13605580 [Arabidopsis thaliana]
  misc_feature (1)..(388): Homolog of NCBI NO: 34894182 NR Description: P0439B06.12 [Oryza sativa (japonica
  misc_feature (1)..(365): Homolog of NCBI NO: 7487680 NR Description: hypothetical protein T5F17.10 - Arabidopsis
  misc_feature (1)..(365): Homolog of NCBI NO: 15236148 NR Description: leucine rich repeat protein family (fragment);
  misc_feature (1)..(366): Homolog of NCBI NO: 15228004 NR Description: leucine rich repeat protein family; protein id: [Arabidopsis thaliana] >gi|25408813|pir||D84858 hypothetical
  misc_feature (1)..(373): Homolog of NCBI NO: 34910824 NR Description: putative Hcr2-0B [Oryza sativa (japonica
  misc_feature (5)..(388): Homolog of NCBI NO: 15220050 NR Description: leucine rich repeat protein family; protein id: [Arabidopsis thaliana] >gi|22096215|sp|Q9SSD1|TMM_ARATH TOO MANY protein precursor (TMM) >gi|25406630|pir||C96832
MDKREREALYSAIQGFVGDSWNGSALYPDPCGWTPIQGVSCDIYNDLWYVTDLSLGLIYENSLPCSSSLQIRPELFELKHLRSLSFFNCFISPMVIAKEELWTNFASNLESLEFRSNPGLIGELPETIGNLTKLKSLVVLENGFSGELPASICNLKRLKRLVFAGNSFAGMIPNCFKGLKELLILDLSRNSFSGTLPTSFGDLVSLLKLDLSNNLLEGNLPQELGFLKNLTLLDLRNNRFSGGLSKNIENIQSLTELVLSNNPMGEEDMVGTNWGKMSNLVVLDLSKMGLRGEIPTSLTNLKRLRFLGLNNNNLTGFVPSKKLEALPCLGALYINGNNLTGELRFSTKFYEKMGRRFKASKNPNLCQPLEMVMSESHKHLSPLGVKPCT

SEQ ID NO: 91655 - protein, 296 aa, Arabidopsis thaliana
  peptide (1)..(296): Ceres Seq. ID no. 12728601
  misc_feature (15)..(39): Pfam Name: Leucine Rich Repeat Pfam Description: Leucine Rich Repeat
  misc_feature (1)..(296): Homolog of NCBI NO: 15222215 NR Description: leucine rich repeat protein family; protein id:
  misc_feature (1)..(295): Homolog of NCBI NO: 11994758 NR Description: contains similarity to elicitor-inducible
  misc_feature (1)..(295): Homolog of NCBI NO: 15230865 NR Description: leucine rich repeat protein family; protein id:
  misc_feature (1)..(295): Homolog of NCBI NO: 18409119 NR Description: leucine rich repeat protein family; protein id: supported by cDNA: gi_13605580 [Arabidopsis thaliana]
  misc_feature (1)..(295): Homolog of NCBI NO: 34894182 NR Description: P0439B06.12 [Oryza sativa (japonica
  misc_feature (1)..(272): Homolog of NCBI NO: 7487680 NR Description: hypothetical protein T5F17.10 - Arabidopsis
  misc_feature (1)..(272): Homolog of NCBI NO: 15236148 NR Description: leucine rich repeat protein family (fragment);
  misc_feature (1)..(273): Homolog of NCBI NO: 15228004 NR Description: leucine rich repeat protein family; protein id: [Arabidopsis thaliana] >gi|25408813|pir||D84858 hypothetical
  misc_feature (1)..(280): Homolog of NCBI NO: 34910824 NR Description: putative Hcr2-0B [Oryza sativa (japonica
  misc_feature (1)..(295): Homolog of NCBI NO: 15220050 NR Description: leucine rich repeat protein family; protein id: [Arabidopsis thaliana] >gi|22096215|sp|Q9SSD1|TMM_ARATH TOO MANY protein precursor (TMM) >gi|25406630|pir||C96832
MVIAKEELWTNFASNLESLEFRSNPGLIGELPETIGNLTKLKSLVVLENGFSGELPASICNLKRLKRLVFAGNSFAGMIPNCFKGLKELLILDLSRNSFSGTLPTSFGDLVSLLKLDLSNNLLEGNLPQELGFLKNLTLLDLRNNRFSGGLSKNIENIQSLTELVLSNNPMGEEDMVGTNWGKMSNLVVLDLSKMGLRGEIPTSLTNLKRLRFLGLNNNNLTGFVPSKKLEALPCLGALYINGNNLTGELRFSTKFYEKMGRRFKASKNPNLCQPLEMVMSESHKHLSPLGVKPCT

SEQ ID NO: 91656 - protein, 219 aa, Arabidopsis thaliana
  peptide (1)..(219): Ceres Seq. ID no. 12728602
  misc_feature (1)..(219): Homolog of NCBI NO: 15222215 NR Description: leucine rich repeat protein family; protein id:
  misc_feature (1)..(218): Homolog of NCBI NO: 11994758 NR Description: contains similarity to elicitor-inducible
  misc_feature (1)..(218): Homolog of NCBI NO: 15230865 NR Description: leucine rich repeat protein family; protein id:
  misc_feature (1)..(218): Homolog of NCBI NO: 18409119 NR Description: leucine rich repeat protein family; protein id: supported by cDNA: gi_13605580 [Arabidopsis thaliana]
  misc_feature (1)..(218): Homolog of NCBI NO: 34894182 NR Description: P0439B06.12 [Oryza sativa (japonica
  misc_feature (1)..(195): Homolog of NCBI NO: 7487680 NR Description: hypothetical protein T5F17.10 - Arabidopsis
  misc_feature (1)..(195): Homolog of NCBI NO: 15236148 NR Description: leucine rich repeat protein family (fragment);
  misc_feature (1)..(196): Homolog of NCBI NO: 15228004 NR Description: leucine rich repeat protein family; protein id: [Arabidopsis thaliana] >gi|25408813|pir||D84858 hypothetical
  misc_feature (1)..(203): Homolog of NCBI NO: 34910824 NR Description: putative Hcr2-0B [Oryza sativa (japonica
  misc_feature (1)..(218): Homolog of NCBI NO: 15220050 NR Description: leucine rich repeat protein family; protein id: [Arabidopsis thaliana] >gi|22096215|sp|Q9SSD1|TMM_ARATH TOO MANY protein precursor (TMM) >gi|25406630|pir||C96832
MIPNCFKGLKELLILDLSRNSFSGTLPTSFGDLVSLLKLDLSNNLLEGNLPQELGFLKNLTLLDLRNNRFSGGLSKNIENIQSLTELVLSNNPMGEEDMVGTNWGKMSNLVVLDLSKMGLRGEIPTSLTNLKRLRFLGLNNNNLTGFVPSKKLEALPCLGALYINGNNLTGELRFSTKFYEKMGRRFKASKNPNLCQPLEMVMSESHKHLSPLGVKPCT

SEQ ID NO: 91657 - DNA, 531 bp, Arabidopsis thaliana
  misc_feature (1)..(531): Ceres Seq. ID no. 12728619
  misc_feature: MA Experiment ID: 20000315 Result: Down-regulated in Transcription
  misc_feature: MA Experiment 20000315 PARAMETER Experiment Name: At_14day_Shoots-Roots_Sub_P Parameter: Age (day) Value: 14
  misc_feature: MA Experiment 20000315 PARAMETER Experiment Name: At_14day_Shoots-Roots_Sub_P Parameter: Organism Value: A. thaliana
  misc_feature: MA Experiment 20000315 PARAMETER Experiment Name: At_14day_Shoots-Roots_Sub_P Parameter: Plant Line Value: WS
  misc_feature: MA Experiment 20000315 PARAMETER Experiment Name: At_14day_Shoots-Roots_Sub_P Parameter: Tissue Value: Shoots vs. Whole Plant
  misc_feature: MA Experiment ID: 20000355 Result: Down-regulated in Transcription
  misc_feature: MA Experiment 20000355 PARAMETER Experiment Name: At_Siliques_Sub_P Parameter: Age (day) Value: 21
  misc_feature: MA Experiment 20000355 PARAMETER Experiment Name: At_Siliques_Sub_P Parameter: Organism Value: A. thaliana
  misc_feature: MA Experiment 20000355 PARAMETER Experiment Name: At_Siliques_Sub_P Parameter: Plant Line Value: WS
  misc_feature: MA Experiment 20000355 PARAMETER Experiment Name: At_Siliques_Sub_P Parameter: Tissue Value: Less Than 5mm Siliques vs. Whole Plant
atgatgaacagctgtggaatccaacaaaacgcttttgaagagatgaggagaaacgccgccgtttctgatcggagagacgccgtgatttgtcctaaacctcgtcgtgttggtgctcttaatcaccactcttctcgatctctccgttggcaactcaatcatcagatggaattatgtgaatcgaattcaggaagtgagattttggatttcatcctcacaaagggtggtggtggtggtggtgagcaagatcagacgaggacggtgatgacgccacctctgttctttacagggtcacctccaagtagagtttctaacccattaacaaaagattcgctttttcgagaagagcttctcatggtggcttctccgagtccatcgactccacgagcaaccaaaccgcagccaccgtcttctccaaggaacggtagttgtgttatggcggcgacgagtttcgggaacaatcctgtggttcgtgttgtggggtttgattgtgacagacgcagcagcaacaggagcatttcgactcttgcataa

SEQ ID NO: 91658 - protein, 176 aa, Arabidopsis thaliana
  peptide (1)..(176): Ceres Seq. ID no. 12728620
  misc_feature (1)..(176): Homolog of NCBI NO: 15222278 NR Description: unknown protein; protein id: At1g13390.1 thaliana] >gi|9958074|gb|AAG09563.1|AC011810_22 Unknown protein
  misc_feature (2)..(176): Homolog of NCBI NO: 18409044 NR Description: expressed protein; protein id: At1g68490.1, by cDNA: 37060. [Arabidopsis thaliana] >gi|25404742|pir||A96709
  misc_feature (2)..(176): Homolog of NCBI NO: 11762168 NR Description: AT5g16110 [Arabidopsis thaliana]
  misc_feature (2)..(176): Homolog of NCBI NO: 30685676 NR Description: expressed protein [Arabidopsis thaliana]
  misc_feature (2)..(176): Homolog of NCBI NO: 18396232 NR Description: Expressed protein; protein id: At3g02555.1, by cDNA: 1232. [Arabidopsis thaliana] >gi|21537194|gb|AAM61535.1|
MMNSCGIQQNAFEEMRRNAAVSDRRDAVICPKPRRVGALNHHSSRSLRWQLNHQMELCESNSGSEILDFILTKGGGGGGEQDQTRTVMTPPLFFTGSPPSRVSNPLTKDSLFREELLMVASPSPSTPRATKPQPPSSPRNGSCVMAATSFGNNPVVRVVGFDCDRRSSNRSISTLA

SEQ ID NO: 91659 - protein, 175 aa, Arabidopsis thaliana
  peptide (1)..(175): Ceres Seq. ID no. 12728621
  misc_feature (1)..(175): Homolog of NCBI NO: 15222278 NR Description: unknown protein; protein id: At1g13390.1 thaliana] >gi|9958074|gb|AAG09563.1|AC011810_22 Unknown protein
  misc_feature (1)..(175): Homolog of NCBI NO: 18409044 NR Description: expressed protein; protein id: At1g68490.1, by cDNA: 37060. [Arabidopsis thaliana] >gi|25404742|pir||A96709
  misc_feature (1)..(175): Homolog of NCBI NO: 11762168 NR Description: AT5g16110 [Arabidopsis thaliana]
  misc_feature (1)..(175): Homolog of NCBI NO: 30685676 NR Description: expressed protein [Arabidopsis thaliana]
  misc_feature (1)..(175): Homolog of NCBI NO: 18396232 NR Description: Expressed protein; protein id: At3g02555.1, by cDNA: 1232. [Arabidopsis thaliana] >gi|21537194|gb|AAM61535.1|
MNSCGIQQNAFEEMRRNAAVSDRRDAVICPKPRRVGALNHHSSRSLRWQLNHQMELCESNSGSEILDFILTKGGGGGGEQDQTRTVMTPPLFFTGSPPSRVSNPLTKDSLFREELLMVASPSPSTPRATKPQPPSSPRNGSCVMAATSFGNNPVVRVVGFDCDRRSSNRSISTLA

SEQ ID NO: 91660 - protein, 162 aa, Arabidopsis thaliana
  peptide (1)..(162): Ceres Seq. ID no. 12728622
  misc_feature (1)..(162): Homolog of NCBI NO: 15222278 NR Description: unknown protein; protein id: At1g13390.1 thaliana] >gi|9958074|gb|AAG09563.1|AC011810_22 Unknown protein
  misc_feature (1)..(162): Homolog of NCBI NO: 18409044 NR Description: expressed protein; protein id: At1g68490.1, by cDNA: 37060. [Arabidopsis thaliana] >gi|25404742|pir||A96709
  misc_feature (1)..(162): Homolog of NCBI NO: 11762168 NR Description: AT5g16110 [Arabidopsis thaliana]
  misc_feature (1)..(162): Homolog of NCBI NO: 30685676 NR Description: expressed protein [Arabidopsis thaliana]
  misc_feature (1)..(162): Homolog of NCBI NO: 18396232 NR Description: Expressed protein; protein id: At3g02555.1, by cDNA: 1232. [Arabidopsis thaliana] >gi|21537194|gb|AAM61535.1|
MRRNAAVSDRRDAVICPKPRRVGALNHHSSRSLRWQLNHQMELCESNSGSEILDFILTKGGGGGGEQDQTRTVMTPPLFFTGSPPSRVSNPLTKDSLFREELLMVASPSPSTPRATKPQPPSSPRNGSCVMAATSFGNNPVVRVVGFDCDRRSSNRSISTLA

SEQ ID NO: 91661 - DNA, 1020 bp, Arabidopsis thaliana
  misc_feature (1)..(1020): Ceres Seq. ID no. 12728623
  misc_feature: MA Experiment ID: 20000314 Result: Up-regulated in Transcription
  misc_feature: MA Experiment 20000314 PARAMETER Experiment Name: At_14day_Shoots-Roots_Sub_P Parameter: Age (day) Value: 14
  misc_feature: MA Experiment 20000314 PARAMETER Experiment Name: At_14day_Shoots-Roots_Sub_P Parameter: Organism Value: A. thaliana
  misc_feature: MA Experiment 20000314 PARAMETER Experiment Name: At_14day_Shoots-Roots_Sub_P Parameter: Plant Line Value: WS
  misc_feature: MA Experiment 20000314 PARAMETER Experiment Name: At_14day_Shoots-Roots_Sub_P Parameter: Tissue Value: Roots vs. Whole Plant
  misc_feature: MA Experiment ID: 20000352 Result: Down-regulated in Transcription
  misc_feature: MA Experiment 20000352 PARAMETER Experiment Name: At_Drought_Sub_P Parameter: Age (day) Value: 7
  misc_feature: MA Experiment 20000352 PARAMETER Experiment Name: At_Drought_Sub_P Parameter: Organism Value: A. thaliana
  misc_feature: MA Experiment 20000352 PARAMETER Experiment Name: At_Drought_Sub_P Parameter: Plant Line Value: WS
  misc_feature: MA Experiment 20000352 PARAMETER Experiment Name: At_Drought_Sub_P Parameter: Timepoint (hr) Value: 6
  misc_feature: MA Experiment 20000352 PARAMETER Experiment Name: At_Drought_Sub_P Parameter: Tissue Value: Whole Plant
  misc_feature: MA Experiment 20000352 PARAMETER Experiment Name: At_Drought_Sub_P Parameter: Treatment Value: Drought vs. No Drought
atggatgagaaagatattctaaggaacttgagggaagaagaagaagaagaagaagaaaatcaaagcgaagaaaccaaaattttgatctcttcacttccttgggagatagattaccttgggaacaagcttttcaagtaccaaggatattggtactacgaagacgttctccaatcaatccccaatatacactcgagttttcagccacaagaaaccgatatagttgttgcttctttctacaaatcgggcacgacttggctcaaagcactcacatttgcactcgttcaacgatcaaaacactcgttagaagatcatcatcatcctctgctatctcataaccctcatgagatagtaccgtacctcgagctagatctgtatctcaacagctcaaaaccggacttgaccaagttcttatcatcatcatcatcatcatcatctccgagattgttctcaactcatatgtccttggacgcgcttaaactacccttgaagaagtctccttgcaaggtagtgtacgtgtgcaggaacgtgaaagacgtgttggtgtcactttggtattttagccaaaatgaaaagatcattcgagcggagaattattctttcaaggctatatttgagtcattctgcaacggagttaccctacacggtcccttttgggaccatgcacagagctattggcgaggcagcttggaagatcctaagcattttcttttcatgaggtacgaggagttgaaagcggagcctcgtactcaggtcaagagacttgcagagttcttggattgtccattcactaaggaagaggaagatagcggaactgtagacaagatcttggaactttgctctctaagtaatttaagcagtttggagatcaacaaaactggatccttgggtggagtagattacaagacttatttccgtaaaggacaagttggtgactggaagagttatatgacctctgaaatggtaaataaaatcgatatgatcgtcgaggagaaactcaaaggttccggtttgaaattctag

SEQ ID NO: 91662 - protein, 339 aa, Arabidopsis thaliana
  peptide (1)..(339): Ceres Seq. ID no. 12728624
  misc_feature (70)..(336): Pfam Name: Sulfotransferase domain Pfam Description: Sulfotransferase domain
  misc_feature (1)..(339): Homolog of NCBI NO: 30683286 NR Description: sulfotransferase family [Arabidopsis thaliana] Similar to steroid sulfotransferases [Arabidopsis thaliana]
  misc_feature (1)..(339): Homolog of NCBI NO: 15226028 NR Description: putative steroid sulfotransferase; protein id:
  misc_feature (1)..(338): Homolog of NCBI NO: 15222843 NR Description: steroid sulfotransferase, putative; protein id: supported by cDNA: 150484. [Arabidopsis thaliana]
  misc_feature (1)..(338): Homolog of NCBI NO: 21553545 NR Description: steroid sulfotransferase, putative [Arabidopsis
  misc_feature (18)..(339): Homolog of NCBI NO: 15239947 NR Description: steroid sulfotransferase-like; protein id:
  misc_feature (19)..(339): Homolog of NCBI NO: 15230602 NR Description: sulfotransferase-like protein; protein id:
  misc_feature (1)..(339): Homolog of NCBI NO: 15230603 NR Description: sulfotransferase-like protein; protein id:
  misc_feature (1)..(339): Homolog of NCBI NO: 15217849 NR Description: steroid sulfotransferase, putative; protein id: [Arabidopsis thaliana] >gi|25288810|pir||F86407 probable
  misc_feature (129)..(333): Homolog of NCBI NO: 15236162 NR Description: steroid sulfotransferase - like protein; protein At4g26280.1 [Arabidopsis thaliana] >gi|7434975|pir||T06012
  misc_feature (18)..(117): Homolog of NCBI NO: 15236162 NR Description: steroid sulfotransferase - like protein; protein At4g26280.1 [Arabidopsis thaliana] >gi|7434975|pir||T06012
MDEKDILRNLREEEEEEEENQSEETKILISSLPWEIDYLGNKLFKYQGYWYYEDVLQSIPNIHSSFQPQETDIVVASFYKSGTTWLKALTFALVQRSKHSLEDHHHPLLSHNPHEIVPYLELDLYLNSSKPDLTKFLSSSSSSSSPRLFSTHMSLDALKLPLKKSPCKVVYVCRNVKDVLVSLWYFSQNEKIIRAENYSFKAIFESFCNGVTLHGPFWDHAQSYWRGSLEDPKHFLFMRYEELKAEPRTQVKRLAEFLDCPFTKEEEDSGTVDKILELCSLSNLSSLEINKTGSLGGVDYKTYFRKGQVGDWKSYMTSEMVNKIDMIVEEKLKGSGLKF

SEQ ID NO: 91663 - protein, 187 aa, Arabidopsis thaliana
  peptide (1)..(187): Ceres Seq. ID no. 12728625
  misc_feature (1)..(184): Pfam Name: Sulfotransferase domain Pfam Description: Sulfotransferase domain
  misc_feature (1)..(187): Homolog of NCBI NO: 30683286 NR Description: sulfotransferase family [Arabidopsis thaliana] Similar to steroid sulfotransferases [Arabidopsis thaliana]
  misc_feature (1)..(187): Homolog of NCBI NO: 15226028 NR Description: putative steroid sulfotransferase; protein id:
  misc_feature (1)..(186): Homolog of NCBI NO: 15222843 NR Description: steroid sulfotransferase, putative; protein id: supported by cDNA: 150484. [Arabidopsis thaliana]
  misc_feature (1)..(186): Homolog of NCBI NO: 21553545 NR Description: steroid sulfotransferase, putative [Arabidopsis
  misc_feature (1)..(187): Homolog of NCBI NO: 15239947 NR Description: steroid sulfotransferase-like; protein id:
  misc_feature (1)..(187): Homolog of NCBI NO: 15230602 NR Description: sulfotransferase-like protein; protein id:
  misc_feature (1)..(187): Homolog of NCBI NO: 15230603 NR Description: sulfotransferase-like protein; protein id:
  misc_feature (1)..(187): Homolog of NCBI NO: 15217849 NR Description: steroid sulfotransferase, putative; protein id: [Arabidopsis thaliana] >gi|25288810|pir||F86407 probable
  misc_feature (1)..(181): Homolog of NCBI NO: 15236162 NR Description: steroid sulfotransferase - like protein; protein At4g26280.1 [Arabidopsis thaliana] >gi|7434975|pir||T06012
  misc_feature (1)..(187): Homolog of NCBI NO: 9759556 NR Description: steroid sulfotransferase-like protein
MSLDALKLPLKKSPCKVVYVCRNVKDVLVSLWYFSQNEKIIRAENYSFKAIFESFCNGVTLHGPFWDHAQSYWRGSLEDPKHFLFMRYEELKAEPRTQVKRLAEFLDCPFTKEEEDSGTVDKILELCSLSNLSSLEINKTGSLGGVDYKTYFRKGQVGDWKSYMTSEMVNKIDMIVEEKLKGSGLKF

SEQ ID NO: 91664 - DNA, 615 bp, Arabidopsis thaliana
  misc_feature (1)..(615): Ceres Seq. ID no. 12728700
  misc_feature: MA Experiment ID: 20000171 Result: Up-regulated in Transcription
  misc_feature: MA Experiment 20000171 PARAMETER Experiment Name: At_42deg_Heat_P Parameter: Age (day) Value: 14
  misc_feature: MA Experiment 20000171 PARAMETER Experiment Name: At_42deg_Heat_P Parameter: Organism Value: A. thaliana
  misc_feature: MA Experiment 20000171 PARAMETER Experiment Name: At_42deg_Heat_P Parameter: Plant Line Value: WS
  misc_feature: MA Experiment 20000171 PARAMETER Experiment Name: At_42deg_Heat_P Parameter: Temperature (deg C) Value: 42 vs. 22
  misc_feature: MA Experiment 20000171 PARAMETER Experiment Name: At_42deg_Heat_P Parameter: Timepoint (hr) Value: 1
  misc_feature: MA Experiment 20000171 PARAMETER Experiment Name: At_42deg_Heat_P Parameter: Tissue Value: Aerial
  misc_feature: MA Experiment ID: 20000184 Result: Up-regulated in Transcription
  misc_feature: MA Experiment 20000184 PARAMETER Experiment Name: At_Shoots__P Parameter: Age (day) Value: 7
  misc_feature: MA Experiment 20000184 PARAMETER Experiment Name: At_Shoots__P Parameter: Tissue Value: Shoots vs. Whole Plant
  misc_feature: MA Experiment ID: 20000185 Result: Up-regulated in Transcription
  misc_feature: MA Experiment 20000185 PARAMETER Experiment Name: At_Roots__P Parameter: Age (day) Value: 7 vs. 21
  misc_feature: MA Experiment 20000185 PARAMETER Experiment Name: At_Roots__P Parameter: Organism Value: A. thaliana
  misc_feature: MA Experiment 20000185 PARAMETER Experiment Name: At_Roots__P Parameter: Tissue Value: Roots vs. Whole Plant
  misc_feature: MA Experiment ID: 20000227 Result: Down-regulated in Transcription
  misc_feature: MA Experiment 20000227 PARAMETER Experiment Name: At_Root-Tips-vs-Tops_P Parameter: Tissue Value: Root Tips vs. Root Tops
  misc_feature: MA Experiment ID: 20000269 Result: Up-regulated in Transcription
  misc_feature: MA Experiment 20000269 PARAMETER Experiment Name: At_1mM_KNO3_L-vs-H_Roots_P Parameter: Age (day) Value: 7,10,12
  misc_feature: MA Experiment 20000269 PARAMETER Experiment Name: At_1mM_KNO3_L-vs-H_Roots_P Parameter: Organism Value: A. thaliana
  misc_feature: MA Experiment 20000269 PARAMETER Experiment Name: At_1mM_KNO3_L-vs-H_Roots_P Parameter: Plant Line Value: WS
  misc_feature: MA Experiment 20000269 PARAMETER Experiment Name: At_1mM_KNO3_L-vs-H_Roots_P Parameter: Timepoint (day) Value: 7,10,12
  misc_feature: MA Experiment 20000269 PARAMETER Experiment Name: At_1mM_KNO3_L-vs-H_Roots_P Parameter: Tissue Value: Roots
  misc_feature: MA Experiment 20000269 PARAMETER Experiment Name: At_1mM_KNO3_L-vs-H_Roots_P Parameter: Treatment Value: 1mM KNO3 vs. 50mM KNO3
  misc_feature: MA Experiment ID: 20000439 Result: Up-regulated in Transcription
  misc_feature: MA Experiment 20000439 PARAMETER Experiment Name: At_Roots__P Parameter: Age (day) Value: 14 vs. 21
  misc_feature: MA Experiment 20000439 PARAMETER Experiment Name: At_Roots__P Parameter: Organism Value: A. thaliana
  misc_feature: MA Experiment 20000439 PARAMETER Experiment Name: At_Roots__P Parameter: Tissue Value: Roots vs. Whole Plant
  misc_feature: MA Experiment ID: 20000527 Result: Down-regulated in Transcription
  misc_feature: MA Experiment 20000527 PARAMETER Experiment Name: At_10percent_PEG_P Parameter: Age (day) Value: 20
  misc_feature: MA Experiment 20000527 PARAMETER Experiment Name: At_10percent_PEG_P Parameter: Organism Value: A. thaliana
  misc_feature: MA Experiment 20000527 PARAMETER Experiment Name: At_10percent_PEG_P Parameter: Plant Line Value: WS
  misc_feature: MA Experiment 20000527 PARAMETER Experiment Name: At_10percent_PEG_P Parameter: Timepoint (day) Value: 20
  misc_feature: MA Experiment 20000527 PARAMETER Experiment Name: At_10percent_PEG_P Parameter: Tissue Value: Whole Plant
  misc_feature: MA Experiment 20000527 PARAMETER Experiment Name: At_10percent_PEG_P Parameter: Treatment Value: 10percent PEG vs. No Treatment
atgttttgtctctttgtaatcccatctctctcatctgattctgatcctttacaagacttctgcgttggcgatctcaaagcttctgcttccatcaatggctttccatgcaaatcagccgtttctgcttctgacttcttctactccggtttaggtggccccttagacacgtcaaaccctaacggagtaaccgttgctcccgccaacgtcttaaccttcccgggtctaaacactttaggaatctcgatgaataacgttgagctagctccaggaggtgtaaatccgcctcacttgcacccgcgtgcaaccgaagtaggaactgtgatcgaaggctcggtgtttgtcggattcttgagtaccaacaacactttgttctcaaaagttttgaatgcaggagaggcgtttgttatccctagaggattggttcatttccaatggaacgttggccaagtgaaagcgcgaatgataaccgcttttaacagccagctcccaggagcagttgttttgcctagtactctgttcggctcgaaacctgagattccaaacgcagtcctgaccagagcgtttaggactgatgatacaactgtgcagaatctcaagtccaagtttgctgtttga

SEQ ID NO: 91665 - protein, 204 aa, Arabidopsis thaliana; identical to SEQ ID NO: 44280
  peptide (1)..(204): Ceres Seq. ID no. 12728701
  misc_feature (48)..(196): Pfam Name: Cupin Pfam Description: Cupin
  misc_feature (1)..(204): Homolog of NCBI NO: 18202452 NR Description: Germin-like protein subfamily T member 1 >gi|8778295|gb|AAF79304.1|AC068602_27 F14D16.12 [Arabidopsis
  misc_feature (1)..(204): Homolog of NCBI NO: 18394676 NR Description: germin, putative; protein id: At1g18970.1,
  misc_feature (1)..(204): Homolog of NCBI NO: 15221902 NR Description: germin, putative; protein id: At1g18980.1,
  misc_feature (6)..(202): Homolog of NCBI NO: 25044823 NR Description: germin-like protein [Ananas comosus]
  misc_feature (4)..(202): Homolog of NCBI NO: 15221388 NR Description: germin subunit, putative; protein id: At1g74820.1
  misc_feature (4)..(203): Homolog of NCBI NO: 11967814 NR Description: oxalate oxidase [Lolium perenne]
  misc_feature (8)..(202): Homolog of NCBI NO: 34902528 NR Description: probable germin protein 4 [Oryza sativa (japonica
  misc_feature (4)..(203): Homolog of NCBI NO: 1171937 NR Description: Oxalate oxidase 2 precursor (Germin)
  misc_feature (4)..(203): Homolog of NCBI NO: 21912428 NR Description: oxalate oxidase 2 [Lolium perenne]
  misc_feature (4)..(203): Homolog of NCBI NO: 22138786 NR Description: oxalate oxidase [Lolium perenne]

SEQ ID NO: 91666 - protein, 123 aa, Arabidopsis thaliana
  peptide (1)..(123): Ceres Seq. ID no. 12728702
  misc_feature (1)..(115): Pfam Name: Cupin Pfam Description: Cupin
  misc_feature (1)..(123): Homolog of NCBI NO: 18202452 NR Description: Germin-like protein subfamily T member 1 >gi|8778295|gb|AAF79304.1|AC068602_27 F14D16.12 [Arabidopsis
  misc_feature (1)..(123): Homolog of NCBI NO: 18394676 NR Description: germin, putative; protein id: At1g18970.1,
  misc_feature (1)..(123): Homolog of NCBI NO: 15221902 NR Description: germin, putative; protein id: At1g18980.1,
  misc_feature (1)..(121): Homolog of NCBI NO: 25044823 NR Description: germin-like protein [Ananas comosus]
  misc_feature (1)..(121): Homolog of NCBI NO: 15221388 NR Description: germin subunit, putative; protein id: At1g74820.1
  misc_feature (1)..(122): Homolog of NCBI NO: 11967814 NR Description: oxalate oxidase [Lolium perenne]
  misc_feature (1)..(121): Homolog of NCBI NO: 34902528 NR Description: probable germin protein 4 [Oryza sativa (japonica
  misc_feature (1)..(122): Homolog of NCBI NO: 1171937 NR Description: Oxalate oxidase 2 precursor (Germin)
  misc_feature (1)..(122): Homolog of NCBI NO: 21912428 NR Description: oxalate oxidase 2 [Lolium perenne]
  misc_feature (1)..(122): Homolog of NCBI NO: 22138786 NR Description: oxalate oxidase [Lolium perenne]
MNNVELAPGGVNPPHLHPRATEVGTVIEGSVFVGFLSTNNTLFSKVLNAGEAFVIPRGLVHFQWNVGQVKARMITAFNSQLPGAVVLPSTLFGSKPEIPNAVLTRAFRTDDTTVQNLKSKFAV

SEQ ID NO: 91667 - DNA, 1736 bp, Arabidopsis thaliana
  misc_feature (1)..(1736): Ceres Seq. ID no. 12728711
  misc_feature: MA Experiment ID: 20000184 Result: Down-regulated in Transcription
  misc_feature: MA Experiment 20000184 PARAMETER Experiment Name: At_Shoots__P Parameter: Age (day) Value: 7
  misc_feature: MA Experiment 20000184 PARAMETER Experiment Name: At_Shoots__P Parameter: Tissue Value: Shoots vs. Whole Plant
aaactctcttcaccagcttctgacacagactttgcaactctcatgacggatctttgcttctaattcactatttctcggctagatctgtggcaaaaccagaacctcaatgtttctagttcctcgttaatcgaatcatggtggagaatttgtttccttctcgatttcaatttcatcttcagagacttgacccgaagcgtcgtcttacttctctccttgcttctcacaaaacactcttcacatttctctggatcactgcctttggttccgtctttctatggcagcgaacggcttacatcgaaggcggctctggaactggtcctgtcggaggaaagttcacaattttcggtaagatcaaaccgattcagccaattccccgattgagacctgtggtgtttgatttgaaggattttggaggtgttggagatgggtttacgcttaacactgaagcattcgagagagctgtgatttcaatctctaagcttgggggaagtagcggcggaggtcagctgaatgtgccgcctggacggtggcttacggcgccgtttaatctcactagccatatgactctgtttctcgcagaggattccgagattcttggtgttgaggatgagaagtattggcctttaatgccaccattgccttcatatggttacggtagagagcgtccgggacctcgttatgggagcttaatccatggtcaaaacctcaaagatattgtgataactggtcataatggaacaataaacgggcaaggacaatcgtggtggaagaagcatcaaagaagacttctcaactatacgagagggcctttagttcaaattatgtggtctagtgacatagttatcgctaacattacaatgcgtgactcaccgttctggactctgcatccatatgactgcaaaaatgtaacaataaggaatgtcaccatcttggctcctgtaaccggagcaccaaacactgatggaattgatccagattcgtgcgaggatatggtaattgaggactgttacattagcaccggggatgatgcgatcgcgataaagagtggatgggatcagtttgggattgcatatggacgaccttcaacaaacattcttattcgtaatctcgttgttcgctctgttatcagtgctggtgtatcaatcggaagcgaaatgtctggtggaatatctaatgtgacgatcgagaaccttctgatctggaactcacgccgtggaatcagaattaaaacggctccaggacgaggcggttacatcagaaacataacctacaaaaacctaacactagacaatgttcgggttgggatagtgatcaaaacggattacaacgagcatgcagacgataattatgatcggaaagcatacccgatactttcgggattcagtttcgcgggaatccacggacaaggagtgcgagtgccggtccggatccatggaagcgaacagattccggtaaggaatgtgacgtttcgggacatgtccgttgggttaacgtacaagaagaaacatatattccaatgttcgttcgtgaaaggacgagtgttcggttcgatatttcctcgaccttgcgagaattttgatgtttacgacgaggaaggtcgtctggttaagcctgcagctgagtccaatgtggcggacattgactacgacatttgaatgttttttcagttcattgtcatttgtgtacataaaagtaaattttgggacacaaaaatgaaaattatttttctttggacc

SEQ ID NO: 91668 - protein, 506 aa, Arabidopsis thaliana
  peptide (1)..(506): Ceres Seq. ID no. 12728712
  misc_feature (121)..(478): Pfam Name: Glycosyl hydrolases family 28 Pfam Description: Glycosyl hydrolases family 28
  misc_feature (1)..(506): Homolog of NCBI NO: 15221958 NR Description: polygalacturonase, putative; protein id:
  misc_feature (1)..(506): Homolog of NCBI NO: 19698861 NR Description: unknown protein [Arabidopsis thaliana]
  misc_feature (157)..(506): Homolog of NCBI NO: 25518077 NR Description: T29M8.4 protein - Arabidopsis thaliana
  misc_feature (1)..(158): Homolog of NCBI NO: 25518077 NR Description: T29M8.4 protein - Arabidopsis thaliana
  misc_feature (27)..(506): Homolog of NCBI NO: 15229188 NR Description: polygalacturonase, putative; protein id: supported by cDNA: gi_15215708 [Arabidopsis thaliana]
  misc_feature (27)..(506): Homolog of NCBI NO: 23506093 NR Description: At3g42950/F18P9_110 [Arabidopsis thaliana]
  misc_feature (78)..(478): Homolog of NCBI NO: 22329119 NR Description: polygalacturonase, putative; protein id: [Arabidopsis thaliana] >gi|27754320|gb|AAO22613.1| putative [Arabidopsis thaliana] >gi|28393881|gb|AAO42348.1| putative
  misc_feature (83)..(479): Homolog of NCBI NO: 40714685 NR Description: putative polygalacturonase [Oryza sativa
  misc_feature (80)..(479): Homolog of NCBI NO: 34897760 NR Description: ESTs AU029388(E30287),D49277(S16474) correspond a region of the predicted gene.~Similar to Arabidopsis thaliana
  misc_feature (83)..(467): Homolog of NCBI NO: 18412253 NR Description: polygalacturonase, putative; protein id: supported by cDNA: gi_13358184 [Arabidopsis thaliana] AT3g62110 [Arabidopsis thaliana] >gi|23397166|gb|AAN31866.1|
MVENLFPSRFQFHLQRLDPKRRLTSLLASHKTLFTFLWITAFGSVFLWQRTAYIEGGSGTGPVGGKFTIFGKIKPIQPIPRLRPVVFDLKDFGGVGDGFTLNTEAFERAVISISKLGGSSGGGQLNVPPGRWLTAPFNLTSHMTLFLAEDSEILGVEDEKYWPLMPPLPSYGYGRERPGPRYGSLIHGQNLKDIVITGHNGTINGQGQSWWKKHQRRLLNYTRGPLVQIMWSSDIVIANITMRDSPFWTLHPYDCKNVTIRNVTILAPVTGAPNTDGIDPDSCEDMVIEDCYISTGDDAIAIKSGWDQFGIAYGRPSTNILIRNLVVRSVISAGVSIGSEMSGGISNVTIENLLIWNSRRGIRIKTAPGRGGYIRNITYKNLTLDNVRVGIVIKTDYNEHADDNYDRKAYPILSGFSFAGIHGQGVRVPVRIHGSEQIPVRNVTFRDMSVGLTYKKKHIFQCSFVKGRVFGSIFPRPCENFDVYDEEGRLVKPAAESNVADIDYDI

SEQ ID NO: 91669 - protein, 364 aa, Arabidopsis thaliana
  peptide (1)..(364): Ceres Seq. ID no. 12728713
  misc_feature (1)..(336): Pfam Name: Glycosyl hydrolases family 28 Pfam Description: Glycosyl hydrolases family 28
  misc_feature (1)..(364): Homolog of NCBI NO: 15221958 NR Description: polygalacturonase, putative; protein id:
  misc_feature (1)..(364): Homolog of NCBI NO: 19698861 NR Description: unknown protein [Arabidopsis thaliana]
  misc_feature (15)..(364): Homolog of NCBI NO: 25518077 NR Description: T29M8.4 protein - Arabidopsis thaliana
  misc_feature (1)..(16): Homolog of NCBI NO: 25518077 NR Description: T29M8.4 protein - Arabidopsis thaliana
  misc_feature (1)..(364): Homolog of NCBI NO: 15229188 NR Description: polygalacturonase, putative; protein id: supported by cDNA: gi_15215708 [Arabidopsis thaliana]
  misc_feature (1)..(364): Homolog of NCBI NO: 23506093 NR Description: At3g42950/F18P9_110 [Arabidopsis thaliana]
  misc_feature (1)..(336): Homolog of NCBI NO: 22329119 NR Description: polygalacturonase, putative; protein id: [Arabidopsis thaliana] >gi|27754320|gb|AAO22613.1| putative [Arabidopsis thaliana] >gi|28393881|gb|AAO42348.1| putative
  misc_feature (1)..(337): Homolog of NCBI NO: 40714685 NR Description: putative polygalacturonase [Oryza sativa
  misc_feature (1)..(337): Homolog of NCBI NO: 34897760 NR Description: ESTs AU029388(E30287),D49277(S16474) correspond a region of the predicted gene.~Similar to Arabidopsis thaliana
  misc_feature (1)..(325): Homolog of NCBI NO: 18412253 NR Description: polygalacturonase, putative; protein id: supported by cDNA: gi_13358184 [Arabidopsis thaliana] AT3g62110 [Arabidopsis thaliana] >gi|23397166|gb|AAN31866.1|
MTLFLAEDSEILGVEDEKYWPLMPPLPSYGYGRERPGPRYGSLIHGQNLKDIVITGHNGTINGQGQSWWKKHQRRLLNYTRGPLVQIMWSSDIVIANITMRDSPFWTLHPYDCKNVTIRNVTILAPVTGAPNTDGIDPDSCEDMVIEDCYISTGDDAIAIKSGWDQFGIAYGRPSTNILIRNLVVRSVISAGVSIGSEMSGGISNVTIENLLIWNSRRGIRIKTAPGRGGYIRNITYKNLTLDNVRVGIVIKTDYNEHADDNYDRKAYPILSGFSFAGIHGQGVRVPVRIHGSEQIPVRNVTFRDMSVGLTYKKKHIFQCSFVKGRVFGSIFPRPCENFDVYDEEGRLVKPAAESNVADIDYDI

SEQ ID NO: 91670 - protein, 342 aa, Arabidopsis thaliana; identical to SEQ ID NO: 79534
  peptide (1)..(342): Ceres Seq. ID no. 12728714
  misc_feature (1)..(314): Pfam Name: Glycosyl hydrolases family 28 Pfam Description: Glycosyl hydrolases family 28
  misc_feature (1)..(342): Homolog of NCBI NO: 15221958 NR Description: polygalacturonase, putative; protein id:
  misc_feature (1)..(342): Homolog of NCBI NO: 19698861 NR Description: unknown protein [Arabidopsis thaliana]
  misc_feature (1)..(342): Homolog of NCBI NO: 25518077 NR Description: T29M8.4 protein - Arabidopsis thaliana
  misc_feature (1)..(342): Homolog of NCBI NO: 15229188 NR Description: polygalacturonase, putative; protein id: supported by cDNA: gi_15215708 [Arabidopsis thaliana]
  misc_feature (1)..(342): Homolog of NCBI NO: 23506093 NR Description: At3g42950/F18P9_110 [Arabidopsis thaliana]
  misc_feature (1)..(314): Homolog of NCBI NO: 22329119 NR Description: polygalacturonase, putative; protein id: [Arabidopsis thaliana] >gi|27754320|gb|AAO22613.1| putative [Arabidopsis thaliana] >gi|28393881|gb|AAO42348.1| putative
  misc_feature (1)..(315): Homolog of NCBI NO: 40714685 NR Description: putative polygalacturonase [Oryza sativa
  misc_feature (1)..(315): Homolog of NCBI NO: 34897760 NR Description: ESTs AU029388(E30287),D49277(S16474) correspond a region of the predicted gene.~Similar to Arabidopsis thaliana
  misc_feature (1)..(303): Homolog of NCBI NO: 18412253 NR Description: polygalacturonase, putative; protein id: supported by cDNA: gi_13358184 [Arabidopsis thaliana] AT3g62110 [Arabidopsis thaliana] >gi|23397166|gb|AAN31866.1|
  misc_feature (1)..(314): Homolog of NCBI NO: 34912726 NR Description: putative polygalacturonase [Oryza sativa cultivar- group)] >gi|15623906|dbj|BAB67963.1| putative

SEQ ID NO: 91671 - DNA, 537 bp, Arabidopsis thaliana
  misc_feature (1)..(537): Ceres Seq. ID no. 12728715
  misc_feature: MA Experiment ID: 20000184 Result: Down-regulated in Transcription
  misc_feature: MA Experiment 20000184 PARAMETER Experiment Name: At_Shoots__P Parameter: Age (day) Value: 7
  misc_feature: MA Experiment 20000184 PARAMETER Experiment Name: At_Shoots__P Parameter: Tissue Value: Shoots vs. Whole Plant
  misc_feature: MA Experiment ID: 20000264 Result: Down-regulated in Transcription
  misc_feature: MA Experiment 20000264 PARAMETER Experiment Name: At_Open_Flower_P Parameter: Age (day) Value: 21
  misc_feature: MA Experiment 20000264 PARAMETER Experiment Name: At_Open_Flower_P Parameter: Plant Line Value: WS
  misc_feature: MA Experiment 20000264 PARAMETER Experiment Name: At_Open_Flower_P Parameter: Tissue Value: Open Flower vs. Whole Plant
  misc_feature: MA Experiment ID: 20000265 Result: Down-regulated in Transcription
  misc_feature: MA Experiment 20000265 PARAMETER Experiment Name: At_Open_Flower_P Parameter: Age (day) Value: 21
  misc_feature: MA Experiment 20000265 PARAMETER Experiment Name: At_Open_Flower_P Parameter: Plant Line Value: WS
  misc_feature: MA Experiment 20000265 PARAMETER Experiment Name: At_Open_Flower_P Parameter: Tissue Value: Closed Flower vs. Whole Plant
  misc_feature: MA Experiment ID: 20000267 Result: Up-regulated in Transcription
  misc_feature: MA Experiment 20000267 PARAMETER Experiment Name: At_Drought_P Parameter: Age (day) Value: 7
  misc_feature: MA Experiment 20000267 PARAMETER Experiment Name: At_Drought_P Parameter: Organism Value: A. thaliana
  misc_feature: MA Experiment 20000267 PARAMETER Experiment Name: At_Drought_P Parameter: Plant Line Value: WS
  misc_feature: MA Experiment 20000267 PARAMETER Experiment Name: At_Drought_P Parameter: Timepoint (hr) Value: 6
  misc_feature: MA Experiment 20000267 PARAMETER Experiment Name: At_Drought_P Parameter: Tissue Value: Whole Plant
  misc_feature: MA Experiment 20000267 PARAMETER Experiment Name: At_Drought_P Parameter: Treatment Value: Drought vs. No Drought
  misc_feature: MA Experiment ID: 20000286 Result: Down-regulated in Transcription
  misc_feature: MA Experiment 20000286 PARAMETER Experiment Name: At_Open_Flower_P Parameter: Age (day) Value: 21
  misc_feature: MA Experiment 20000286 PARAMETER Experiment Name: At_Open_Flower_P Parameter: Plant Line Value: WS
  misc_feature: MA Experiment 20000286 PARAMETER Experiment Name: At_Open_Flower_P Parameter: Tissue Value: Half Open vs. Whole Plant
  misc_feature: MA Experiment ID: 20000527 Result: Up-regulated in Transcription
  misc_feature: MA Experiment 20000527 PARAMETER Experiment Name: At_10percent_PEG_P Parameter: Age (day) Value: 20
  misc_feature: MA Experiment 20000527 PARAMETER Experiment Name: At_10percent_PEG_P Parameter: Organism Value: A. thaliana
  misc_feature: MA Experiment 20000527 PARAMETER Experiment Name: At_10percent_PEG_P Parameter: Plant Line Value: WS
  misc_feature: MA Experiment 20000527 PARAMETER Experiment Name: At_10percent_PEG_P Parameter: Timepoint (day) Value: 20
  misc_feature: MA Experiment 20000527 PARAMETER Experiment Name: At_10percent_PEG_P Parameter: Tissue Value: Whole Plant
  misc_feature: MA Experiment 20000527 PARAMETER Experiment Name: At_10percent_PEG_P Parameter: Treatment Value: 10percent PEG vs. No Treatment
  misc_feature: MA Experiment ID: 20001773 Result: Down-regulated in Transcription
  misc_feature: MA Experiment 20001773 PARAMETER Experiment Name: At_Far-red-enriched-adult_P Parameter: Age (day) Value: 30
  misc_feature: MA Experiment 20001773 PARAMETER Experiment Name: At_Far-red-enriched-adult_P Parameter: Light Value: Far-red enriched vs. White
  misc_feature: MA Experiment 20001773 PARAMETER Experiment Name: At_Far-red-enriched-adult_P Parameter: Organism Value: A. thaliana
  misc_feature: MA Experiment 20001773 PARAMETER Experiment Name: At_Far-red-enriched-adult_P Parameter: Plant Line Value: Columbia
  misc_feature: MA Experiment 20001773 PARAMETER Experiment Name: At_Far-red-enriched-adult_P Parameter: Timepoint (hr) Value: 48
  misc_feature: MA Experiment 20001773 PARAMETER Experiment Name: At_Far-red-enriched-adult_P Parameter: Tissue Value: Aerial
atgcagtcaaagtacaaaggagtgaggaagaggaaatggggaaaatgggtttcagagatcagacttcccaacagcagagaacgtatttggttgggctcttacgatactcctgagaaggcggcgcgtgctttcgacgcggctctttattgtctccgtggcaacaacgcaaagttcaatttccctgataatcctccggtgatctccggcggacgtaacttgtcgcgatctgagataagagaagctgctgcgaggttcgctaattcggcggaggatgattcaagtggcggagcaggatacgagatacggcaagaatctgcttcaacatcgatggacgttgattcggagtttttgagtatgcttccgacggttggttcgggtaacttcgcttcggagtttgggttattccctgggtttgatgatttctccgatgaatactccggtgatcgtttcagagagcagctttcgcctacacaagattattatcagcttggagaagagacttacgccgatggttccatgtttctttggaatttttga

SEQ ID NO: 91672 - protein, 178 aa, Arabidopsis thaliana
  peptide (1)..(178): Ceres Seq. ID no. 12728716
  misc_feature (2)..(66): Pfam Name: AP2 domain Pfam Description: AP2 domain
  misc_feature (1)..(178): Homolog of NCBI NO: 22329667 NR Description: AP2 domain transcription factor, putative; id: At1g19210.1, supported by cDNA: gi_12083251 [Arabidopsis
  misc_feature (1)..(178): Homolog of NCBI NO: 29893536 NR Description: putative AP2 domain transcription factor
  misc_feature (1)..(178): Homolog of NCBI NO: 15222040 NR Description: AP2 domain containing protein, putative; protein At1g74930.1 [Arabidopsis thaliana] >gi|25352178|pir||A96779
  misc_feature (4)..(90): Homolog of NCBI NO: 22326940 NR Description: similar to AP2 domain transcription factor, protein id: At5g21960.1 [Arabidopsis thaliana] putative protein [Arabidopsis thaliana]
  misc_feature (5)..(88): Homolog of NCBI NO: 18417729 NR Description: AP2-domain transcription factor, putative;
  misc_feature (7)..(88): Homolog of NCBI NO: 25407707 NR Description: hypothetical protein AT4g31060 [imported] - thaliana >gi|2980760|emb|CAA18187.1| putative protein thaliana] >gi|7270008|emb|CAB79824.1| putative protein
  misc_feature (4)..(178): Homolog of NCBI NO: 15219452 NR Description: transcription factor, putative; protein id: [Arabidopsis thaliana] >gi|25352175|pir||D96507 hypothetical
  misc_feature (5)..(98): Homolog of NCBI NO: 15234561 NR Description: AP2 domain protein RAP2.10; protein id:
  misc_feature (5)..(98): Homolog of NCBI NO: 25456718 NR Description: TINY-like protein [imported] - Arabidopsis (fragment) >gi|2281645|gb|AAC49776.1| AP2 domain containing
  misc_feature (4)..(91): Homolog of NCBI NO: 15224024 NR Description: hypothetical protein; protein id: At1g77640.1
MQSKYKGVRKRKWGKWVSEIRLPNSRERIWLGSYDTPEKAARAFDAALYCLRGNNAKFNFPDNPPVISGGRNLSRSEIREAAARFANSAEDDSSGGAGYEIRQESASTSMDVDSEFLSMLPTVGSGNFASEFGLFPGFDDFSDEYSGDRFREQLSPTQDYYQLGEETYADGSMFLWNF

SEQ ID NO: 91673 - DNA, 819 bp, Arabidopsis thaliana
  misc_feature (1)..(819): Ceres Seq. ID no. 12728717
  misc_feature: MA Experiment ID: 108461 Result: Up-regulated in Transcription
  misc_feature: MA Experiment 108461 PARAMETER Experiment Name: At_Germinating_Seeds_cDNA_P Parameter: Age (day) Value: 1 vs. 0
  misc_feature: MA Experiment 108461 PARAMETER Experiment Name: At_Germinating_Seeds_cDNA_P Parameter: Tissue Value: Germinating Seeds
  misc_feature: MA Experiment ID: 108462 Result: Up-regulated in Transcription
  misc_feature: MA Experiment 108462 PARAMETER Experiment Name: At_Germinating_Seeds_cDNA_P Parameter: Age (day) Value: 2 vs. 0
  misc_feature: MA Experiment 108462 PARAMETER Experiment Name: At_Germinating_Seeds_cDNA_P Parameter: Tissue Value: Germinating Seeds
  misc_feature: MA Experiment ID: 108463 Result: Up-regulated in Transcription
  misc_feature: MA Experiment 108463 PARAMETER Experiment Name: At_Germinating_Seeds_cDNA_P Parameter: Age (day) Value: 3 vs. 0
  misc_feature: MA Experiment 108463 PARAMETER Experiment Name: At_Germinating_Seeds_cDNA_P Parameter: Tissue Value: Germinating Seeds
  misc_feature: MA Experiment ID: 20000180 Result: Up-regulated in Transcription
  misc_feature: MA Experiment 20000180 PARAMETER Experiment Name: At_Germinating_Seeds_P Parameter: Age (hr) Value: 24 vs. 0
  misc_feature: MA Experiment 20000180 PARAMETER Experiment Name: At_Germinating_Seeds_P Parameter: Tissue Value: Germinating Seeds
  misc_feature: MA Experiment ID: 20000185 Result: Up-regulated in Transcription
  misc_feature: MA Experiment 20000185 PARAMETER Experiment Name: At_Roots__P Parameter: Age (day) Value: 7 vs. 21
  misc_feature: MA Experiment 20000185 PARAMETER Experiment Name: At_Roots__P Parameter: Organism Value: A. thaliana
  misc_feature: MA Experiment 20000185 PARAMETER Experiment Name: At_Roots__P Parameter: Tissue Value: Roots vs. Whole Plant
  misc_feature: MA Experiment ID: 20000227 Result: Up-regulated in Transcription
  misc_feature: MA Experiment 20000227 PARAMETER Experiment Name: At_Root-Tips-vs-Tops_P Parameter: Tissue Value: Root Tips vs. Root Tops
  misc_feature: MA Experiment ID: 20000264 Result: Up-regulated in Transcription
  misc_feature: MA Experiment 20000264 PARAMETER Experiment Name: At_Open_Flower_P Parameter: Age (day) Value: 21
  misc_feature: MA Experiment 20000264 PARAMETER Experiment Name: At_Open_Flower_P Parameter: Plant Line Value: WS
  misc_feature: MA Experiment 20000264 PARAMETER Experiment Name: At_Open_Flower_P Parameter: Tissue Value: Open Flower vs. Whole Plant
  misc_feature: MA Experiment ID: 20000265 Result: Up-regulated in Transcription
  misc_feature: MA Experiment 20000265 PARAMETER Experiment Name: At_Open_Flower_P Parameter: Age (day) Value: 21
  misc_feature: MA Experiment 20000265 PARAMETER Experiment Name: At_Open_Flower_P Parameter: Plant Line Value: WS
  misc_feature: MA Experiment 20000265 PARAMETER Experiment Name: At_Open_Flower_P Parameter: Tissue Value: Closed Flower vs. Whole Plant
  misc_feature: MA Experiment ID: 20000286 Result: Up-regulated in Transcription
  misc_feature: MA Experiment 20000286 PARAMETER Experiment Name: At_Open_Flower_P Parameter: Age (day) Value: 21
  misc_feature: MA Experiment 20000286 PARAMETER Experiment Name: At_Open_Flower_P Parameter: Plant Line Value: WS
  misc_feature: MA Experiment 20000286 PARAMETER Experiment Name: At_Open_Flower_P Parameter: Tissue Value: Half Open vs. Whole Plant
  misc_feature: MA Experiment ID: 20000439 Result: Up-regulated in Transcription
  misc_feature: MA Experiment 20000439 PARAMETER Experiment Name: At_Roots__P Parameter: Age (day) Value: 14 vs. 21
  misc_feature: MA Experiment 20000439 PARAMETER Experiment Name: At_Roots__P Parameter: Organism Value: A. thaliana
  misc_feature: MA Experiment 20000439 PARAMETER Experiment Name: At_Roots__P Parameter: Tissue Value: Roots vs. Whole Plant
gagaagggagaaaactttctccgagctcgattgtttttggaaatcgtcaatcagatatttctcgttcgtctccgccttcgatttatccaaaggctcttgttattgaaaatggcagattccaccaaagcagggttgaagaagccagctttcactaaggttgatcagctgcgtcctgggactagcggacacaatgtcaatgtgaagattgtcagcacgaaaatggtgttacagaaaggtcgtgctgatggtcctcaagctcgccagttgcggatttctgaatgcattgttggtgacgagacaggagtgatcgtctttaccgcaagaaatgaccaagtggacttaatgaaagagggatcaactgtaactctacgcaatgcgaaaatcgacatgtataaaggatcaatgaggctagctgtagacaagtggggtcgtgttgaagtcacagagcctgcgagcttcaaagtgaaagaagacaccaacatgtcccttatcgagtatgagctcgtaaacgtcgttgaatgagtgacaaattcctcgaaataccactaggagaaacgccctcaagaataaacaagtcaaatccgtaaccgtttatgttagcgtcaagaaaagagttaaaccctgatcagctgatgtcttgcactaagctatgtaagagtgatgatggctctaaaagttgaatgcagagcttttggcttaggttatgacttcgtgataccttttcttttgtaatgtcatcatacacgctaaggcttttgtgctacattattactctctttgtctttgcctcgtttcaaaaaatccatattcttagtgaag

SEQ ID NO: 91674 - protein, 173 aa, Arabidopsis thaliana; identical to SEQ ID NO: 29808
  peptide (1)..(173): Ceres Seq. ID no. 12728718
  misc_feature (88)..(143): Pfam Name: OB-fold nucleic acid binding domain Pfam Description: OB-fold nucleic acid binding domain
  misc_feature (37)..(173): Homolog of NCBI NO: 18395285 NR Description: expressed protein; protein id: At1g23750.1, by cDNA: 15450. [Arabidopsis thaliana] >gi|25341929|pir||F86371
  misc_feature (33)..(171): Homolog of NCBI NO: 30681801 NR Description: expressed protein [Arabidopsis thaliana]
  misc_feature (37)..(171): Homolog of NCBI NO: 18391179 NR Description: expressed protein; protein id: At1g10590.1, by cDNA: 7488., supported by cDNA: gi_14335099, supported by gi_15027864 [Arabidopsis thaliana] >gi|14335100|gb|AAK59829.1|
  misc_feature (33)..(111): Homolog of NCBI NO: 6573753 NR Description: F20B24.1 [Arabidopsis thaliana]
  misc_feature (112)..(171): Homolog of NCBI NO: 6573753 NR Description: F20B24.1 [Arabidopsis thaliana]
  misc_feature (37)..(171): Homolog of NCBI NO: 34909622 NR Description: P0435B05.31 [Oryza sativa (japonica
  misc_feature (46)..(173): Homolog of NCBI NO: 18403397 NR Description: Expressed protein; protein id: At2g33845.1, by cDNA: 32001. [Arabidopsis thaliana] Expressed protein [Arabidopsis thaliana]
  misc_feature (38)..(173): Homolog of NCBI NO: 34904470 NR Description: OSJNBa0086P08.14 [Oryza sativa (japonica
  misc_feature (45)..(173): Homolog of NCBI NO: 24413970 NR Description: contains EST AU181579(C50456)~similar to Oryza
  misc_feature (37)..(171): Homolog of NCBI NO: 15235304 NR Description: putative protein; protein id: At4g28440.1, by cDNA: 41008., supported by cDNA: gi_15292942, supported by gi_15912308, supported by cDNA: gi_20259656 [Arabidopsis

SEQ ID NO: 91675 - protein, 137 aa, Arabidopsis thaliana; identical to SEQ ID NO: 29809
  peptide (1)..(137): Ceres Seq. ID no. 12728719
  misc_feature (52)..(107): Pfam Name: OB-fold nucleic acid binding domain Pfam Description: OB-fold nucleic acid binding domain
  misc_feature (1)..(137): Homolog of NCBI NO: 18395285 NR Description: expressed protein; protein id: At1g23750.1, by cDNA: 15450. [Arabidopsis thaliana] >gi|25341929|pir||F86371
  misc_feature (1)..(135): Homolog of NCBI NO: 30681801 NR Description: expressed protein [Arabidopsis thaliana]
  misc_feature (1)..(135): Homolog of NCBI NO: 18391179 NR Description: expressed protein; protein id: At1g10590.1, by cDNA: 7488., supported by cDNA: gi_14335099, supported by gi_15027864 [Arabidopsis thaliana] >gi|14335100|gb|AAK59829.1|
  misc_feature (1)..(75): Homolog of NCBI NO: 6573753 NR Description: F20B24.1 [Arabidopsis thaliana]
  misc_feature (76)..(135): Homolog of NCBI NO: 6573753 NR Description: F20B24.1 [Arabidopsis thaliana]
  misc_feature (1)..(135): Homolog of NCBI NO: 34909622 NR Description: P0435B05.31 [Oryza sativa (japonica
  misc_feature (10)..(137): Homolog of NCBI NO: 18403397 NR Description: Expressed protein; protein id: At2g33845.1, by cDNA: 32001. [Arabidopsis thaliana] Expressed protein [Arabidopsis thaliana]
  misc_feature (2)..(137): Homolog of NCBI NO: 34904470 NR Description: OSJNBa0086P08.14 [Oryza sativa (japonica
  misc_feature (9)..(137): Homolog of NCBI NO: 24413970 NR Description: contains EST AU181579(C50456)~similar to Oryza
  misc_feature (1)..(135): Homolog of NCBI NO: 15235304 NR Description: putative protein; protein id: At4g28440.1, by cDNA: 41008., supported by cDNA: gi_15292942, supported by gi_15912308, supported by cDNA: gi_20259656 [Arabidopsis

SEQ ID NO: 91676 - protein, 100 aa, Arabidopsis thaliana; identical to SEQ ID NO: 29810
  peptide (1)..(100): Ceres Seq. ID no. 12728720
  misc_feature (15)..(70): Pfam Name: OB-fold nucleic acid binding domain Pfam Description: OB-fold nucleic acid binding domain
  misc_feature (1)..(100): Homolog of NCBI NO: 18395285 NR Description: expressed protein; protein id: At1g23750.1, by cDNA: 15450. [Arabidopsis thaliana] >gi|25341929|pir||F86371
  misc_feature (1)..(98): Homolog of NCBI NO: 30681801 NR Description: expressed protein [Arabidopsis thaliana]
  misc_feature (1)..(98): Homolog of NCBI NO: 18391179 NR Description: expressed protein; protein id: At1g10590.1, by cDNA: 7488., supported by cDNA: gi_14335099, supported by gi_15027864 [Arabidopsis thaliana] >gi|14335100|gb|AAK59829.1|
  misc_feature (1)..(38): Homolog of NCBI NO: 6573753 NR Description: F20B24.1 [Arabidopsis thaliana]
  misc_feature (39)..(98): Homolog of NCBI NO: 6573753 NR Description: F20B24.1 [Arabidopsis thaliana]
  misc_feature (1)..(98): Homolog of NCBI NO: 34909622 NR Description: P0435B05.31 [Oryza sativa (japonica
  misc_feature (1)..(100): Homolog of NCBI NO: 18403397 NR Description: Expressed protein; protein id: At2g33845.1, by cDNA: 32001. [Arabidopsis thaliana] Expressed protein [Arabidopsis thaliana]
  misc_feature (1)..(100): Homolog of NCBI NO: 34904470 NR Description: OSJNBa0086P08.14 [Oryza sativa (japonica
  misc_feature (1)..(100): Homolog of NCBI NO: 24413970 NR Description: contains EST AU181579(C50456)~similar to Oryza
  misc_feature (1)..(98): Homolog of NCBI NO: 15235304 NR Description: putative protein; protein id: At4g28440.1, by cDNA: 41008., supported by cDNA: gi_15292942, supported by gi_15912308, supported by cDNA: gi_20259656 [Arabidopsis

SEQ ID NO: 91677 - DNA, 1360 bp, Arabidopsis thaliana
  misc_feature (1)..(1360): Ceres Seq. ID no. 12728755
  misc_feature: MA Experiment ID: 108462 Result: Up-regulated in Transcription
  misc_feature: MA Experiment 108462 PARAMETER Experiment Name: At_Germinating_Seeds_cDNA_P Parameter: Age (day) Value: 2 vs. 0
  misc_feature: MA Experiment 108462 PARAMETER Experiment Name: At_Germinating_Seeds_cDNA_P Parameter: Tissue Value: Germinating Seeds
  misc_feature: MA Experiment ID: 108463 Result: Up-regulated in Transcription
  misc_feature: MA Experiment 108463 PARAMETER Experiment Name: At_Germinating_Seeds_cDNA_P Parameter: Age (day) Value: 3 vs. 0
  misc_feature: MA Experiment 108463 PARAMETER Experiment Name: At_Germinating_Seeds_cDNA_P Parameter: Tissue Value: Germinating Seeds
  misc_feature: MA Experiment ID: 108464 Result: Up-regulated in Transcription
  misc_feature: MA Experiment 108464 PARAMETER Experiment Name: At_Germinating_Seeds_cDNA_P Parameter: Age (day) Value: 4 vs. 0
  misc_feature: MA Experiment 108464 PARAMETER Experiment Name: At_Germinating_Seeds_cDNA_P Parameter: Tissue Value: Germinating Seeds
  misc_feature: MA Experiment ID: 108572 Result: Down-regulated in Transcription
  misc_feature: MA Experiment 108572 PARAMETER Experiment Name: At_Drought_cDNA_P Parameter: Timepoint (hr) Value: 1
  misc_feature: MA Experiment 108572 PARAMETER Experiment Name: At_Drought_cDNA_P Parameter: Tissue Value: Aerial
  misc_feature: MA Experiment 108572 PARAMETER Experiment Name: At_Drought_cDNA_P Parameter: Treatment Value: Drought vs. No Drought
  misc_feature: MA Experiment ID: 108594 Result: Up-regulated in Transcription
  misc_feature: MA Experiment 108594 PARAMETER Experiment Name: At_Ler-rhl_Root_cDNA_P Parameter: Plant Line Value: null
  misc_feature: MA Experiment ID: 20000069 Result: Up-regulated in Transcription
  misc_feature: MA Experiment 20000069 PARAMETER Experiment Name: At_100uM_ABA_Mutants_cDNA_P Parameter: Plant Line Value: CS23
  misc_feature: MA Experiment 20000069 PARAMETER Experiment Name: At_100uM_ABA_Mutants_cDNA_P Parameter: Timepoint (hr) Value: 6
  misc_feature: MA Experiment 20000069 PARAMETER Experiment Name: At_100uM_ABA_Mutants_cDNA_P Parameter: Tissue Value: Aerial
  misc_feature: MA Experiment 20000069 PARAMETER Experiment Name: At_100uM_ABA_Mutants_cDNA_P Parameter: Treatment Value: 100uM ABA vs. No Treatment
  misc_feature: MA Experiment ID: 20000070 Result: Up-regulated in Transcription
  misc_feature: MA Experiment 20000070 PARAMETER Experiment Name: At_100uM_ABA_Mutants_cDNA_P Parameter: Plant Line Value: CS24
  misc_feature: MA Experiment 20000070 PARAMETER Experiment Name: At_100uM_ABA_Mutants_cDNA_P Parameter: Timepoint (hr) Value: 6
  misc_feature: MA Experiment 20000070 PARAMETER Experiment Name: At_100uM_ABA_Mutants_cDNA_P Parameter: Tissue Value: Aerial
  misc_feature: MA Experiment 20000070 PARAMETER Experiment Name: At_100uM_ABA_Mutants_cDNA_P Parameter: Treatment Value: 100uM ABA vs. No Treatment
  misc_feature: MA Experiment ID: 20000071 Result: Up-regulated in Transcription
  misc_feature: MA Experiment 20000071 PARAMETER Experiment Name: At_100uM_ABA_Mutants_cDNA_P Parameter: Plant Line Value: CS8104
  misc_feature: MA Experiment 20000071 PARAMETER Experiment Name: At_100uM_ABA_Mutants_cDNA_P Parameter: Timepoint (hr) Value: 6
  misc_feature: MA Experiment 20000071 PARAMETER Experiment Name: At_100uM_ABA_Mutants_cDNA_P Parameter: Tissue Value: Aerial
  misc_feature: MA Experiment 20000071 PARAMETER Experiment Name: At_100uM_ABA_Mutants_cDNA_P Parameter: Treatment Value: 100uM ABA vs. No Treatment
  misc_feature: MA Experiment ID: 20000072 Result: Up-regulated in Transcription
  misc_feature: MA Experiment 20000072 PARAMETER Experiment Name: At_100uM_ABA_Mutants_cDNA_P Parameter: Plant Line Value: CS8105
  misc_feature: MA Experiment 20000072 PARAMETER Experiment Name: At_100uM_ABA_Mutants_cDNA_P Parameter: Timepoint (hr) Value: 6
  misc_feature: MA Experiment 20000072 PARAMETER Experiment Name: At_100uM_ABA_Mutants_cDNA_P Parameter: Tissue Value: Aerial
  misc_feature: MA Experiment 20000072 PARAMETER Experiment Name: At_100uM_ABA_Mutants_cDNA_P Parameter: Treatment Value: 100uM ABA vs. No Treatment
  misc_feature: MA Experiment ID: 20000086 Result: Up-regulated in Transcription
  misc_feature: MA Experiment 20000086 PARAMETER Experiment Name: At_100uM_ABA_Mutants_cDNA_P Parameter: Plant Line Value: CS22
  misc_feature: MA Experiment 20000086 PARAMETER Experiment Name: At_100uM_ABA_Mutants_cDNA_P Parameter: Timepoint (hr) Value: 6
  misc_feature: MA Experiment 20000086 PARAMETER Experiment Name: At_100uM_ABA_Mutants_cDNA_P Parameter: Tissue Value: Aerial
  misc_feature: MA Experiment 20000086 PARAMETER Experiment Name: At_100uM_ABA_Mutants_cDNA_P Parameter: Treatment Value: 100uM ABA vs. No Treatment
  misc_feature: MA Experiment ID: 20000087 Result: Up-regulated in Transcription
  misc_feature: MA Experiment 20000087 PARAMETER Experiment Name: At_100uM_ABA_Mutants_cDNA_P Parameter: Plant Line Value: WS
  misc_feature: MA Experiment 20000087 PARAMETER Experiment Name: At_100uM_ABA_Mutants_cDNA_P Parameter: Timepoint (hr) Value: 6
  misc_feature: MA Experiment 20000087 PARAMETER Experiment Name: At_100uM_ABA_Mutants_cDNA_P Parameter: Tissue Value: Aerial
  misc_feature: MA Experiment 20000087 PARAMETER Experiment Name: At_100uM_ABA_Mutants_cDNA_P Parameter: Treatment Value: 100uM ABA vs. No Treatment
  misc_feature: MA Experiment ID: 20000111 Result: Down-regulated in Transcription
  misc_feature: MA Experiment 20000111 PARAMETER Experiment Name: At_42deg_Heat_cDNA_P Parameter: Temperature (deg C) Value: 42 vs. 22
  misc_feature: MA Experiment 20000111 PARAMETER Experiment Name: At_42deg_Heat_cDNA_P Parameter: Timepoint (hr) Value: 6
  misc_feature: MA Experiment 20000111 PARAMETER Experiment Name: At_42deg_Heat_cDNA_P Parameter: Tissue Value: Aerial
  misc_feature: MA Experiment ID: 20000113 Result: Down-regulated in Transcription
  misc_feature: MA Experiment 20000113 PARAMETER Experiment Name: At_42deg_Heat_cDNA_P Parameter: Temperature (deg C) Value: 42 vs. 22
  misc_feature: MA Experiment 20000113 PARAMETER Experiment Name: At_42deg_Heat_cDNA_P Parameter: Timepoint (hr) Value: 8
  misc_feature: MA Experiment 20000113 PARAMETER Experiment Name: At_42deg_Heat_cDNA_P Parameter: Tissue Value: Aerial
  misc_feature: MA Experiment ID: 20000117 Result: Up-regulated in Transcription
  misc_feature: MA Experiment 20000117 PARAMETER Experiment Name: At_100uM_ABA_Mutants_cDNA_P Parameter: Plant Line Value: Columbia
  misc_feature: MA Experiment 20000117 PARAMETER Experiment Name: At_100uM_ABA_Mutants_cDNA_P Parameter: Timepoint (hr) Value: 6
  misc_feature: MA Experiment 20000117 PARAMETER Experiment Name: At_100uM_ABA_Mutants_cDNA_P Parameter: Tissue Value: Aerial
  misc_feature: MA Experiment 20000117 PARAMETER Experiment Name: At_100uM_ABA_Mutants_cDNA_P Parameter: Treatment Value: 100uM ABA vs. No Treatment
  misc_feature: MA Experiment ID: 20000144 Result: Down-regulated in Transcription
  misc_feature: MA Experiment 20000144 PARAMETER Experiment Name: At_42deg_Heat_cDNA_P Parameter: Temperature (deg C) Value: 42 vs. 22
  misc_feature: MA Experiment 20000144 PARAMETER Experiment Name: At_42deg_Heat_cDNA_P Parameter: Timepoint (hr) Value: 1
  misc_feature: MA Experiment 20000144 PARAMETER Experiment Name: At_42deg_Heat_cDNA_P Parameter: Tissue Value: Aerial
  misc_feature: MA Experiment ID: 20000171 Result: Down-regulated in Transcription
  misc_feature: MA Experiment 20000171 PARAMETER Experiment Name: At_42deg_Heat_P Parameter: Age (day) Value: 14
  misc_feature: MA Experiment 20000171 PARAMETER Experiment Name: At_42deg_Heat_P Parameter: Organism Value: A. thaliana
  misc_feature: MA Experiment 20000171 PARAMETER Experiment Name: At_42deg_Heat_P Parameter: Plant Line Value: WS
  misc_feature: MA Experiment 20000171 PARAMETER Experiment Name: At_42deg_Heat_P Parameter: Temperature (deg C) Value: 42 vs. 22
  misc_feature: MA Experiment 20000171 PARAMETER Experiment Name: At_42deg_Heat_P Parameter: Timepoint (hr) Value: 1
  misc_feature: MA Experiment 20000171 PARAMETER Experiment Name: At_42deg_Heat_P Parameter: Tissue Value: Aerial
  misc_feature: MA Experiment ID: 20000173 Result: Down-regulated in Transcription
  misc_feature: MA Experiment 20000173 PARAMETER Experiment Name: At_42deg_Heat_P Parameter: Age (day) Value: 14
  misc_feature: MA Experiment 20000173 PARAMETER Experiment Name: At_42deg_Heat_P Parameter: Organism Value: A. thaliana
  misc_feature: MA Experiment 20000173 PARAMETER Experiment Name: At_42deg_Heat_P Parameter: Plant Line Value: WS
  misc_feature: MA Experiment 20000173 PARAMETER Experiment Name: At_42deg_Heat_P Parameter: Temperature (deg C) Value: 42 vs. 22
  misc_feature: MA Experiment 20000173 PARAMETER Experiment Name: At_42deg_Heat_P Parameter: Timepoint (hr) Value: 6
  misc_feature: MA Experiment 20000173 PARAMETER Experiment Name: At_42deg_Heat_P Parameter: Tissue Value: Aerial
  misc_feature: MA Experiment ID: 20000224 Result: Down-regulated in Transcription
  misc_feature: MA Experiment ID: 20000264 Result: Down-regulated in Transcription
  misc_feature: MA Experiment 20000264 PARAMETER Experiment Name: At_Open_Flower_P Parameter: Age (day) Value: 21
  misc_feature: MA Experiment 20000264 PARAMETER Experiment Name: At_Open_Flower_P Parameter: Plant Line Value: WS
  misc_feature: MA Experiment 20000264 PARAMETER Experiment Name: At_Open_Flower_P Parameter: Tissue Value: Open Flower vs. Whole Plant
  misc_feature: MA Experiment ID: 20000265 Result: Down-regulated in Transcription
  misc_feature: MA Experiment 20000265 PARAMETER Experiment Name: At_Open_Flower_P Parameter: Age (day) Value: 21
  misc_feature: MA Experiment 20000265 PARAMETER Experiment Name: At_Open_Flower_P Parameter: Plant Line Value: WS
  misc_feature: MA Experiment 20000265 PARAMETER Experiment Name: At_Open_Flower_P Parameter: Tissue Value: Closed Flower vs. Whole Plant
  misc_feature: MA Experiment ID: 20000268 Result: Down-regulated in Transcription
  misc_feature: MA Experiment 20000268 PARAMETER Experiment Name: At_100mM_NaCl__P Parameter: Age (day) Value: 14
  misc_feature: MA Experiment 20000268 PARAMETER Experiment Name: At_100mM_NaCl__P Parameter: Organism Value: A. thaliana
  misc_feature: MA Experiment 20000268 PARAMETER Experiment Name: At_100mM_NaCl__P Parameter: Plant Line Value: WS
  misc_feature: MA Experiment 20000268 PARAMETER Experiment Name: At_100mM_NaCl__P Parameter: Timepoint (hr) Value: 6
  misc_feature: MA Experiment 20000268 PARAMETER Experiment Name: At_100mM_NaCl__P Parameter: Tissue Value: Whole Plant
  misc_feature: MA Experiment 20000268 PARAMETER Experiment Name: At_100mM_NaCl__P Parameter: Treatment Value: 100mM NaCl vs. No Treatment
  misc_feature: MA Experiment ID: 20000286 Result: Down-regulated in Transcription
  misc_feature: MA Experiment 20000286 PARAMETER Experiment Name: At_Open_Flower_P Parameter: Age (day) Value: 21
  misc_feature: MA Experiment 20000286 PARAMETER Experiment Name: At_Open_Flower_P Parameter: Plant Line Value: WS
  misc_feature: MA Experiment 20000286 PARAMETER Experiment Name: At_Open_Flower_P Parameter: Tissue Value: Half Open vs. Whole Plant
  misc_feature: MA Experiment ID: 20000308 Result: Down-regulated in Transcription
  misc_feature: MA Experiment 20000308 PARAMETER Experiment Name: At_100mM_NaCl__P Parameter: Age (day) Value: 17
  misc_feature: MA Experiment 20000308 PARAMETER Experiment Name: At_100mM_NaCl__P Parameter: Organism Value: A. thaliana
  misc_feature: MA Experiment 20000308 PARAMETER Experiment Name: At_100mM_NaCl__P Parameter: Plant Line Value: WS
  misc_feature: MA Experiment 20000308 PARAMETER Experiment Name: At_100mM_NaCl__P Parameter: Timepoint (hr) Value: 72
  misc_feature: MA Experiment 20000308 PARAMETER Experiment Name: At_100mM_NaCl__P Parameter: Tissue Value: Whole Plant
  misc_feature: MA Experiment 20000308 PARAMETER Experiment Name: At_100mM_NaCl__P Parameter: Treatment Value: 100mM NaCl vs. No Treatment
  misc_feature: MA Experiment ID: 20000438 Result: Up-regulated in Transcription
  misc_feature: MA Experiment 20000438 PARAMETER Experiment Name: At_Shoots__P Parameter: Age (day) Value: 14
  misc_feature: MA Experiment 20000438 PARAMETER Experiment Name: At_Shoots__P Parameter: Tissue Value: Shoots vs. Whole Plant
  misc_feature: MA Experiment ID: 20000441 Result: Up-regulated in Transcription
  misc_feature: MA Experiment 20000441 PARAMETER Experiment Name: At_1uM_BR-BRZ__P Parameter: Tissue Value: Shoot Apices
  misc_feature: MA Experiment 20000441 PARAMETER Experiment Name: At_1uM_BR-BRZ__P Parameter: Treatment Value: 1uM BR vs. No Treatment
  misc_feature: MA Experiment ID: 20000443 Result: Up-regulated in Transcription
  misc_feature: MA Experiment 20000443 PARAMETER Experiment Name: At_1uM_BR-BRZ__P Parameter: Tissue Value: Shoot Apices
  misc_feature: MA Experiment 20000443 PARAMETER Experiment Name: At_1uM_BR-BRZ__P Parameter: Treatment Value: 1uM BRZ vs. No Treatment
  misc_feature: MA Experiment ID: 20000573 Result: Down-regulated in Transcription
  misc_feature: MA Experiment 20000573 PARAMETER Experiment Name: At_100uM_ABA_Mutants__P Parameter: Organism Value: A. thaliana
  misc_feature: MA Experiment 20000573 PARAMETER Experiment Name: At_100uM_ABA_Mutants__P Parameter: Plant Line Value: CS22 vs. Ler wt
  misc_feature: MA Experiment 20000573 PARAMETER Experiment Name: At_100uM_ABA_Mutants__P Parameter: Timepoint (hr) Value: N/A
  misc_feature: MA Experiment 20000573 PARAMETER Experiment Name: At_100uM_ABA_Mutants__P Parameter: Tissue Value: Whole Plant
  misc_feature: MA Experiment 20000573 PARAMETER Experiment Name: At_100uM_ABA_Mutants__P Parameter: Treatment Value: None
  misc_feature: MA Experiment ID: 20000574 Result: Down-regulated in Transcription
  misc_feature: MA Experiment 20000574 PARAMETER Experiment Name: At_100uM_ABA_Mutants__P Parameter: Organism Value: A. thaliana
  misc_feature: MA Experiment 20000574 PARAMETER Experiment Name: At_100uM_ABA_Mutants__P Parameter: Plant Line Value: CS23 vs. Ler wt
  misc_feature: MA Experiment 20000574 PARAMETER Experiment Name: At_100uM_ABA_Mutants__P Parameter: Timepoint (hr) Value: N/A
  misc_feature: MA Experiment 20000574 PARAMETER Experiment Name: At_100uM_ABA_Mutants__P Parameter: Tissue Value: Whole Plant
  misc_feature: MA Experiment 20000574 PARAMETER Experiment Name: At_100uM_ABA_Mutants__P Parameter: Treatment Value: None
  misc_feature: MA Experiment ID: 20000794 Result: Down-regulated in Transcription
  misc_feature: MA Experiment 20000794 PARAMETER Experiment Name: At_Petals_P Parameter: Age (day) Value: 23-25 days
  misc_feature: MA Experiment 20000794 PARAMETER Experiment Name: At_Petals_P Parameter: Plant Line Value: WS
  misc_feature: MA Experiment 20000794 PARAMETER Experiment Name: At_Petals_P Parameter: Tissue Value: Petals vs. Whole plant
  misc_feature: MA Experiment ID: 20001248 Result: Up-regulated in Transcription
  misc_feature: MA Experiment 20001248 PARAMETER Experiment Name: At_Far-red-induction_P Parameter: Age (day) Value: 7
  misc_feature: MA Experiment 20001248 PARAMETER Experiment Name: At_Far-red-induction_P Parameter: Light Value: Far-red vs. White
  misc_feature: MA Experiment 20001248 PARAMETER Experiment Name: At_Far-red-induction_P Parameter: Organism Value: A. thaliana
  misc_feature: MA Experiment 20001248 PARAMETER Experiment Name: At_Far-red-induction_P Parameter: Plant Line Value: Columbia
  misc_feature: MA Experiment 20001248 PARAMETER Experiment Name: At_Far-red-induction_P Parameter: Timepoint (hr) Value: 4
  misc_feature: MA Experiment 20001248 PARAMETER Experiment Name: At_Far-red-induction_P Parameter: Tissue Value: Whole Plant
  misc_feature: MA Experiment ID: 20001450 Result: Up-regulated in Transcription
  misc_feature: MA Experiment 20001450 PARAMETER Experiment Name: At_Far-red-induction_P Parameter: Age (day) Value: 7
  misc_feature: MA Experiment 20001450 PARAMETER Experiment Name: At_Far-red-induction_P Parameter: Light Value: Far-red vs. White
  misc_feature: MA Experiment 20001450 PARAMETER Experiment Name: At_Far-red-induction_P Parameter: Organism Value: A. thaliana
  misc_feature: MA Experiment 20001450 PARAMETER Experiment Name: At_Far-red-induction_P Parameter: Plant Line Value: Columbia
  misc_feature: MA Experiment 20001450 PARAMETER Experiment Name: At_Far-red-induction_P Parameter: Timepoint (hr) Value: 8
  misc_feature: MA Experiment 20001450 PARAMETER Experiment Name: At_Far-red-induction_P Parameter: Tissue Value: Whole Plant
  misc_feature: MA Experiment ID: 20001451 Result: Up-regulated in Transcription
  misc_feature: MA Experiment 20001451 PARAMETER Experiment Name: At_Far-red-induction_P Parameter: Age (day) Value: 7
  misc_feature: MA Experiment 20001451 PARAMETER Experiment Name: At_Far-red-induction_P Parameter: Light Value: Far-red vs. White
  misc_feature: MA Experiment 20001451 PARAMETER Experiment Name: At_Far-red-induction_P Parameter: Organism Value: A. thaliana
  misc_feature: MA Experiment 20001451 PARAMETER Experiment Name: At_Far-red-induction_P Parameter: Plant Line Value: Columbia
  misc_feature: MA Experiment 20001451 PARAMETER Experiment Name: At_Far-red-induction_P Parameter: Timepoint (hr) Value: 24
  misc_feature: MA Experiment 20001451 PARAMETER Experiment Name: At_Far-red-induction_P Parameter: Tissue Value: Whole Plant
  misc_feature: MA Experiment ID: 20001554 Result: Down-regulated in Transcription
  misc_feature: MA Experiment 20001554 PARAMETER Experiment Name: At_Drought_Soil_Dry_P Parameter: Age (day) Value: 21
  misc_feature: MA Experiment 20001554 PARAMETER Experiment Name: At_Drought_Soil_Dry_P Parameter: Organism Value: A. thaliana
  misc_feature: MA Experiment 20001554 PARAMETER Experiment Name: At_Drought_Soil_Dry_P Parameter: Plant Line Value: WS
  misc_feature: MA Experiment 20001554 PARAMETER Experiment Name: At_Drought_Soil_Dry_P Parameter: Post Timepoint (hr) Value: None
  misc_feature: MA Experiment 20001554 PARAMETER Experiment Name: At_Drought_Soil_Dry_P Parameter: Post-Treatment Value: None
  misc_feature: MA Experiment 20001554 PARAMETER Experiment Name: At_Drought_Soil_Dry_P Parameter: Timepoint (day) Value: 7
  misc_feature: MA Experiment 20001554 PARAMETER Experiment Name: At_Drought_Soil_Dry_P Parameter: Treatment Value: Drought vs. No Drought
  misc_feature: MA Experiment ID: 20001556 Result: Down-regulated in Transcription
  misc_feature: MA Experiment 20001556 PARAMETER Experiment Name: At_Drought_Soil_Dry_P Parameter: Age (day) Value: 26
  misc_feature: MA Experiment 20001556 PARAMETER Experiment Name: At_Drought_Soil_Dry_P Parameter: Organism Value: A. thaliana
  misc_feature: MA Experiment 20001556 PARAMETER Experiment Name: At_Drought_Soil_Dry_P Parameter: Plant Line Value: WS
  misc_feature: MA Experiment 20001556 PARAMETER Experiment Name: At_Drought_Soil_Dry_P Parameter: Post Timepoint (hr) Value: None
  misc_feature: MA Experiment 20001556 PARAMETER Experiment Name: At_Drought_Soil_Dry_P Parameter: Post-Treatment Value: None
  misc_feature: MA Experiment 20001556 PARAMETER Experiment Name: At_Drought_Soil_Dry_P Parameter: Timepoint (day) Value: 12
  misc_feature: MA Experiment 20001556 PARAMETER Experiment Name: At_Drought_Soil_Dry_P Parameter: Treatment Value: Drought vs. No Drought
  misc_feature: MA Experiment ID: 20001774 Result: Down-regulated in Transcription
  misc_feature: MA Experiment 20001774 PARAMETER Experiment Name: At_Far-red-enriched-adult_P Parameter: Age (day) Value: 31
  misc_feature: MA Experiment 20001774 PARAMETER Experiment Name: At_Far-red-enriched-adult_P Parameter: Light Value: Far-red enriched vs. White
  misc_feature: MA Experiment 20001774 PARAMETER Experiment Name: At_Far-red-enriched-adult_P Parameter: Organism Value: A. thaliana
  misc_feature: MA Experiment 20001774 PARAMETER Experiment Name: At_Far-red-enriched-adult_P Parameter: Plant Line Value: Columbia
  misc_feature: MA Experiment 20001774 PARAMETER Experiment Name: At_Far-red-enriched-adult_P Parameter: Timepoint (hr) Value: 72
  misc_feature: MA Experiment 20001774 PARAMETER Experiment Name: At_Far-red-enriched-adult_P Parameter: Tissue Value: Aerial
  misc_feature: MA Experiment ID: 20001904 Result: Down-regulated in Transcription
  misc_feature: MA Experiment 20001904 PARAMETER Experiment Name: At_Drought_Reproduction_P Parameter: Age (day) Value: 37
  misc_feature: MA Experiment 20001904 PARAMETER Experiment Name: At_Drought_Reproduction_P Parameter: Organism Value: A. thaliana
  misc_feature: MA Experiment 20001904 PARAMETER Experiment Name: At_Drought_Reproduction_P Parameter: Plant Line Value: WS
  misc_feature: MA Experiment 20001904 PARAMETER Experiment Name: At_Drought_Reproduction_P Parameter: Timepoint (day) Value: 7
  misc_feature: MA Experiment 20001904 PARAMETER Experiment Name: At_Drought_Reproduction_P Parameter: Tissue Value: Rosettes
  misc_feature: MA Experiment 20001904 PARAMETER Experiment Name: At_Drought_Reproduction_P Parameter: Treatment Value: Drought vs. No Drought
  misc_feature: MA Experiment ID: 20001906 Result: Down-regulated in Transcription
  misc_feature: MA Experiment 20001906 PARAMETER Experiment Name: At_Drought_Reproduction_P Parameter: Age (day) Value: 35
  misc_feature: MA Experiment 20001906 PARAMETER Experiment Name: At_Drought_Reproduction_P Parameter: Organism Value: A. thaliana
  misc_feature: MA Experiment 20001906 PARAMETER Experiment Name: At_Drought_Reproduction_P Parameter: Plant Line Value: WS
  misc_feature: MA Experiment 20001906 PARAMETER Experiment Name: At_Drought_Reproduction_P Parameter: Timepoint (day) Value: 5
  misc_feature: MA Experiment 20001906 PARAMETER Experiment Name: At_Drought_Reproduction_P Parameter: Tissue Value: Siliques
  misc_feature: MA Experiment 20001906 PARAMETER Experiment Name: At_Drought_Reproduction_P Parameter: Treatment Value: Drought vs. No Drought
aacaaaaacttaacccatttcttcttctttttttgtttctctctcacaaacacaacaaatatggaatacagctgtgtagacgacagtagtacaacgtcagaatctctctccatctctactactccaaagccgacaacgacgacggagaagaaactctcttctccgccggcgacgtcgatgcgtctctacagaatgggaagcggcggaagcagcgtcgttttggattcagagaacggcgtcgagaccgagtcacgtaagcttccttcgtcgaaatataaaggcgttgtgcctcagcctaacggaagatggggagctcagatttacgagaagcatcagcgagtttggctcggtactttcaacgaggaagaagaagctgcgtcttcttacgacatcgccgtgaggagattccgcggccgcgacgccgtcactaacttcaaatctcaagttgatggaaacgacgccgaatcggcttttcttgacgctcattctaaagctgagatcgtggatatgttgaggaaacacacttacgccgatgagtttgagcagagtagacggaagtttgttaacggcgacggaaaacgctctgggttggagacggcgacgtacggaaacgacgctgttttgagagcgcgtgaggttttgttcgagaagactgttacgccgagcgacgtcgggaagctgaaccgtttagtgataccgaaacaacacgcggagaagcattttccgttaccggcgatgacgacggcgatggggatgaatccgtctccgacgaaaggcgttttgattaacttggaagatagaacagggaaagtgtggcggttccgttacagttactggaacagcagtcaaagttacgtgttgaccaagggctggagccggttcgttaaagagaagaatcttcgagccggtgatgtggtttgtttcgagagatcaaccggaccagaccggcaattgtatatccactggaaagtccggtctagtccggttcagactgtggttaggctattcggagtcaacattttcaatgtgagtaacgagaaaccaaacgacgtcgcagtagagtgtgttggcaagaagagatctcgggaagatgatttgttttcgttagggtgttccaagaagcaggcgattatcaacatcttgtgacaaattctttttttttggttttttttcttcaatttgtttctcctttttcaatattttgtattgaaatgacaagttgtaaattaggacaagacaagaaaaaatgacaactagacaaaatagtttttgtttacatctaatttaggatctgttttttcaccctttcctgaaatatgatatgtgttctcctccttaatctaataatcttgtttaatct

SEQ ID NO: 91678 - protein, 381 aa, Arabidopsis thaliana
  peptide (1)..(381): Ceres Seq. ID no. 12728756
  misc_feature (214)..(328): Pfam Name: B3 DNA binding domain Pfam Description: B3 DNA binding domain
  misc_feature (21)..(381): Homolog of NCBI NO: 15222622 NR Description: DNA-binding protein RAV2, putative; protein id: supported by cDNA: gi_15810260, supported by cDNA: gi_20259538
  misc_feature (21)..(381): Homolog of NCBI NO: 18409138 NR Description: AP2 domain protein RAP2.8 (RAV2); protein id: supported by cDNA: 19561., supported by cDNA: gi_13430799,
  misc_feature (21)..(381): Homolog of NCBI NO: 21554039 NR Description: putative RAV2-like DNA-binding protein
  misc_feature (47)..(381): Homolog of NCBI NO: 2281641 NR Description: AP2 domain containing protein RAP2.8 [Arabidopsis
  misc_feature (21)..(379): Homolog of NCBI NO: 15222217 NR Description: DNA-binding protein (RAV1); protein id: supported by cDNA: gi_17380761, supported by cDNA: gi_20259028,
  misc_feature (24)..(378): Homolog of NCBI NO: 15230871 NR Description: AP2 domain transcription factor RAV, putative;
  misc_feature (24)..(340): Homolog of NCBI NO: 21593532 NR Description: AP2 domain transcription factor [Arabidopsis
  misc_feature (66)..(327): Homolog of NCBI NO: 34911404 NR Description: DNA-binding protein RAV2-like [Oryza sativa
  misc_feature (29)..(331): Homolog of NCBI NO: 34895690 NR Description: putative DNA binding protein RAV2 [Oryza sativa
  misc_feature (88)..(340): Homolog of NCBI NO: 34895676 NR Description: putative DNA binding protein RAV2 [Oryza sativa
NKNLTHFFFFFCFSLTNTTNMEYSCVDDSSTTSESLSISTTPKPTTTTEKKLSSPPATSMRLYRMGSGGSSVVLDSENGVETESRKLPSSKYKGVVPQPNGRWGAQIYEKHQRVWLGTFNEEEEAASSYDIAVRRFRGRDAVTNFKSQVDGNDAESAFLDAHSKAEIVDMLRKHTYADEFEQSRRKFVNGDGKRSGLETATYGNDAVLRAREVLFEKTVTPSDVGKLNRLVIPKQHAEKHFPLPAMTTAMGMNPSPTKGVLINLEDRTGKVWRFRYSYWNSSQSYVLTKGWSRFVKEKNLRAGDVVCFERSTGPDRQLYIHWKVRSSPVQTVVRLFGVNIFNVSNEKPNDVAVECVGKKRSREDDLFSLGCSKKQAIINIL

SEQ ID NO: 91679 - protein, 361 aa, Arabidopsis thaliana; identical to SEQ ID NO: 36043
  peptide (1)..(361): Ceres Seq. ID no. 12728757
  misc_feature (194)..(308): Pfam Name: B3 DNA binding domain Pfam Description: B3 DNA binding domain
  misc_feature (1)..(361): Homolog of NCBI NO: 15222622 NR Description: DNA-binding protein RAV2, putative; protein id: supported by cDNA: gi_15810260, supported by cDNA: gi_20259538
  misc_feature (1)..(361): Homolog of NCBI NO: 18409138 NR Description: AP2 domain protein RAP2.8 (RAV2); protein id: supported by cDNA: 19561., supported by cDNA: gi_13430799,
  misc_feature (1)..(361): Homolog of NCBI NO: 21554039 NR Description: putative RAV2-like DNA-binding protein
  misc_feature (27)..(361): Homolog of NCBI NO: 2281641 NR Description: AP2 domain containing protein RAP2.8 [Arabidopsis
  misc_feature (1)..(359): Homolog of NCBI NO: 15222217 NR Description: DNA-binding protein (RAV1); protein id: supported by cDNA: gi_17380761, supported by cDNA: gi_20259028,
  misc_feature (4)..(358): Homolog of NCBI NO: 15230871 NR Description: AP2 domain transcription factor RAV, putative;
  misc_feature (4)..(320): Homolog of NCBI NO: 21593532 NR Description: AP2 domain transcription factor [Arabidopsis
  misc_feature (46)..(307): Homolog of NCBI NO: 34911404 NR Description: DNA-binding protein RAV2-like [Oryza sativa
  misc_feature (9)..(311): Homolog of NCBI NO: 34895690 NR Description: putative DNA binding protein RAV2 [Oryza sativa
  misc_feature (68)..(320): Homolog of NCBI NO: 34895676 NR Description: putative DNA binding protein RAV2 [Oryza sativa

SEQ ID NO: 91680 - protein, 322 aa, Arabidopsis thaliana; identical to SEQ ID NO: 36044
  peptide (1)..(322): Ceres Seq. ID no. 12728758
  misc_feature (155)..(269): Pfam Name: B3 DNA binding domain Pfam Description: B3 DNA binding domain
  misc_feature (1)..(322): Homolog of NCBI NO: 15222622 NR Description: DNA-binding protein RAV2, putative; protein id: supported by cDNA: gi_15810260, supported by cDNA: gi_20259538
  misc_feature (1)..(322): Homolog of NCBI NO: 18409138 NR Description: AP2 domain protein RAP2.8 (RAV2); protein id: supported by cDNA: 19561., supported by cDNA: gi_13430799,
  misc_feature (1)..(322): Homolog of NCBI NO: 21554039 NR Description: putative RAV2-like DNA-binding protein
  misc_feature (1)..(322): Homolog of NCBI NO: 2281641 NR Description: AP2 domain containing protein RAP2.8 [Arabidopsis
  misc_feature (1)..(320): Homolog of NCBI NO: 15222217 NR Description: DNA-binding protein (RAV1); protein id: supported by cDNA: gi_17380761, supported by cDNA: gi_20259028,
  misc_feature (1)..(319): Homolog of NCBI NO: 15230871 NR Description: AP2 domain transcription factor RAV, putative;
  misc_feature (1)..(281): Homolog of NCBI NO: 21593532 NR Description: AP2 domain transcription factor [Arabidopsis
  misc_feature (7)..(268): Homolog of NCBI NO: 34911404 NR Description: DNA-binding protein RAV2-like [Oryza sativa
  misc_feature (1)..(272): Homolog of NCBI NO: 34895690 NR Description: putative DNA binding protein RAV2 [Oryza sativa
  misc_feature (29)..(281): Homolog of NCBI NO: 34895676 NR Description: putative DNA binding protein RAV2 [Oryza sativa

SEQ ID NO: 91681 - DNA, 1080 bp, Arabidopsis thaliana
  misc_feature (1)..(1080): Ceres Seq. ID no. 12728759
  misc_feature: MA Experiment ID: 20000180 Result: Up-regulated in Transcription
  misc_feature: MA Experiment 20000180 PARAMETER Experiment Name: At_Germinating_Seeds_P Parameter: Age (hr) Value: 24 vs. 0
  misc_feature: MA Experiment 20000180 PARAMETER Experiment Name: At_Germinating_Seeds_P Parameter: Tissue Value: Germinating Seeds
  misc_feature: MA Experiment ID: 20000184 Result: Down-regulated in Transcription
  misc_feature: MA Experiment 20000184 PARAMETER Experiment Name: At_Shoots__P Parameter: Age (day) Value: 7
  misc_feature: MA Experiment 20000184 PARAMETER Experiment Name: At_Shoots__P Parameter: Tissue Value: Shoots vs. Whole Plant
gcagcaatggaggatctatggaagagggcaaaatcgttcgcagaagaagcgggtaagaagtctcagacgataacacaatcatcctccgcgaccttcgtcaatctcgtcaccgagactgctaagaaatccaaggaactcgctctcgaagcttcgaagaaagctgatcaattcaatgccgccgatttcgttgctgaaacggctaagaaatccaaagaattcgctgctgaagcttcaaagaaggcggatcagttcaaagtcgccgcgctgaaacaagctgatcagatccagaacatcaaatcgatcgctgatataatcgggaccgggaccgggtcaggatccggttcagaagcggagcttctcgaattcggtgtaacggatgatttgagagagttcgctgaaggcttgacctctgctacattccaagcttttcctgatcaagatcaaggggatgaagtttccgatgtgataacaaatgcttcgaatgttcgaaaggatctctcggattggcaagagagacatgccactctggttctaacctctgtcaagcaaatctccaagttaagatacgaactttgccctcgtttcatgaaagaaaggaggttctggaggatttatttcacactagtgagcactcatgtttctccatatgagaggaagtacatggaggaacttaagaccaaaggagagcatggaaatgaagaagctaagaaggctccagcgactggagagacagaaacagtagaaaagaatgttgcaatccgtagaacatctactgcgtcttctgagcaggatctggatacattcctgttgggtgatctagaagacagtgatgaagctccagatgatggtgatggaagccttgaggatgactttgacaagattggaaactcagatgttgaagacgagaagcaatcatctaaagctacaacaaatgcaggaaacgaagtgtcttgttagttttaagttccaattagaaaagggtaaatgaagaagatgcttgaaatgtatagttttgatttagtaagtgatgcatacgaagaccttgatttcgcaattcatatatgattcatttgttttgcc

SEQ ID NO: 91682 - protein, 318 aa, Arabidopsis thaliana
  peptide (1)..(318): Ceres Seq. ID no. 12728760
  misc_feature (163)..(209): Pfam Name: BSD domain Pfam Description: BSD domain
  misc_feature (3)..(318): Homolog of NCBI NO: 15450417 NR Description: At1g26300/F28B23_4 [Arabidopsis thaliana]
  misc_feature (8)..(308): Homolog of NCBI NO: 30697787 NR Description: expressed protein [Arabidopsis thaliana]
  misc_feature (8)..(301): Homolog of NCBI NO: 25404796 NR Description: hypothetical protein T6L1.21 [imported] - thaliana >gi|12323210|gb|AAG51582.1|AC011665_3 hypothetical
  misc_feature (3)..(146): Homolog of NCBI NO: 15222683 NR Description: hypothetical protein; protein id: At1g26300.1
  misc_feature (3)..(300): Homolog of NCBI NO: 25404796 NR Description: hypothetical protein T6L1.21 [imported] - thaliana >gi|12323210|gb|AAG51582.1|AC011665_3 hypothetical
  misc_feature (3)..(300): Homolog of NCBI NO: 30697787 NR Description: expressed protein [Arabidopsis thaliana]
  misc_feature (3)..(146): Homolog of NCBI NO: 6730653 NR Description: F4N2.1 [Arabidopsis thaliana]
  misc_feature (221)..(318): Homolog of NCBI NO: 15222681 NR Description: hypothetical protein; protein id: At1g26280.1
  misc_feature (110)..(258): Homolog of NCBI NO: 18404344 NR Description: expressed protein; protein id: At3g24820.1, by cDNA: 33269. [Arabidopsis thaliana] gb|AAF07359.1~gene_id:K7P8.11~similar to unknown protein
AAMEDLWKRAKSFAEEAGKKSQTITQSSSATFVNLVTETAKKSKELALEASKKADQFNAADFVAETAKKSKEFAAEASKKADQFKVAALKQADQIQNIKSIADIIGTGTGSGSGSEAELLEFGVTDDLREFAEGLTSATFQAFPDQDQGDEVSDVITNASNVRKDLSDWQERHATLVLTSVKQISKLRYELCPRFMKERRFWRIYFTLVSTHVSPYERKYMEELKTKGEHGNEEAKKAPATGETETVEKNVAIRRTSTASSEQDLDTFLLGDLEDSDEAPDDGDGSLEDDFDKIGNSDVEDEKQSSKATTNAGNEVSC

SEQ ID NO: 91683 - protein, 316 aa, Arabidopsis thaliana
  peptide (1)..(316): Ceres Seq. ID no. 12728761
  misc_feature (161)..(207): Pfam Name: BSD domain Pfam Description: BSD domain
  misc_feature (1)..(316): Homolog of NCBI NO: 15450417 NR Description: At1g26300/F28B23_4 [Arabidopsis thaliana]
  misc_feature (6)..(306): Homolog of NCBI NO: 30697787 NR Description: expressed protein [Arabidopsis thaliana]
  misc_feature (6)..(299): Homolog of NCBI NO: 25404796 NR Description: hypothetical protein T6L1.21 [imported] - thaliana >gi|12323210|gb|AAG51582.1|AC011665_3 hypothetical
  misc_feature (1)..(144): Homolog of NCBI NO: 15222683 NR Description: hypothetical protein; protein id: At1g26300.1
  misc_feature (1)..(298): Homolog of NCBI NO: 25404796 NR Description: hypothetical protein T6L1.21 [imported] - thaliana >gi|12323210|gb|AAG51582.1|AC011665_3 hypothetical
  misc_feature (1)..(298): Homolog of NCBI NO: 30697787 NR Description: expressed protein [Arabidopsis thaliana]
  misc_feature (1)..(144): Homolog of NCBI NO: 6730653 NR Description: F4N2.1 [Arabidopsis thaliana]
  misc_feature (219)..(316): Homolog of NCBI NO: 15222681 NR Description: hypothetical protein; protein id: At1g26280.1
  misc_feature (108)..(256): Homolog of NCBI NO: 18404344 NR Description: expressed protein; protein id: At3g24820.1, by cDNA: 33269. [Arabidopsis thaliana] gb|AAF07359.1~gene_id:K7P8.11~similar to unknown protein
MEDLWKRAKSFAEEAGKKSQTITQSSSATFVNLVTETAKKSKELALEASKKADQFNAADFVAETAKKSKEFAAEASKKADQFKVAALKQADQIQNIKSIADIIGTGTGSGSGSEAELLEFGVTDDLREFAEGLTSATFQAFPDQDQGDEVSDVITNASNVRKDLSDWQERHATLVLTSVKQISKLRYELCPRFMKERRFWRIYFTLVSTHVSPYERKYMEELKTKGEHGNEEAKKAPATGETETVEKNVAIRRTSTASSEQDLDTFLLGDLEDSDEAPDDGDGSLEDDFDKIGNSDVEDEKQSSKATTNAGNEVSC

SEQ ID NO: 91684 - DNA, 570 bp, Arabidopsis thaliana
  misc_feature (1)..(570): Ceres Seq. ID no. 12728798
  misc_feature: MA Experiment ID: 20000315 Result: Down-regulated in Transcription
  misc_feature: MA Experiment 20000315 PARAMETER Experiment Name: At_14day_Shoots-Roots_Sub_P Parameter: Age (day) Value: 14
  misc_feature: MA Experiment 20000315 PARAMETER Experiment Name: At_14day_Shoots-Roots_Sub_P Parameter: Organism Value: A. thaliana
  misc_feature: MA Experiment 20000315 PARAMETER Experiment Name: At_14day_Shoots-Roots_Sub_P Parameter: Plant Line Value: WS
  misc_feature: MA Experiment 20000315 PARAMETER Experiment Name: At_14day_Shoots-Roots_Sub_P Parameter: Tissue Value: Shoots vs. Whole Plant
  misc_feature: MA Experiment ID: 20000328 Result: Down-regulated in Transcription
  misc_feature: MA Experiment 20000328 PARAMETER Experiment Name: At_42deg_Heat_Sub_P Parameter: Age (day) Value: 14
  misc_feature: MA Experiment 20000328 PARAMETER Experiment Name: At_42deg_Heat_Sub_P Parameter: Organism Value: A. thaliana
  misc_feature: MA Experiment 20000328 PARAMETER Experiment Name: At_42deg_Heat_Sub_P Parameter: Plant Line Value: WS
  misc_feature: MA Experiment 20000328 PARAMETER Experiment Name: At_42deg_Heat_Sub_P Parameter: Temperature (deg C) Value: 42 vs. 22
  misc_feature: MA Experiment 20000328 PARAMETER Experiment Name: At_42deg_Heat_Sub_P Parameter: Timepoint (hr) Value: 6
  misc_feature: MA Experiment 20000328 PARAMETER Experiment Name: At_42deg_Heat_Sub_P Parameter: Tissue Value: Aerial
  misc_feature: MA Experiment ID: 20000329 Result: Down-regulated in Transcription
  misc_feature: MA Experiment 20000329 PARAMETER Experiment Name: At_4deg_Cold_Sub_P Parameter: Age (day) Value: 14
  misc_feature: MA Experiment 20000329 PARAMETER Experiment Name: At_4deg_Cold_Sub_P Parameter: Organism Value: A. thaliana
  misc_feature: MA Experiment 20000329 PARAMETER Experiment Name: At_4deg_Cold_Sub_P Parameter: Plant Line Value: WS
  misc_feature: MA Experiment 20000329 PARAMETER Experiment Name: At_4deg_Cold_Sub_P Parameter: Temperature (deg C) Value: 4 vs. 22
  misc_feature: MA Experiment 20000329 PARAMETER Experiment Name: At_4deg_Cold_Sub_P Parameter: Timepoint (hr) Value: 6
  misc_feature: MA Experiment 20000329 PARAMETER Experiment Name: At_4deg_Cold_Sub_P Parameter: Tissue Value: Aerial
atggatccaacacagaacacaagtgcagggattggtgggagcaatggtacaatcagatatcaaaccaatgatgggacttcaactgtgaccgttgctgatgattcaaaggagaatctttcccaagtcataaactctattgagaaaactttaggagtccttcatcagttacaccttaccgtcacttctttcacacccgcgtctcaactccatctcctccagcgccttaactctcttgtgatggagctagataacatgactaagttgtctgagaaatgcaacattcaaatccccatggaggttcttaacttgattgatgatgggaagaacccggatgagtttacgaaagatgttcttaatagctgcatagctagaaatcaagttactaagggcaagactgatgcttttaaggatttgagaaaacatattctggaggagcttgaacagaatttccctgatgaagtcgatatgtatagagaaatccgtgctagttctgctgctgaagcgaaacggttggcgcaatcgcaaagtgtgttaccaaatggggatgcaaaggtcaagaatgagctataa

SEQ ID NO: 91685 - protein, 189 aa, Arabidopsis thaliana; identical to SEQ ID NO: 77692
  peptide (1)..(189): Ceres Seq. ID no. 12728799
  misc_feature (1)..(189): Homolog of NCBI NO: 18396004 NR Description: Expressed protein; protein id: At1g26665.1, by cDNA: gi_13926326, supported by cDNA: gi_16323257 [Arabidopsis >gi|13926327|gb|AAK49628.1|AF372912_1 At1g26660/T24P13_4
  misc_feature (1)..(166): Homolog of NCBI NO: 25403266 NR Description: protein T24P13.4 [imported] - Arabidopsis >gi|9295719|gb|AAF87025.1|AC006535_3 T24P13.4 [Arabidopsis
  misc_feature (1)..(189): Homolog of NCBI NO: 15238215 NR Description: putative protein; protein id: At5g41910.1 thaliana] >gi|9757936|dbj|BAB08424.1| gene_id:MJC20.1~similar to protein~sp|P45966 [Arabidopsis thaliana]
  misc_feature (13)..(161): Homolog of NCBI NO: 34873422 NR Description: similar to DNA segment, Chr 13, Wayne State
  misc_feature (37)..(161): Homolog of NCBI NO: 20070410 NR Description: DNA segment, Chr 13, Wayne State University 50, [Mus musculus] >gi|27681537|ref|XP_214417.1| similar to DNA Chr 13, Wayne State University 50, expressed [Mus musculus]
  misc_feature (37)..(161): Homolog of NCBI NO: 29145113 NR Description: similar to DNA segment, Chr 13, Wayne State
  misc_feature (37)..(161): Homolog of NCBI NO: 13097162 NR Description: Similar to CG5057 gene product [Homo sapiens]
  misc_feature (39)..(164): Homolog of NCBI NO: 9799628 NR Description: Nut2 [Drosophila melanogaster]
  misc_feature (45)..(181): Homolog of NCBI NO: 29841376 NR Description: similar to GenBank Accession Number BC003353
  misc_feature (39)..(164): Homolog of NCBI NO: 24665095 NR Description: CG5057-PA [Drosophila melanogaster]

SEQ ID NO: 91686 - protein, 110 aa, Arabidopsis thaliana; identical to SEQ ID NO: 77693
  peptide (1)..(110): Ceres Seq. ID no. 12728800
  misc_feature (1)..(110): Homolog of NCBI NO: 18396004 NR Description: Expressed protein; protein id: At1g26665.1, by cDNA: gi_13926326, supported by cDNA: gi_16323257 [Arabidopsis >gi|13926327|gb|AAK49628.1|AF372912_1 At1g26660/T24P13_4
  misc_feature (1)..(87): Homolog of NCBI NO: 25403266 NR Description: protein T24P13.4 [imported] - Arabidopsis >gi|9295719|gb|AAF87025.1|AC006535_3 T24P13.4 [Arabidopsis
  misc_feature (1)..(110): Homolog of NCBI NO: 15238215 NR Description: putative protein; protein id: At5g41910.1 thaliana] >gi|9757936|dbj|BAB08424.1| gene_id:MJC20.1~similar to protein~sp|P45966 [Arabidopsis thaliana]
  misc_feature (1)..(82): Homolog of NCBI NO: 34873422 NR Description: similar to DNA segment, Chr 13, Wayne State
  misc_feature (1)..(82): Homolog of NCBI NO: 20070410 NR Description: DNA segment, Chr 13, Wayne State University 50, [Mus musculus] >gi|27681537|ref|XP_214417.1| similar to DNA Chr 13, Wayne State University 50, expressed [Mus musculus]
  misc_feature (1)..(82): Homolog of NCBI NO: 29145113 NR Description: similar to DNA segment, Chr 13, Wayne State
  misc_feature (1)..(82): Homolog of NCBI NO: 13097162 NR Description: Similar to CG5057 gene product [Homo sapiens]
  misc_feature (1)..(85): Homolog of NCBI NO: 9799628 NR Description: Nut2 [Drosophila melanogaster]
  misc_feature (1)..(102): Homolog of NCBI NO: 29841376 NR Description: similar to GenBank Accession Number BC003353
  misc_feature (1)..(85): Homolog of NCBI NO: 24665095 NR Description: CG5057-PA [Drosophila melanogaster]

SEQ ID NO: 91687 - protein, 105 aa, Arabidopsis thaliana; identical to SEQ ID NO: 77694
  peptide (1)..(105): Ceres Seq. ID no. 12728801
  misc_feature (1)..(105): Homolog of NCBI NO: 18396004 NR Description: Expressed protein; protein id: At1g26665.1, by cDNA: gi_13926326, supported by cDNA: gi_16323257 [Arabidopsis >gi|13926327|gb|AAK49628.1|AF372912_1 At1g26660/T24P13_4
  misc_feature (1)..(82): Homolog of NCBI NO: 25403266 NR Description: protein T24P13.4 [imported] - Arabidopsis >gi|9295719|gb|AAF87025.1|AC006535_3 T24P13.4 [Arabidopsis
  misc_feature (1)..(105): Homolog of NCBI NO: 15238215 NR Description: putative protein; protein id: At5g41910.1 thaliana] >gi|9757936|dbj|BAB08424.1| gene_id:MJC20.1~similar to protein~sp|P45966 [Arabidopsis thaliana]
  misc_feature (1)..(77): Homolog of NCBI NO: 34873422 NR Description: similar to DNA segment, Chr 13, Wayne State
  misc_feature (1)..(77): Homolog of NCBI NO: 20070410 NR Description: DNA segment, Chr 13, Wayne State University 50, [Mus musculus] >gi|27681537|ref|XP_214417.1| similar to DNA Chr 13, Wayne State University 50, expressed [Mus musculus]
  misc_feature (1)..(77): Homolog of NCBI NO: 29145113 NR Description: similar to DNA segment, Chr 13, Wayne State
  misc_feature (1)..(77): Homolog of NCBI NO: 13097162 NR Description: Similar to CG5057 gene product [Homo sapiens]
  misc_feature (1)..(80): Homolog of NCBI NO: 9799628 NR Description: Nut2 [Drosophila melanogaster]
  misc_feature (1)..(97): Homolog of NCBI NO: 29841376 NR Description: similar to GenBank Accession Number BC003353
  misc_feature (1)..(80): Homolog of NCBI NO: 24665095 NR Description: CG5057-PA [Drosophila melanogaster]

SEQ ID NO: 91688 - DNA, 923 bp, Arabidopsis thaliana
  misc_feature (1)..(923): Ceres Seq. ID no. 12728840
  misc_feature: MA Experiment ID: 108434 Result: Up-regulated in Transcription
  misc_feature: MA Experiment 108434 PARAMETER Experiment Name: At_Root_Tips_cDNA_P Parameter: Tissue Value: Root Tips
  misc_feature: MA Experiment ID: 108463 Result: Down-regulated in Transcription
  misc_feature: MA Experiment 108463 PARAMETER Experiment Name: At_Germinating_Seeds_cDNA_P Parameter: Age (day) Value: 3 vs. 0
  misc_feature: MA Experiment 108463 PARAMETER Experiment Name: At_Germinating_Seeds_cDNA_P Parameter: Tissue Value: Germinating Seeds
  misc_feature: MA Experiment ID: 108464 Result: Down-regulated in Transcription
  misc_feature: MA Experiment 108464 PARAMETER Experiment Name: At_Germinating_Seeds_cDNA_P Parameter: Age (day) Value: 4 vs. 0
  misc_feature: MA Experiment 108464 PARAMETER Experiment Name: At_Germinating_Seeds_cDNA_P Parameter: Tissue Value: Germinating Seeds
  misc_feature: MA Experiment ID: 108573 Result: Down-regulated in Transcription
  misc_feature: MA Experiment 108573 PARAMETER Experiment Name: At_Drought_cDNA_P Parameter: Timepoint (hr) Value: 6
  misc_feature: MA Experiment 108573 PARAMETER Experiment Name: At_Drought_cDNA_P Parameter: Tissue Value: Aerial
  misc_feature: MA Experiment 108573 PARAMETER Experiment Name: At_Drought_cDNA_P Parameter: Treatment Value: Drought vs. No Drought
  misc_feature: MA Experiment ID: 20000086 Result: Up-regulated in Transcription
  misc_feature: MA Experiment 20000086 PARAMETER Experiment Name: At_100uM_ABA_Mutants_cDNA_P Parameter: Plant Line Value: CS22
  misc_feature: MA Experiment 20000086 PARAMETER Experiment Name: At_100uM_ABA_Mutants_cDNA_P Parameter: Timepoint (hr) Value: 6
  misc_feature: MA Experiment 20000086 PARAMETER Experiment Name: At_100uM_ABA_Mutants_cDNA_P Parameter: Tissue Value: Aerial
  misc_feature: MA Experiment 20000086 PARAMETER Experiment Name: At_100uM_ABA_Mutants_cDNA_P Parameter: Treatment Value: 100uM ABA vs. No Treatment
  misc_feature: MA Experiment ID: 20000088 Result: Up-regulated in Transcription
  misc_feature: MA Experiment 20000088 PARAMETER Experiment Name: At_100uM_ABA_Mutants_cDNA_P Parameter: Plant Line Value: Landsberg
  misc_feature: MA Experiment 20000088 PARAMETER Experiment Name: At_100uM_ABA_Mutants_cDNA_P Parameter: Timepoint (hr) Value: 6
  misc_feature: MA Experiment 20000088 PARAMETER Experiment Name: At_100uM_ABA_Mutants_cDNA_P Parameter: Tissue Value: Aerial
  misc_feature: MA Experiment 20000088 PARAMETER Experiment Name: At_100uM_ABA_Mutants_cDNA_P Parameter: Treatment Value: 100uM ABA vs. No Treatment
  misc_feature: MA Experiment ID: 20000089 Result: Up-regulated in Transcription
  misc_feature: MA Experiment ID: 20000090 Result: Up-regulated in Transcription
  misc_feature: MA Experiment ID: 20000227 Result: Up-regulated in Transcription
  misc_feature: MA Experiment 20000227 PARAMETER Experiment Name: At_Root-Tips-vs-Tops_P Parameter: Tissue Value: Root Tips vs. Root Tops
  misc_feature: MA Experiment ID: 20001905 Result: Down-regulated in Transcription
  misc_feature: MA Experiment 20001905 PARAMETER Experiment Name: At_Drought_Reproduction_P Parameter: Age (day) Value: 40
  misc_feature: MA Experiment 20001905 PARAMETER Experiment Name: At_Drought_Reproduction_P Parameter: Organism Value: A. thaliana
  misc_feature: MA Experiment 20001905 PARAMETER Experiment Name: At_Drought_Reproduction_P Parameter: Plant Line Value: WS
  misc_feature: MA Experiment 20001905 PARAMETER Experiment Name: At_Drought_Reproduction_P Parameter: Timepoint (day) Value: 10
  misc_feature: MA Experiment 20001905 PARAMETER Experiment Name: At_Drought_Reproduction_P Parameter: Tissue Value: Rosettes
  misc_feature: MA Experiment 20001905 PARAMETER Experiment Name: At_Drought_Reproduction_P Parameter: Treatment Value: Drought vs. No Drought
ctattgagtctttagggtctctctgtgtttgcaaatctgacgccgagtattttgctaaagcagcagccagtcgggacagtgaaatggcgactgaagatgtgcaagatcccagaatcgctaagattgcctcttccattagagtcatccccgacttccctaaaccaggaatcatgtttcaggacataacgacgcttcttctcgacactgaggcctttaaggatactattgctttgtttgttgatagatacaaagataaaggcatatctgttgttgcaggtgttgaagctagaggtttcatttttggccctcctattgcgttggctattggtgccaaatttgttcccatgaggaagcccaagaagctacctgggaaggttatttcggaggagtattcgttggagtatggaacagatacgattgagatgcacgtaggtgcagtagagcctggtgagcgtgctattattattgatgacctcattgccacgggtgggactctcgctgctgcaatccgactacttgaacgagtaggagtgaagattgttgaatgtgcttgcgtaattgagttaccagagcttaagggaaaggagaaactaggagagacgtcgctatttgttcttgtaaagtcggctgcttaacaagaaactggaagagaaggttattggatcgagtgttgatgctatttttcatgtatggtgagacattttgcgtgggatttgatccttgttgtttcaacttatcataattggttcagactagaaaatggcatttgaatgtcaggattcgattgcagtttcctattgttccacttaaaatccccgattaataaggtgttatgggttttatttatagaatcaagttgtaatagtagactccaacaggggctaaagtcttggtaacgcaattcttcttttaagtttcgcagc

SEQ ID NO: 91689 - protein, 210 aa, Arabidopsis thaliana; identical to SEQ ID NO: 26646
  peptide (1)..(210): Ceres Seq. ID no. 12728841
  misc_feature (17)..(210): Homolog of NCBI NO: 18396344 NR Description: adenine phosphoribosyltransferase 1, APRT; id: At1g27450.1, supported by cDNA: 102971. [Arabidopsis >gi|21536559|gb|AAM60891.1| adenine phosphoribosyltransferase 1,
  misc_feature (28)..(210): Homolog of NCBI NO: 30689934 NR Description: adenine phosphoribosyltransferase 1, APRT thaliana] >gi|399046|sp|P31166|APT1_ARATH Adenine
  misc_feature (28)..(122): Homolog of NCBI NO: 25286872 NR Description: protein F17L21.24 [imported] - Arabidopsis >gi|9802535|gb|AAF99737.1|AC004557_16 F17L21.24 [Arabidopsis
  misc_feature (121)..(210): Homolog of NCBI NO: 25286872 NR Description: protein F17L21.24 [imported] - Arabidopsis >gi|9802535|gb|AAF99737.1|AC004557_16 F17L21.24 [Arabidopsis
  misc_feature (20)..(210): Homolog of NCBI NO: 32492063 NR Description: adenine phosphoribosyltransferase [Brassica napus]
  misc_feature (35)..(208): Homolog of NCBI NO: 9711921 NR Description: Adenine phosphoribosyltransferase [Hordeum
  misc_feature (35)..(208): Homolog of NCBI NO: 2499932 NR Description: Adenine phosphoribosyltransferase 1 (APRT)
  misc_feature (31)..(208): Homolog of NCBI NO: 33354190 NR Description: putative adenine phosphoribosyl transferase
  misc_feature (31)..(207): Homolog of NCBI NO: 15235709 NR Description: adenine phosphoribosyltransferase (EC 2.4.2.7) - protein; protein id: At4g22570.1, supported by cDNA: 11009. thaliana] >gi|7433929|pir||T05451 adenine
  misc_feature (28)..(207): Homolog of NCBI NO: 15234553 NR Description: putative adenine phosphoribosyltransferase; id: At4g12440.1 [Arabidopsis thaliana] >gi|7433935|pir||T07636

SEQ ID NO: 91690 - protein, 183 aa, Arabidopsis thaliana; identical to SEQ ID NO: 26647
  peptide (1)..(183): Ceres Seq. ID no. 12728842
  misc_feature (1)..(183): Homolog of NCBI NO: 18396344 NR Description: adenine phosphoribosyltransferase 1, APRT; id: At1g27450.1, supported by cDNA: 102971. [Arabidopsis >gi|21536559|gb|AAM60891.1| adenine phosphoribosyltransferase 1,
  misc_feature (1)..(183): Homolog of NCBI NO: 30689934 NR Description: adenine phosphoribosyltransferase 1, APRT thaliana] >gi|399046|sp|P31166|APT1_ARATH Adenine
  misc_feature (1)..(95): Homolog of NCBI NO: 25286872 NR Description: protein F17L21.24 [imported] - Arabidopsis >gi|9802535|gb|AAF99737.1|AC004557_16 F17L21.24 [Arabidopsis
  misc_feature (94)..(183): Homolog of NCBI NO: 25286872 NR Description: protein F17L21.24 [imported] - Arabidopsis >gi|9802535|gb|AAF99737.1|AC004557_16 F17L21.24 [Arabidopsis
  misc_feature (1)..(183): Homolog of NCBI NO: 32492063 NR Description: adenine phosphoribosyltransferase [Brassica napus]
  misc_feature (8)..(181): Homolog of NCBI NO: 9711921 NR Description: Adenine phosphoribosyltransferase [Hordeum
  misc_feature (8)..(181): Homolog of NCBI NO: 2499932 NR Description: Adenine phosphoribosyltransferase 1 (APRT)
  misc_feature (4)..(181): Homolog of NCBI NO: 33354190 NR Description: putative adenine phosphoribosyl transferase
  misc_feature (4)..(180): Homolog of NCBI NO: 15235709 NR Description: adenine phosphoribosyltransferase (EC 2.4.2.7) - protein; protein id: At4g22570.1, supported by cDNA: 11009. thaliana] >gi|7433929|pir||T05451 adenine
  misc_feature (1)..(180): Homolog of NCBI NO: 15234553 NR Description: putative adenine phosphoribosyltransferase; id: At4g12440.1 [Arabidopsis thaliana] >gi|7433935|pir||T07636

SEQ ID NO: 91691 - protein, 154 aa, Arabidopsis thaliana; identical to SEQ ID NO: 26648
  peptide (1)..(154): Ceres Seq. ID no. 12728843
  misc_feature (1)..(154): Homolog of NCBI NO: 18396344 NR Description: adenine phosphoribosyltransferase 1, APRT; id: At1g27450.1, supported by cDNA: 102971. [Arabidopsis >gi|21536559|gb|AAM60891.1| adenine phosphoribosyltransferase 1,
  misc_feature (1)..(154): Homolog of NCBI NO: 30689934 NR Description: adenine phosphoribosyltransferase 1, APRT thaliana] >gi|399046|sp|P31166|APT1_ARATH Adenine
  misc_feature (1)..(66): Homolog of NCBI NO: 25286872 NR Description: protein F17L21.24 [imported] - Arabidopsis >gi|9802535|gb|AAF99737.1|AC004557_16 F17L21.24 [Arabidopsis
  misc_feature (65)..(154): Homolog of NCBI NO: 25286872 NR Description: protein F17L21.24 [imported] - Arabidopsis >gi|9802535|gb|AAF99737.1|AC004557_16 F17L21.24 [Arabidopsis
  misc_feature (1)..(154): Homolog of NCBI NO: 32492063 NR Description: adenine phosphoribosyltransferase [Brassica napus]
  misc_feature (1)..(152): Homolog of NCBI NO: 9711921 NR Description: Adenine phosphoribosyltransferase [Hordeum
  misc_feature (1)..(152): Homolog of NCBI NO: 2499932 NR Description: Adenine phosphoribosyltransferase 1 (APRT)
  misc_feature (1)..(152): Homolog of NCBI NO: 33354190 NR Description: putative adenine phosphoribosyl transferase
  misc_feature (1)..(151): Homolog of NCBI NO: 15235709 NR Description: adenine phosphoribosyltransferase (EC 2.4.2.7) - protein; protein id: At4g22570.1, supported by cDNA: 11009. thaliana] >gi|7433929|pir||T05451 adenine
  misc_feature (1)..(151): Homolog of NCBI NO: 15234553 NR Description: putative adenine phosphoribosyltransferase; id: At4g12440.1 [Arabidopsis thaliana] >gi|7433935|pir||T07636

SEQ ID NO: 91692 - DNA, 1809 bp, Arabidopsis thaliana
  misc_feature (1)..(1809): Ceres Seq. ID no. 12728880
  misc_feature: MA Experiment ID: 20000180 Result: Down-regulated in Transcription
  misc_feature: MA Experiment 20000180 PARAMETER Experiment Name: At_Germinating_Seeds_P Parameter: Age (hr) Value: 24 vs. 0
  misc_feature: MA Experiment 20000180 PARAMETER Experiment Name: At_Germinating_Seeds_P Parameter: Tissue Value: Germinating Seeds
  misc_feature: MA Experiment ID: 20000286 Result: Up-regulated in Transcription
  misc_feature: MA Experiment 20000286 PARAMETER Experiment Name: At_Open_Flower_P Parameter: Age (day) Value: 21
  misc_feature: MA Experiment 20000286 PARAMETER Experiment Name: At_Open_Flower_P Parameter: Plant Line Value: WS
  misc_feature: MA Experiment 20000286 PARAMETER Experiment Name: At_Open_Flower_P Parameter: Tissue Value: Half Open vs. Whole Plant
  misc_feature: MA Experiment ID: 20000439 Result: Up-regulated in Transcription
  misc_feature: MA Experiment 20000439 PARAMETER Experiment Name: At_Roots__P Parameter: Age (day) Value: 14 vs. 21
  misc_feature: MA Experiment 20000439 PARAMETER Experiment Name: At_Roots__P Parameter: Organism Value: A. thaliana
  misc_feature: MA Experiment 20000439 PARAMETER Experiment Name: At_Roots__P Parameter: Tissue Value: Roots vs. Whole Plant
  misc_feature: MA Experiment ID: 20000794 Result: Up-regulated in Transcription
  misc_feature: MA Experiment 20000794 PARAMETER Experiment Name: At_Petals_P Parameter: Age (day) Value: 23-25 days
  misc_feature: MA Experiment 20000794 PARAMETER Experiment Name: At_Petals_P Parameter: Plant Line Value: WS
  misc_feature: MA Experiment 20000794 PARAMETER Experiment Name: At_Petals_P Parameter: Tissue Value: Petals vs. Whole plant
  misc_feature: MA Experiment ID: 20001451 Result: Down-regulated in Transcription
  misc_feature: MA Experiment 20001451 PARAMETER Experiment Name: At_Far-red-induction_P Parameter: Age (day) Value: 7
  misc_feature: MA Experiment 20001451 PARAMETER Experiment Name: At_Far-red-induction_P Parameter: Light Value: Far-red vs. White
  misc_feature: MA Experiment 20001451 PARAMETER Experiment Name: At_Far-red-induction_P Parameter: Organism Value: A. thaliana
  misc_feature: MA Experiment 20001451 PARAMETER Experiment Name: At_Far-red-induction_P Parameter: Plant Line Value: Columbia
  misc_feature: MA Experiment 20001451 PARAMETER Experiment Name: At_Far-red-induction_P Parameter: Timepoint (hr) Value: 24
  misc_feature: MA Experiment 20001451 PARAMETER Experiment Name: At_Far-red-induction_P Parameter: Tissue Value: Whole Plant
  misc_feature: MA Experiment ID: 20001554 Result: Up-regulated in Transcription
  misc_feature: MA Experiment 20001554 PARAMETER Experiment Name: At_Drought_Soil_Dry_P Parameter: Age (day) Value: 21
  misc_feature: MA Experiment 20001554 PARAMETER Experiment Name: At_Drought_Soil_Dry_P Parameter: Organism Value: A. thaliana
  misc_feature: MA Experiment 20001554 PARAMETER Experiment Name: At_Drought_Soil_Dry_P Parameter: Plant Line Value: WS
  misc_feature: MA Experiment 20001554 PARAMETER Experiment Name: At_Drought_Soil_Dry_P Parameter: Post Timepoint (hr) Value: None
  misc_feature: MA Experiment 20001554 PARAMETER Experiment Name: At_Drought_Soil_Dry_P Parameter: Post-Treatment Value: None
  misc_feature: MA Experiment 20001554 PARAMETER Experiment Name: At_Drought_Soil_Dry_P Parameter: Timepoint (day) Value: 7
  misc_feature: MA Experiment 20001554 PARAMETER Experiment Name: At_Drought_Soil_Dry_P Parameter: Treatment Value: Drought vs. No Drought
atggatccaggagatcctacttcgatacttttcacaaagatcagaactttagaaccagatttcgcttccaaaatcattggttacttgcttttacaggacttgggtaagacagatttgatgcgtttggctcttggaccagagactctcttgcagtccgtttgtctcaaagctaaatctgctttaggtctttcttctaatggatcttcttctgcttcttcgccattgaaccctatctccagacccattaacatccaccgtcattctctctctcactcttcaccgggaaatgggttttcgaggaaccctttgtctccttcttttgctactcctggttcactcggaagtaaccctaacatgatttcgagtccgtttcaagcaagttcgtctctttttgcttctgacggtgctgctgctggtgattccactggaaacggcgatttcctcgatgagcagcaactagggaactacttgtcgtttcttaacgaatcttcttcgaagaataacgacgaatctctggatccgtttgggttctcggctgataacggcgatgcccatttgcataagaggagtttctcagccagtgatgcttgttttgggtcagaggagcccggatttggtggcgggggttacaacaggttccttcacggtggtttaggtgatgattttgattctcctggtggttttggctcgccggattatgtttctagacagcaagaggagattgtgaggatgaagatggctcagagacagcgaatggctgctgctcagtacttggcggctactggttctccaatgtcgtatgagaaaggcctcaattttctcttgcatcagcgtaatgcgcatagatcaggagcaggacaatttggggaagagggttactggtttggtagtccaggccggcatgaaagggatgagtttatggggatgggagataaatctaactctgcatctaaacagatttacttgacatttccagctgacagctccttcacagatgaagatgtctccaattattttggcaattttggaccagtgcaagatgttaggattccataccagcagaaacggatgtttgggtttgtcacttttctccactctgaaactgtgagaatcatattggccagaggaaatcctcatttcatctgtgactcacgtgtgcttgttaaaccgtacaaggagaagggaagaatccttgaaaagaggcagcagcaacaactgctgcagcagatggagagaggaaacttttctcctggttcaagtccatctggaatggattccagggatctctttgattctcatctcgcaccaaggatgttttctaacacacaggagatgatgaggagaaaagctgagcaagctgacctgcaacaagcaatagaattccaaaggagaagatttttgagtctgcagttgcccgacatggacagtgaatcgtttctccatcaccagcgtagtctttccattggatcccccgtccatttttcccctcgtgtcaatcaaagcatgctctttcgatcagaaagcaccagtgatgaagtcttcgaaggtaatggtgattcaggacatcagtctgaagcaacccgagcttttctgagtgatactggtcataacatcagccaagaacgtggttacaatagccatcttaacaaagggcaagagacaagtctggagaatactctgcctgatagcttctttgcttccccatcaaagacaggtgaaacccaacaccccgagtttgagaaagagaattgtgctactatctctgttactacagaaaataaggcagcctcgtcacttcaatcagcctag

SEQ ID NO: 91693 - protein, 602 aa, Arabidopsis thaliana
  peptide (1)..(602): Ceres Seq. ID no. 12728881
  misc_feature (331)..(388): Pfam Name: RNA recognition motif. (a.k.a. RRM, RBD, or RNP domain) Pfam Description: RNA recognition motif. (a.k.a. RRM, RBD, or RNP
  misc_feature (1)..(590): Homolog of NCBI NO: 11994270 NR Description: emb|CAB41315.1~gene_id:MSA6.14~similar to unknown
  misc_feature (57)..(593): Homolog of NCBI NO: 14586374 NR Description: putative protein [Arabidopsis thaliana]
  misc_feature (1)..(27): Homolog of NCBI NO: 14586374 NR Description: putative protein [Arabidopsis thaliana]
  misc_feature (1)..(209): Homolog of NCBI NO: 15217946 NR Description: unknown protein; protein id: At1g51520.1, by cDNA: gi_20268749, supported by cDNA: gi_21281142 [Arabidopsis
  misc_feature (281)..(465): Homolog of NCBI NO: 15217946 NR Description: unknown protein; protein id: At1g51520.1, by cDNA: gi_20268749, supported by cDNA: gi_21281142 [Arabidopsis
  misc_feature (281)..(524): Homolog of NCBI NO: 30695000 NR Description: expressed protein [Arabidopsis thaliana]
  misc_feature (1)..(209): Homolog of NCBI NO: 30695000 NR Description: expressed protein [Arabidopsis thaliana]
  misc_feature (141)..(305): Homolog of NCBI NO: 15217946 NR Description: unknown protein; protein id: At1g51520.1, by cDNA: gi_20268749, supported by cDNA: gi_21281142 [Arabidopsis
  misc_feature (141)..(305): Homolog of NCBI NO: 30695000 NR Description: expressed protein [Arabidopsis thaliana]
  misc_feature (50)..(593): Homolog of NCBI NO: 26453236 NR Description: unknown protein [Arabidopsis thaliana]
MDPGDPTSILFTKIRTLEPDFASKIIGYLLLQDLGKTDLMRLALGPETLLQSVCLKAKSALGLSSNGSSSASSPLNPISRPINIHRHSLSHSSPGNGFSRNPLSPSFATPGSLGSNPNMISSPFQASSSLFASDGAAAGDSTGNGDFLDEQQLGNYLSFLNESSSKNNDESLDPFGFSADNGDAHLHKRSFSASDACFGSEEPGFGGGGYNRFLHGGLGDDFDSPGGFGSPDYVSRQQEEIVRMKMAQRQRMAAAQYLAATGSPMSYEKGLNFLLHQRNAHRSGAGQFGEEGYWFGSPGRHERDEFMGMGDKSNSASKQIYLTFPADSSFTDEDVSNYFGNFGPVQDVRIPYQQKRMFGFVTFLHSETVRIILARGNPHFICDSRVLVKPYKEKGRILEKRQQQQLLQQMERGNFSPGSSPSGMDSRDLFDSHLAPRMFSNTQEMMRRKAEQADLQQAIEFQRRRFLSLQLPDMDSESFLHHQRSLSIGSPVHFSPRVNQSMLFRSESTSDEVFEGNGDSGHQSEATRAFLSDTGHNISQERGYNSHLNKGQETSLENTLPDSFFASPSKTGETQHPEFEKENCATISVTTENKAASSLQSA

SEQ ID NO: 91694 - protein, 563 aa, Arabidopsis thaliana
  peptide (1)..(563): Ceres Seq. ID no. 12728882
  misc_feature (292)..(349): Pfam Name: RNA recognition motif. (a.k.a. RRM, RBD, or RNP domain) Pfam Description: RNA recognition motif. (a.k.a. RRM, RBD, or RNP
  misc_feature (1)..(551): Homolog of NCBI NO: 11994270 NR Description: emb|CAB41315.1~gene_id:MSA6.14~similar to unknown
  misc_feature (18)..(554): Homolog of NCBI NO: 14586374 NR Description: putative protein [Arabidopsis thaliana]
  misc_feature (1)..(170): Homolog of NCBI NO: 15217946 NR Description: unknown protein; protein id: At1g51520.1, by cDNA: gi_20268749, supported by cDNA: gi_21281142 [Arabidopsis
  misc_feature (242)..(426): Homolog of NCBI NO: 15217946 NR Description: unknown protein; protein id: At1g51520.1, by cDNA: gi_20268749, supported by cDNA: gi_21281142 [Arabidopsis
  misc_feature (242)..(485): Homolog of NCBI NO: 30695000 NR Description: expressed protein [Arabidopsis thaliana]
  misc_feature (1)..(170): Homolog of NCBI NO: 30695000 NR Description: expressed protein [Arabidopsis thaliana]
  misc_feature (102)..(266): Homolog of NCBI NO: 15217946 NR Description: unknown protein; protein id: At1g51520.1, by cDNA: gi_20268749, supported by cDNA: gi_21281142 [Arabidopsis
  misc_feature (102)..(266): Homolog of NCBI NO: 30695000 NR Description: expressed protein [Arabidopsis thaliana]
  misc_feature (11)..(554): Homolog of NCBI NO: 26453236 NR Description: unknown protein [Arabidopsis thaliana]
  misc_feature (25)..(554): Homolog of NCBI NO: 30684113 NR Description: expressed protein [Arabidopsis thaliana]
MRLALGPETLLQSVCLKAKSALGLSSNGSSSASSPLNPISRPINIHRHSLSHSSPGNGFSRNPLSPSFATPGSLGSNPNMISSPFQASSSLFASDGAAAGDSTGNGDFLDEQQLGNYLSFLNESSSKNNDESLDPFGFSADNGDAHLHKRSFSASDACFGSEEPGFGGGGYNRFLHGGLGDDFDSPGGFGSPDYVSRQQEEIVRMKMAQRQRMAAAQYLAATGSPMSYEKGLNFLLHQRNAHRSGAGQFGEEGYWFGSPGRHERDEFMGMGDKSNSASKQIYLTFPADSSFTDEDVSNYFGNFGPVQDVRIPYQQKRMFGFVTFLHSETVRIILARGNPHFICDSRVLVKPYKEKGRILEKRQQQQLLQQMERGNFSPGSSPSGMDSRDLFDSHLAPRMFSNTQEMMRRKAEQADLQQAIEFQRRRFLSLQLPDMDSESFLHHQRSLSIGSPVHFSPRVNQSMLFRSESTSDEVFEGNGDSGHQSEATRAFLSDTGHNISQERGYNSHLNKGQETSLENTLPDSFFASPSKTGETQHPEFEKENCATISVTTENKAASSLQSA

SEQ ID NO: 91695 - protein, 484 aa, Arabidopsis thaliana
  peptide (1)..(484): Ceres Seq. ID no. 12728883
  misc_feature (213)..(270): Pfam Name: RNA recognition motif. (a.k.a. RRM, RBD, or RNP domain) Pfam Description: RNA recognition motif. (a.k.a. RRM, RBD, or RNP
  misc_feature (1)..(472): Homolog of NCBI NO: 11994270 NR Description: emb|CAB41315.1~gene_id:MSA6.14~similar to unknown
  misc_feature (1)..(475): Homolog of NCBI NO: 14586374 NR Description: putative protein [Arabidopsis thaliana]
  misc_feature (1)..(91): Homolog of NCBI NO: 15217946 NR Description: unknown protein; protein id: At1g51520.1, by cDNA: gi_20268749, supported by cDNA: gi_21281142 [Arabidopsis
  misc_feature (163)..(347): Homolog of NCBI NO: 15217946 NR Description: unknown protein; protein id: At1g51520.1, by cDNA: gi_20268749, supported by cDNA: gi_21281142 [Arabidopsis
  misc_feature (163)..(406): Homolog of NCBI NO: 30695000 NR Description: expressed protein [Arabidopsis thaliana]
  misc_feature (1)..(91): Homolog of NCBI NO: 30695000 NR Description: expressed protein [Arabidopsis thaliana]
  misc_feature (23)..(187): Homolog of NCBI NO: 15217946 NR Description: unknown protein; protein id: At1g51520.1, by cDNA: gi_20268749, supported by cDNA: gi_21281142 [Arabidopsis
  misc_feature (23)..(187): Homolog of NCBI NO: 30695000 NR Description: expressed protein [Arabidopsis thaliana]
  misc_feature (1)..(475): Homolog of NCBI NO: 26453236 NR Description: unknown protein [Arabidopsis thaliana]
  misc_feature (1)..(475): Homolog of NCBI NO: 30684113 NR Description: expressed protein [Arabidopsis thaliana]
MISSPFQASSSLFASDGAAAGDSTGNGDFLDEQQLGNYLSFLNESSSKNNDESLDPFGFSADNGDAHLHKRSFSASDACFGSEEPGFGGGGYNRFLHGGLGDDFDSPGGFGSPDYVSRQQEEIVRMKMAQRQRMAAAQYLAATGSPMSYEKGLNFLLHQRNAHRSGAGQFGEEGYWFGSPGRHERDEFMGMGDKSNSASKQIYLTFPADSSFTDEDVSNYFGNFGPVQDVRIPYQQKRMFGFVTFLHSETVRIILARGNPHFICDSRVLVKPYKEKGRILEKRQQQQLLQQMERGNFSPGSSPSGMDSRDLFDSHLAPRMFSNTQEMMRRKAEQADLQQAIEFQRRRFLSLQLPDMDSESFLHHQRSLSIGSPVHFSPRVNQSMLFRSESTSDEVFEGNGDSGHQSEATRAFLSDTGHNISQERGYNSHLNKGQETSLENTLPDSFFASPSKTGETQHPEFEKENCATISVTTENKAASSLQSA

SEQ ID NO: 91696 - DNA, 1083 bp, Arabidopsis thaliana
  misc_feature (1)..(1083): Ceres Seq. ID no. 12728893
  misc_feature: MA Experiment ID: 20000495 Result: Down-regulated in Transcription
  misc_feature: MA Experiment 20000495 PARAMETER Experiment Name: At_Guard_Cells_P Parameter: Harvest Date Value: 8/2/2002
  misc_feature: MA Experiment 20000495 PARAMETER Experiment Name: At_Guard_Cells_P Parameter: Organism Value: A. thaliana
  misc_feature: MA Experiment 20000495 PARAMETER Experiment Name: At_Guard_Cells_P Parameter: Tissue Value: Guard Cells vs. Leaves
  misc_feature: MA Experiment ID: 20000527 Result: Up-regulated in Transcription
  misc_feature: MA Experiment 20000527 PARAMETER Experiment Name: At_10percent_PEG_P Parameter: Age (day) Value: 20
  misc_feature: MA Experiment 20000527 PARAMETER Experiment Name: At_10percent_PEG_P Parameter: Organism Value: A. thaliana
  misc_feature: MA Experiment 20000527 PARAMETER Experiment Name: At_10percent_PEG_P Parameter: Plant Line Value: WS
  misc_feature: MA Experiment 20000527 PARAMETER Experiment Name: At_10percent_PEG_P Parameter: Timepoint (day) Value: 20
  misc_feature: MA Experiment 20000527 PARAMETER Experiment Name: At_10percent_PEG_P Parameter: Tissue Value: Whole Plant
  misc_feature: MA Experiment 20000527 PARAMETER Experiment Name: At_10percent_PEG_P Parameter: Treatment Value: 10percent PEG vs. No Treatment
  misc_feature: MA Experiment ID: 20001247 Result: Up-regulated in Transcription
  misc_feature: MA Experiment 20001247 PARAMETER Experiment Name: At_Far-red-induction_P Parameter: Age (day) Value: 7
  misc_feature: MA Experiment 20001247 PARAMETER Experiment Name: At_Far-red-induction_P Parameter: Light Value: Far-red vs. White
  misc_feature: MA Experiment 20001247 PARAMETER Experiment Name: At_Far-red-induction_P Parameter: Organism Value: A. thaliana
  misc_feature: MA Experiment 20001247 PARAMETER Experiment Name: At_Far-red-induction_P Parameter: Plant Line Value: Columbia
  misc_feature: MA Experiment 20001247 PARAMETER Experiment Name: At_Far-red-induction_P Parameter: Timepoint (hr) Value: 1
  misc_feature: MA Experiment 20001247 PARAMETER Experiment Name: At_Far-red-induction_P Parameter: Tissue Value: Whole Plant
atggcgaatcttaccttagagctcaacgtttactcagcaaaagatcttgaaaatgtcaacctcatcacaaaaatggacgtatacgccgtcgtttggatcaccggcgatgattctcggaagaatcataaggagaaaacccccatcgatcgcaccggagaatctgagcctacttggaatcacaccgtcaaattttccgttgatcaaaggttagcacacgaaggtcgtttaaccctcgtcgtgaaattggtctgcgatcggatcttcggcgacaaagatctcggagaggtccaagtcccggttcttgagcttcttcatggttcttcgtcgccgtcatctaacggtgacggtcaggggatgatgagatttgttacgtatcaggtcagaactccgtttggaaaaggtcaaggctcgttgactttttcgtaccggttcgattcaccgacatttaaaccggatcaaccggtttcatcacacgttttccaccaggatccaccggtatcatcatcacacgtttacacgaatccgatggatataccgtctgatttctcgtcggcgacgacaaattatcctccgccgcaatcgtctgaagcaaatttctatccaccattatcatcgattggatatcctccgtcgtctccgccgcaacattattcctcaccgccgtacccgtacccgaacccgtatcagtaccattctcattacccggaacagccagtcgctgtttatccacctccgccaccctctgcatcgaatttatatcctccgccgtattacagtacttctccgccgcagcatcaatcctatccgccgcctcccggccattcgttccaccaaacgcaaccgtcacagtcgtttcacgggttcgcgccttcgtctccgcagaatcagcacgggtatggttatccgccgccgacgtcaccgggatatggatacggttgtccgactacacaagtgccgccgaagaataataataataaaccagggcttgggcttgggcttggagtgggagctgggcttctgggaggagcattgggtgggctcttaatcagtgatatagtatccgacattggttttgatttttaa

SEQ ID NO: 91697 - protein, 360 aa, Arabidopsis thaliana
  peptide (1)..(360): Ceres Seq. ID no. 12728894
  misc_feature (6)..(97): Pfam Name: C2 domain Pfam Description: C2 domain
  misc_feature (1)..(360): Homolog of NCBI NO: 15228227 NR Description: unknown protein; protein id: At3g16510.1 thaliana] >gi|9279650|dbj|BAB01150.1| contains similarity to SRC2
  misc_feature (1)..(182): Homolog of NCBI NO: 22328677 NR Description: hypothetical protein; protein id: At4g15755.1
  misc_feature (273)..(356): Homolog of NCBI NO: 22328677 NR Description: hypothetical protein; protein id: At4g15755.1
  misc_feature (1)..(355): Homolog of NCBI NO: 34907166 NR Description: P0423A12.20 [Oryza sativa (japonica
  misc_feature (1)..(229): Homolog of NCBI NO: 7485202 NR Description: hypothetical protein - Arabidopsis thaliana hypothetical protein [Arabidopsis thaliana]
  misc_feature (5)..(289): Homolog of NCBI NO: 11358845 NR Description: shock protein SRC2 homolog [imported] -
  misc_feature (5)..(289): Homolog of NCBI NO: 18390977 NR Description: expressed protein; protein id: At1g09070.1, by cDNA: gi_15010557 [Arabidopsis thaliana]
MANLTLELNVYSAKDLENVNLITKMDVYAVVWITGDDSRKNHKEKTPIDRTGESEPTWNHTVKFSVDQRLAHEGRLTLVVKLVCDRIFGDKDLGEVQVPVLELLHGSSSPSSNGDGQGMMRFVTYQVRTPFGKGQGSLTFSYRFDSPTFKPDQPVSSHVFHQDPPVSSSHVYTNPMDIPSDFSSATTNYPPPQSSEANFYPPLSSIGYPPSSPPQHYSSPPYPYPNPYQYHSHYPEQPVAVYPPPPPSASNLYPPPYYSTSPPQHQSYPPPPGHSFHQTQPSQSFHGFAPSSPQNQHGYGYPPPTSPGYGYGCPTTQVPPKNNNNKPGLGLGLGVGAGLLGGALGGLLISDIVSDIGFDF

SEQ ID NO: 91698 - protein, 336 aa, Arabidopsis thaliana
  peptide (1)..(336): Ceres Seq. ID no. 12728895
  misc_feature (1)..(73): Pfam Name: C2 domain Pfam Description: C2 domain
  misc_feature (1)..(336): Homolog of NCBI NO: 15228227 NR Description: unknown protein; protein id: At3g16510.1 thaliana] >gi|9279650|dbj|BAB01150.1| contains similarity to SRC2
  misc_feature (1)..(158): Homolog of NCBI NO: 22328677 NR Description: hypothetical protein; protein id: At4g15755.1
  misc_feature (249)..(332): Homolog of NCBI NO: 22328677 NR Description: hypothetical protein; protein id: At4g15755.1
  misc_feature (1)..(331): Homolog of NCBI NO: 34907166 NR Description: P0423A12.20 [Oryza sativa (japonica
  misc_feature (1)..(205): Homolog of NCBI NO: 7485202 NR Description: hypothetical protein - Arabidopsis thaliana hypothetical protein [Arabidopsis thaliana]
  misc_feature (1)..(265): Homolog of NCBI NO: 11358845 NR Description: shock protein SRC2 homolog [imported] -
  misc_feature (1)..(265): Homolog of NCBI NO: 18390977 NR Description: expressed protein; protein id: At1g09070.1, by cDNA: gi_15010557 [Arabidopsis thaliana]
MDVYAVVWITGDDSRKNHKEKTPIDRTGESEPTWNHTVKFSVDQRLAHEGRLTLVVKLVCDRIFGDKDLGEVQVPVLELLHGSSSPSSNGDGQGMMRFVTYQVRTPFGKGQGSLTFSYRFDSPTFKPDQPVSSHVFHQDPPVSSSHVYTNPMDIPSDFSSATTNYPPPQSSEANFYPPLSSIGYPPSSPPQHYSSPPYPYPNPYQYHSHYPEQPVAVYPPPPPSASNLYPPPYYSTSPPQHQSYPPPPGHSFHQTQPSQSFHGFAPSSPQNQHGYGYPPPTSPGYGYGCPTTQVPPKNNNNKPGLGLGLGVGAGLLGGALGGLLISDIVSDIGFDF

SEQ ID NO: 91699 - protein, 242 aa, Arabidopsis thaliana
  peptide (1)..(242): Ceres Seq. ID no. 12728896
  misc_feature (43)..(190): Pfam Name: Atrophin-1 family Pfam Description: Atrophin-1 family
  misc_feature (1)..(242): Homolog of NCBI NO: 15228227 NR Description: unknown protein; protein id: At3g16510.1 thaliana] >gi|9279650|dbj|BAB01150.1| contains similarity to SRC2
  misc_feature (1)..(64): Homolog of NCBI NO: 22328677 NR Description: hypothetical protein; protein id: At4g15755.1
  misc_feature (155)..(238): Homolog of NCBI NO: 22328677 NR Description: hypothetical protein; protein id: At4g15755.1
  misc_feature (1)..(237): Homolog of NCBI NO: 34907166 NR Description: P0423A12.20 [Oryza sativa (japonica
  misc_feature (1)..(111): Homolog of NCBI NO: 7485202 NR Description: hypothetical protein - Arabidopsis thaliana hypothetical protein [Arabidopsis thaliana]
  misc_feature (1)..(171): Homolog of NCBI NO: 11358845 NR Description: shock protein SRC2 homolog [imported] -
  misc_feature (1)..(171): Homolog of NCBI NO: 18390977 NR Description: expressed protein; protein id: At1g09070.1, by cDNA: gi_15010557 [Arabidopsis thaliana]
MMRFVTYQVRTPFGKGQGSLTFSYRFDSPTFKPDQPVSSHVFHQDPPVSSSHVYTNPMDIPSDFSSATTNYPPPQSSEANFYPPLSSIGYPPSSPPQHYSSPPYPYPNPYQYHSHYPEQPVAVYPPPPPSASNLYPPPYYSTSPPQHQSYPPPPGHSFHQTQPSQSFHGFAPSSPQNQHGYGYPPPTSPGYGYGCPTTQVPPKNNNNKPGLGLGLGVGAGLLGGALGGLLISDIVSDIGFDF

SEQ ID NO: 91700 - DNA, 1428 bp, Arabidopsis thaliana
  misc_feature (1)..(1428): Ceres Seq. ID no. 12728922
  misc_feature: MA Experiment ID: 20000180 Result: Up-regulated in Transcription
  misc_feature: MA Experiment 20000180 PARAMETER Experiment Name: At_Germinating_Seeds_P Parameter: Age (hr) Value: 24 vs. 0
  misc_feature: MA Experiment 20000180 PARAMETER Experiment Name: At_Germinating_Seeds_P Parameter: Tissue Value: Germinating Seeds
atgaattccaacttcgggaagagatcatccggatcgaccaatagctttgatttcgatctggggcttggatcgagccaaggtagacctctgaatggtcagaagagccaaacatcttcttattcgagctcgaattcgcagccgagacctgcgtggcagcctggtaagccgtcgtggacgcatcaacctgcaccgaagcagagtacgatccgatctgagatcggaagtggaccgacttcaatggtgggtgatattcatggtaagacgtgggggtcagcttcgggatcgggttcgggtattgggattgtgaataaggatcctagtttgtttggagatttggttggttctgcgataggtcaaggtaaatctagtagaaacgtgccgttgaagaatgcaccgcctgtttcggcttcaggttcgagtaagagtccttattctatggggaatttgggtgattcgttgcctaaatctggtaattcgatgaaaactggtggtggtatgggttatagcagtaatccgagtggtttttctggtggttacacgagctccggtggttttaatgctaatcttggaggtccttcaatgaaaaatatggctgggggcaatctaaatgggtctggtcttccttcgaatagtgatccatttggttctttggttggtttcggatcaaaatcatcaggaagcaaaccaggaaaggttaacaacaatgcacagaatgatacttttgggaattttcaaggagtgtcgaaccttaacagtggcggttctacgggaacaactactcaaatcaacgactttgggggtttccaggcttcgaaatcaaacacattctcatcaggaggtagcttcaatgcttcaaacgttgattttggtgtgcaaccaagtggtccacaatcttcgagtgcaaacgatgatccattaggaatgttctctaattccaaaccctcagctgcaccacctacgccacagaccgaagattggggatttgaaagttttgacggtggggctggttccaccaccgagcttgatggtttgccaccgcctccaccgggtgtatcagctacatcagctaagaacaagggcattgataaccagagacaaggtcagtatgctgatgccataaagtggctctcttgggctgtgattcttatggatagagctggtgatgaagctggatcagccgaggttctttcaacaagggcttcgtgttacaaagaagttggagagtataagaaagctgtagccgactgcacaaaggtacttgatcacgacaagaagaatgtgaccattctggttcaacgagcactgttatacgagagcatggagaaatacaaactcggagctgaagacctaaggatggttctaaagattgatcccgggaatagaatcgctagaagtactgttcaccgcctaaccaaaatggctggttga

SEQ ID NO: 91701 - protein, 475 aa, Arabidopsis thaliana
  peptide (1)..(475): Ceres Seq. ID no. 12728923
  misc_feature (1)..(475): Homolog of NCBI NO: 30684217 NR Description: tetratricopeptide repeat (TPR)-containing protein
  misc_feature (1)..(426): Homolog of NCBI NO: 30684223 NR Description: tetratricopeptide repeat (TPR)-containing protein
  misc_feature (1)..(377): Homolog of NCBI NO: 11994631 NR Description: gene_id:MGL6.23~unknown protein [Arabidopsis
  misc_feature (22)..(475): Homolog of NCBI NO: 30684223 NR Description: tetratricopeptide repeat (TPR)-containing protein
  misc_feature (22)..(419): Homolog of NCBI NO: 11994631 NR Description: gene_id:MGL6.23~unknown protein [Arabidopsis
  misc_feature (88)..(362): Homolog of NCBI NO: 7511706 NR Description: lustrin A - California red abalone
  misc_feature (54)..(351): Homolog of NCBI NO: 7511706 NR Description: lustrin A - California red abalone
  misc_feature (21)..(323): Homolog of NCBI NO: 7511706 NR Description: lustrin A - California red abalone
  misc_feature (9)..(296): Homolog of NCBI NO: 7511706 NR Description: lustrin A - California red abalone
  misc_feature (24)..(302): Homolog of NCBI NO: 19570055 NR Description: similar to Dictyostelium discoideum (Slime mold).
MNSNFGKRSSGSTNSFDFDLGLGSSQGRPLNGQKSQTSSYSSSNSQPRPAWQPGKPSWTHQPAPKQSTIRSEIGSGPTSMVGDIHGKTWGSASGSGSGIGIVNKDPSLFGDLVGSAIGQGKSSRNVPLKNAPPVSASGSSKSPYSMGNLGDSLPKSGNSMKTGGGMGYSSNPSGFSGGYTSSGGFNANLGGPSMKNMAGGNLNGSGLPSNSDPFGSLVGFGSKSSGSKPGKVNNNAQNDTFGNFQGVSNLNSGGSTGTTTQINDFGGFQASKSNTFSSGGSFNASNVDFGVQPSGPQSSSANDDPLGMFSNSKPSAAPPTPQTEDWGFESFDGGAGSTTELDGLPPPPPGVSATSAKNKGIDNQRQGQYADAIKWLSWAVILMDRAGDEAGSAEVLSTRASCYKEVGEYKKAVADCTKVLDHDKKNVTILVQRALLYESMEKYKLGAEDLRMVLKIDPGNRIARSTVHRLTKMAG

SEQ ID NO: 91702 - protein, 396 aa, Arabidopsis thaliana
  peptide (1)..(396): Ceres Seq. ID no. 12728924
  misc_feature (1)..(396): Homolog of NCBI NO: 30684217 NR Description: tetratricopeptide repeat (TPR)-containing protein
  misc_feature (1)..(347): Homolog of NCBI NO: 30684223 NR Description: tetratricopeptide repeat (TPR)-containing protein
  misc_feature (1)..(298): Homolog of NCBI NO: 11994631 NR Description: gene_id:MGL6.23~unknown protein [Arabidopsis
  misc_feature (1)..(396): Homolog of NCBI NO: 30684223 NR Description: tetratricopeptide repeat (TPR)-containing protein
  misc_feature (1)..(340): Homolog of NCBI NO: 11994631 NR Description: gene_id:MGL6.23~unknown protein [Arabidopsis
  misc_feature (9)..(283): Homolog of NCBI NO: 7511706 NR Description: lustrin A - California red abalone
  misc_feature (1)..(272): Homolog of NCBI NO: 7511706 NR Description: lustrin A - California red abalone
  misc_feature (1)..(244): Homolog of NCBI NO: 7511706 NR Description: lustrin A - California red abalone
  misc_feature (1)..(217): Homolog of NCBI NO: 7511706 NR Description: lustrin A - California red abalone
  misc_feature (1)..(223): Homolog of NCBI NO: 19570055 NR Description: similar to Dictyostelium discoideum (Slime mold).
MVGDIHGKTWGSASGSGSGIGIVNKDPSLFGDLVGSAIGQGKSSRNVPLKNAPPVSASGSSKSPYSMGNLGDSLPKSGNSMKTGGGMGYSSNPSGFSGGYTSSGGFNANLGGPSMKNMAGGNLNGSGLPSNSDPFGSLVGFGSKSSGSKPGKVNNNAQNDTFGNFQGVSNLNSGGSTGTTTQINDFGGFQASKSNTFSSGGSFNASNVDFGVQPSGPQSSSANDDPLGMFSNSKPSAAPPTPQTEDWGFESFDGGAGSTTELDGLPPPPPGVSATSAKNKGIDNQRQGQYADAIKWLSWAVILMDRAGDEAGSAEVLSTRASCYKEVGEYKKAVADCTKVLDHDKKNVTILVQRALLYESMEKYKLGAEDLRMVLKIDPGNRIARSTVHRLTKMAG

SEQ ID NO: 91703 - protein, 330 aa, Arabidopsis thaliana
  peptide (1)..(330): Ceres Seq. ID no. 12728925
  misc_feature (1)..(330): Homolog of NCBI NO: 30684217 NR Description: tetratricopeptide repeat (TPR)-containing protein
  misc_feature (1)..(281): Homolog of NCBI NO: 30684223 NR Description: tetratricopeptide repeat (TPR)-containing protein
  misc_feature (1)..(232): Homolog of NCBI NO: 11994631 NR Description: gene_id:MGL6.23~unknown protein [Arabidopsis
  misc_feature (1)..(330): Homolog of NCBI NO: 30684223 NR Description: tetratricopeptide repeat (TPR)-containing protein
  misc_feature (1)..(274): Homolog of NCBI NO: 11994631 NR Description: gene_id:MGL6.23~unknown protein [Arabidopsis
  misc_feature (1)..(217): Homolog of NCBI NO: 7511706 NR Description: lustrin A - California red abalone
  misc_feature (1)..(206): Homolog of NCBI NO: 7511706 NR Description: lustrin A - California red abalone
  misc_feature (1)..(178): Homolog of NCBI NO: 7511706 NR Description: lustrin A - California red abalone
  misc_feature (1)..(151): Homolog of NCBI NO: 7511706 NR Description: lustrin A - California red abalone
  misc_feature (1)..(157): Homolog of NCBI NO: 19570055 NR Description: similar to Dictyostelium discoideum (Slime mold).
MGNLGDSLPKSGNSMKTGGGMGYSSNPSGFSGGYTSSGGFNANLGGPSMKNMAGGNLNGSGLPSNSDPFGSLVGFGSKSSGSKPGKVNNNAQNDTFGNFQGVSNLNSGGSTGTTTQINDFGGFQASKSNTFSSGGSFNASNVDFGVQPSGPQSSSANDDPLGMFSNSKPSAAPPTPQTEDWGFESFDGGAGSTTELDGLPPPPPGVSATSAKNKGIDNQRQGQYADAIKWLSWAVILMDRAGDEAGSAEVLSTRASCYKEVGEYKKAVADCTKVLDHDKKNVTILVQRALLYESMEKYKLGAEDLRMVLKIDPGNRIARSTVHRLTKMAG

SEQ ID NO: 91704 - DNA, 2194 bp, Arabidopsis thaliana
  misc_feature (1)..(2194): Ceres Seq. ID no. 12728930
  misc_feature: MA Experiment ID: 20000179 Result: Down-regulated in Transcription
  misc_feature: MA Experiment 20000179 PARAMETER Experiment Name: At_Germinating_Seeds_P Parameter: Age (hr) Value: 6 vs. 0
  misc_feature: MA Experiment 20000179 PARAMETER Experiment Name: At_Germinating_Seeds_P Parameter: Tissue Value: Germinating Seeds
  misc_feature: MA Experiment ID: 20000180 Result: Down-regulated in Transcription
  misc_feature: MA Experiment 20000180 PARAMETER Experiment Name: At_Germinating_Seeds_P Parameter: Age (hr) Value: 24 vs. 0
  misc_feature: MA Experiment 20000180 PARAMETER Experiment Name: At_Germinating_Seeds_P Parameter: Tissue Value: Germinating Seeds
  misc_feature: MA Experiment ID: 20000184 Result: Down-regulated in Transcription
  misc_feature: MA Experiment 20000184 PARAMETER Experiment Name: At_Shoots__P Parameter: Age (day) Value: 7
  misc_feature: MA Experiment 20000184 PARAMETER Experiment Name: At_Shoots__P Parameter: Tissue Value: Shoots vs. Whole Plant
  misc_feature: MA Experiment ID: 20000265 Result: Up-regulated in Transcription
  misc_feature: MA Experiment 20000265 PARAMETER Experiment Name: At_Open_Flower_P Parameter: Age (day) Value: 21
  misc_feature: MA Experiment 20000265 PARAMETER Experiment Name: At_Open_Flower_P Parameter: Plant Line Value: WS
  misc_feature: MA Experiment 20000265 PARAMETER Experiment Name: At_Open_Flower_P Parameter: Tissue Value: Closed Flower vs. Whole Plant
  misc_feature: MA Experiment ID: 20000286 Result: Up-regulated in Transcription
  misc_feature: MA Experiment 20000286 PARAMETER Experiment Name: At_Open_Flower_P Parameter: Age (day) Value: 21
  misc_feature: MA Experiment 20000286 PARAMETER Experiment Name: At_Open_Flower_P Parameter: Plant Line Value: WS
  misc_feature: MA Experiment 20000286 PARAMETER Experiment Name: At_Open_Flower_P Parameter: Tissue Value: Half Open vs. Whole Plant
  misc_feature: MA Experiment ID: 20000437 Result: Down-regulated in Transcription
  misc_feature: MA Experiment 20000437 PARAMETER Experiment Name: At_Drought_P Parameter: Age (day) Value: 8
  misc_feature: MA Experiment 20000437 PARAMETER Experiment Name: At_Drought_P Parameter: Organism Value: A. thaliana
  misc_feature: MA Experiment 20000437 PARAMETER Experiment Name: At_Drought_P Parameter: Plant Line Value: WS
  misc_feature: MA Experiment 20000437 PARAMETER Experiment Name: At_Drought_P Parameter: Timepoint (hr) Value: 24
  misc_feature: MA Experiment 20000437 PARAMETER Experiment Name: At_Drought_P Parameter: Tissue Value: Whole Plant
  misc_feature: MA Experiment 20000437 PARAMETER Experiment Name: At_Drought_P Parameter: Treatment Value: Drought vs. No Drought
  misc_feature: MA Experiment ID: 20001451 Result: Down-regulated in Transcription
  misc_feature: MA Experiment 20001451 PARAMETER Experiment Name: At_Far-red-induction_P Parameter: Age (day) Value: 7
  misc_feature: MA Experiment 20001451 PARAMETER Experiment Name: At_Far-red-induction_P Parameter: Light Value: Far-red vs. White
  misc_feature: MA Experiment 20001451 PARAMETER Experiment Name: At_Far-red-induction_P Parameter: Organism Value: A. thaliana
  misc_feature: MA Experiment 20001451 PARAMETER Experiment Name: At_Far-red-induction_P Parameter: Plant Line Value: Columbia
  misc_feature: MA Experiment 20001451 PARAMETER Experiment Name: At_Far-red-induction_P Parameter: Timepoint (hr) Value: 24
  misc_feature: MA Experiment 20001451 PARAMETER Experiment Name: At_Far-red-induction_P Parameter: Tissue Value: Whole Plant
  misc_feature: MA Experiment ID: 20001458 Result: Up-regulated in Transcription
  misc_feature: MA Experiment 20001458 PARAMETER Experiment Name: At_50mM_NH4NO3_L-to-H_P Parameter: Age (day) Value: Undefined
  misc_feature: MA Experiment 20001458 PARAMETER Experiment Name: At_50mM_NH4NO3_L-to-H_P Parameter: Organism Value: Undefined
  misc_feature: MA Experiment 20001458 PARAMETER Experiment Name: At_50mM_NH4NO3_L-to-H_P Parameter: Plant Line Value: Undefined
  misc_feature: MA Experiment 20001458 PARAMETER Experiment Name: At_50mM_NH4NO3_L-to-H_P Parameter: Timepoint (hr) Value: 2
  misc_feature: MA Experiment 20001458 PARAMETER Experiment Name: At_50mM_NH4NO3_L-to-H_P Parameter: Tissue Value: Siliques
  misc_feature: MA Experiment 20001458 PARAMETER Experiment Name: At_50mM_NH4NO3_L-to-H_P Parameter: Treatment Value: 50mM NH4NO3 vs. 100mM Manitol
  misc_feature: MA Experiment ID: 20001557 Result: Up-regulated in Transcription
  misc_feature: MA Experiment 20001557 PARAMETER Experiment Name: At_Drought_Soil_Dry_P Parameter: Age (day) Value: 27
  misc_feature: MA Experiment 20001557 PARAMETER Experiment Name: At_Drought_Soil_Dry_P Parameter: Organism Value: A. thaliana
  misc_feature: MA Experiment 20001557 PARAMETER Experiment Name: At_Drought_Soil_Dry_P Parameter: Plant Line Value: WS
  misc_feature: MA Experiment 20001557 PARAMETER Experiment Name: At_Drought_Soil_Dry_P Parameter: Post Timepoint (hr) Value: 3
  misc_feature: MA Experiment 20001557 PARAMETER Experiment Name: At_Drought_Soil_Dry_P Parameter: Post-Treatment Value: Re-Water vs. No Drought
  misc_feature: MA Experiment 20001557 PARAMETER Experiment Name: At_Drought_Soil_Dry_P Parameter: Timepoint (day) Value: 13
  misc_feature: MA Experiment 20001557 PARAMETER Experiment Name: At_Drought_Soil_Dry_P Parameter: Treatment Value: Drought vs. No Drought
  misc_feature: MA Experiment ID: 20001558 Result: Up-regulated in Transcription
  misc_feature: MA Experiment 20001558 PARAMETER Experiment Name: At_Drought_Soil_Dry_P Parameter: Age (day) Value: 27
  misc_feature: MA Experiment 20001558 PARAMETER Experiment Name: At_Drought_Soil_Dry_P Parameter: Organism Value: A. thaliana
  misc_feature: MA Experiment 20001558 PARAMETER Experiment Name: At_Drought_Soil_Dry_P Parameter: Plant Line Value: WS
  misc_feature: MA Experiment 20001558 PARAMETER Experiment Name: At_Drought_Soil_Dry_P Parameter: Post Timepoint (hr) Value: 6
  misc_feature: MA Experiment 20001558 PARAMETER Experiment Name: At_Drought_Soil_Dry_P Parameter: Post-Treatment Value: Re-Water vs. No Drought
  misc_feature: MA Experiment 20001558 PARAMETER Experiment Name: At_Drought_Soil_Dry_P Parameter: Timepoint (day) Value: 13
  misc_feature: MA Experiment 20001558 PARAMETER Experiment Name: At_Drought_Soil_Dry_P Parameter: Treatment Value: Drought vs. No Drought
aaaaaccctagaaactgtaaaacccttgcctatctcttacacacaccaccatcacagttcaacttttgtttgtcaacaacaatgtcttccaaaggtctgaaacctcagaaatcaaccaagaggaaggacaccgatagctctgccaaattcgattctctaaaatcaaagaagccaaagctagtgtctggagaacaacaacaacatgtgaaacctaaatttggtaaacccaaatctgcaggtgataaggagcagagtactaatctatcgaagaaggagcgtcgtgtacaggctaaggagctaacagaagctaggaagaagaagagaaagcctcattacaatcttgagcaagagcttgtatctctatgggagaagatgagacgccgtaatatcggcaaggaggatcgatcaaagctgatttctgaagctataaggaagatgaaggggaaggttccagagattgcagtctcacatgtttcatctcgtgtacttcagacttgtgtgaagttttgctcacaagctgagaaagatgttctcttcacggaactccagccacagtttcttaaccttgcttctaacaaatatgctgttcactttatacagaagatgttggatggagcatctaagcagcagctggcagcttgtatatccagcctcaggggacatgttgctcctcttctccgtcatgtgttcggatctcttgttgtggagcatgcataccatctgggaagtgcagcacaaaaacaagaactccttgcagaattgtattctactgagcttcagttattcaagggcttgaccacatctaacgaaaaaacggtggtggacatcattgctaagctgggactgcaaaaaggcgctgttaaccgacacatgactgccattatccaaccgatacttgagaagggaattgtcgaccacactatcacacacaaattgctgattgaatacctgacaatagctgataagacttctgctgcagatgtgcttcagctactgacaggctcccttcttttgcgtatggttcatacccgtgatggttctaggcttgccatgctttctatcaaacatggaagcgctaaggagagaaagaagattatcaaagcaatgaaagagcatgttaaaaagatggcttttgatcagtttggaagtatggtgcttgcatgtattttttcaatagttgatgacacaaagctcgtgaccaagataattgttcgtgagcttgaggccaccctaaaggatcttgttatggacaagaatggtaggagaccgctattgcagctactgcatccaaattcctcacgttatttaagccatgatgatttggccgctcttgatctttctgttccatcactctgctcaatggataagtcagagacatcctctaaaacaaaggacacagatggtaacgaaattggtgaggagacgaaggatgaacaagaagatacagtagctgaacattctgatcatgaagaaaacgtcacagctatgggtggtaaaaaagacccccttgtgagaagacaggagttgcttgtcaacagtggccttgctgagaggcttattgatgtgtgtgtggagaacgccgaggaattcctccagtcaaaatttggcaatgaggtcatgtatgaggttgcaatcggaggctctgatggtattctctgcccatctctgagcgagaagctgtgtgagctgtacgaagctattagctctgtagcagcagaaccgaaaccccaagaatctgagaaggattcagaacacatcctggaaaactttcactcaagtcggaccataagaaggcttgtcttgaatcgccctggtttcgcgtccattctctttaagaaggccttgtctggaaaatgtcggtcgtgggcacaaggacactgttcaaagatactatctgctttcgtagagactgaagatgttcaagttcgtgagatggctaaaacagagcttcaggtgttggtgaatgaaggtactctgaagatctcagcaaccaagaaacctgaatgatgcaacggcctcacttggctttcagaattgcgaatattatggcaaattttgtccttttgtcactataaagggtagaagcaaatcctctttatgacaaaactgaaaactaatccttgtcacaaaactcatcaatgttggatattatatatgaaatagttttttcttttaaaattgtttattcaagtct

SEQ ID NO: 91705 - protein, 668 aa, Arabidopsis thaliana
  peptide (1)..(668): Ceres Seq. ID no. 12728931
  misc_feature (368)..(403): Pfam Name: Pumilio-family RNA binding repeat Pfam Description: Pumilio-family RNA binding repeat
  misc_feature (332)..(668): Homolog of NCBI NO: 34897258 NR Description: unknown protein [Oryza sativa (japonica
  misc_feature (43)..(364): Homolog of NCBI NO: 34897258 NR Description: unknown protein [Oryza sativa (japonica
  misc_feature (21)..(444): Homolog of NCBI NO: 34785334 NR Description: Minor histocompatibility antigen HA-8 [Homo
  misc_feature (57)..(430): Homolog of NCBI NO: 29126213 NR Description: DNA segment, Chr 19, Brigham & Women's Genetics expressed [Mus musculus] >gi|26341530|dbj|BAC34427.1| unnamed
  misc_feature (77)..(436): Homolog of NCBI NO: 34862110 NR Description: similar to DNA segment, Chr 19, Brigham & Womens
  misc_feature (34)..(428): Homolog of NCBI NO: 27694961 NR Description: Unknown (protein for IMAGE:5537488) [Xenopus
  misc_feature (121)..(444): Homolog of NCBI NO: 29337231 NR Description: Protein KIAA0020
  misc_feature (121)..(444): Homolog of NCBI NO: 33620773 NR Description: minor histocompatibility antigen HA-8; protein 5 by hepatitis B virus X antigen (HBxAg) [Homo sapiens] KIAA0020 [Homo sapiens] >gi|29468238|gb|AAO85462.1| XTP5 [Homo
  misc_feature (82)..(444): Homolog of NCBI NO: 17538003 NR Description: Putative nuclear protein, with a coiled coil of eukaryotic origin (87.0 kD) [Caenorhabditis elegans] Hypothetical protein ZK945.3 in chromosome II
  misc_feature (25)..(471): Homolog of NCBI NO: 19076064 NR Description: conserved hypothetical protein
KNPRNCKTLAYLLHTPPSQFNFCLSTTMSSKGLKPQKSTKRKDTDSSAKFDSLKSKKPKLVSGEQQQHVKPKFGKPKSAGDKEQSTNLSKKERRVQAKELTEARKKKRKPHYNLEQELVSLWEKMRRRNIGKEDRSKLISEAIRKMKGKVPEIAVSHVSSRVLQTCVKFCSQAEKDVLFTELQPQFLNLASNKYAVHFIQKMLDGASKQQLAACISSLRGHVAPLLRHVFGSLVVEHAYHLGSAAQKQELLAELYSTELQLFKGLTTSNEKTVVDIIAKLGLQKGAVNRHMTAIIQPILEKGIVDHTITHKLLIEYLTIADKTSAADVLQLLTGSLLLRMVHTRDGSRLAMLSIKHGSAKERKKIIKAMKEHVKKMAFDQFGSMVLACIFSIVDDTKLVTKIIVRELEATLKDLVMDKNGRRPLLQLLHPNSSRYLSHDDLAALDLSVPSLCSMDKSETSSKTKDTDGNEIGEETKDEQEDTVAEHSDHEENVTAMGGKKDPLVRRQELLVNSGLAERLIDVCVENAEEFLQSKFGNEVMYEVAIGGSDGILCPSLSEKLCELYEAISSVAAEPKPQESEKDSEHILENFHSSRTIRRLVLNRPGFASILFKKALSGKCRSWAQGHCSKILSAFVETEDVQVREMAKTELQVLVNEGTLKISATKKPE

SEQ ID NO: 91706 - protein, 641 aa, Arabidopsis thaliana
  peptide (1)..(641): Ceres Seq. ID no. 12728932
  misc_feature (341)..(376): Pfam Name: Pumilio-family RNA binding repeat Pfam Description: Pumilio-family RNA binding repeat
  misc_feature (305)..(641): Homolog of NCBI NO: 34897258 NR Description: unknown protein [Oryza sativa (japonica
  misc_feature (16)..(337): Homolog of NCBI NO: 34897258 NR Description: unknown protein [Oryza sativa (japonica
  misc_feature (1)..(417): Homolog of NCBI NO: 34785334 NR Description: Minor histocompatibility antigen HA-8 [Homo
  misc_feature (30)..(403): Homolog of NCBI NO: 29126213 NR Description: DNA segment, Chr 19, Brigham & Women's Genetics expressed [Mus musculus] >gi|26341530|dbj|BAC34427.1| unnamed
  misc_feature (50)..(409): Homolog of NCBI NO: 34862110 NR Description: similar to DNA segment, Chr 19, Brigham & Womens
  misc_feature (7)..(401): Homolog of NCBI NO: 27694961 NR Description: Unknown (protein for IMAGE:5537488) [Xenopus
  misc_feature (94)..(417): Homolog of NCBI NO: 29337231 NR Description: Protein KIAA0020
  misc_feature (94)..(417): Homolog of NCBI NO: 33620773 NR Description: minor histocompatibility antigen HA-8; protein 5 by hepatitis B virus X antigen (HBxAg) [Homo sapiens] KIAA0020 [Homo sapiens] >gi|29468238|gb|AAO85462.1| XTP5 [Homo
  misc_feature (55)..(417): Homolog of NCBI NO: 17538003 NR Description: Putative nuclear protein, with a coiled coil of eukaryotic origin (87.0 kD) [Caenorhabditis elegans] Hypothetical protein ZK945.3 in chromosome II
  misc_feature (1)..(444): Homolog of NCBI NO: 19076064 NR Description: conserved hypothetical protein
MSSKGLKPQKSTKRKDTDSSAKFDSLKSKKPKLVSGEQQQHVKPKFGKPKSAGDKEQSTNLSKKERRVQAKELTEARKKKRKPHYNLEQELVSLWEKMRRRNIGKEDRSKLISEAIRKMKGKVPEIAVSHVSSRVLQTCVKFCSQAEKDVLFTELQPQFLNLASNKYAVHFIQKMLDGASKQQLAACISSLRGHVAPLLRHVFGSLVVEHAYHLGSAAQKQELLAELYSTELQLFKGLTTSNEKTVVDIIAKLGLQKGAVNRHMTAIIQPILEKGIVDHTITHKLLIEYLTIADKTSAADVLQLLTGSLLLRMVHTRDGSRLAMLSIKHGSAKERKKIIKAMKEHVKKMAFDQFGSMVLACIFSIVDDTKLVTKIIVRELEATLKDLVMDKNGRRPLLQLLHPNSSRYLSHDDLAALDLSVPSLCSMDKSETSSKTKDTDGNEIGEETKDEQEDTVAEHSDHEENVTAMGGKKDPLVRRQELLVNSGLAERLIDVCVENAEEFLQSKFGNEVMYEVAIGGSDGILCPSLSEKLCELYEAISSVAAEPKPQESEKDSEHILENFHSSRTIRRLVLNRPGFASILFKKALSGKCRSWAQGHCSKILSAFVETEDVQVREMAKTELQVLVNEGTLKISATKKPE

SEQ ID NO: 91707 - protein, 544 aa, Arabidopsis thaliana
  peptide (1)..(544): Ceres Seq. ID no. 12728933
  misc_feature (244)..(279): Pfam Name: Pumilio-family RNA binding repeat Pfam Description: Pumilio-family RNA binding repeat
  misc_feature (208)..(544): Homolog of NCBI NO: 34897258 NR Description: unknown protein [Oryza sativa (japonica
  misc_feature (1)..(240): Homolog of NCBI NO: 34897258 NR Description: unknown protein [Oryza sativa (japonica
  misc_feature (1)..(320): Homolog of NCBI NO: 34785334 NR Description: Minor histocompatibility antigen HA-8 [Homo
  misc_feature (1)..(306): Homolog of NCBI NO: 29126213 NR Description: DNA segment, Chr 19, Brigham & Women's Genetics expressed [Mus musculus] >gi|26341530|dbj|BAC34427.1| unnamed
  misc_feature (1)..(312): Homolog of NCBI NO: 34862110 NR Description: similar to DNA segment, Chr 19, Brigham & Womens
  misc_feature (1)..(304): Homolog of NCBI NO: 27694961 NR Description: Unknown (protein for IMAGE:5537488) [Xenopus
  misc_feature (1)..(320): Homolog of NCBI NO: 29337231 NR Description: Protein KIAA0020
  misc_feature (1)..(320): Homolog of NCBI NO: 33620773 NR Description: minor histocompatibility antigen HA-8; protein 5 by hepatitis B virus X antigen (HBxAg) [Homo sapiens] KIAA0020 [Homo sapiens] >gi|29468238|gb|AAO85462.1| XTP5 [Homo
  misc_feature (1)..(320): Homolog of NCBI NO: 17538003 NR Description: Putative nuclear protein, with a coiled coil of eukaryotic origin (87.0 kD) [Caenorhabditis elegans] Hypothetical protein ZK945.3 in chromosome II
  misc_feature (1)..(347): Homolog of NCBI NO: 19076064 NR Description: conserved hypothetical protein
MRRRNIGKEDRSKLISEAIRKMKGKVPEIAVSHVSSRVLQTCVKFCSQAEKDVLFTELQPQFLNLASNKYAVHFIQKMLDGASKQQLAACISSLRGHVAPLLRHVFGSLVVEHAYHLGSAAQKQELLAELYSTELQLFKGLTTSNEKTVVDIIAKLGLQKGAVNRHMTAIIQPILEKGIVDHTITHKLLIEYLTIADKTSAADVLQLLTGSLLLRMVHTRDGSRLAMLSIKHGSAKERKKIIKAMKEHVKKMAFDQFGSMVLACIFSIVDDTKLVTKIIVRELEATLKDLVMDKNGRRPLLQLLHPNSSRYLSHDDLAALDLSVPSLCSMDKSETSSKTKDTDGNEIGEETKDEQEDTVAEHSDHEENVTAMGGKKDPLVRRQELLVNSGLAERLIDVCVENAEEFLQSKFGNEVMYEVAIGGSDGILCPSLSEKLCELYEAISSVAAEPKPQESEKDSEHILENFHSSRTIRRLVLNRPGFASILFKKALSGKCRSWAQGHCSKILSAFVETEDVQVREMAKTELQVLVNEGTLKISATKKPE

SEQ ID NO: 91708 - DNA, 573 bp, Arabidopsis thaliana
  misc_feature (1)..(573): Ceres Seq. ID no. 12728950
  misc_feature: MA Experiment ID: 20000327 Result: Down-regulated in Transcription
  misc_feature: MA Experiment 20000327 PARAMETER Experiment Name: At_42deg_Heat_Sub_P Parameter: Age (day) Value: 14
  misc_feature: MA Experiment 20000327 PARAMETER Experiment Name: At_42deg_Heat_Sub_P Parameter: Organism Value: A. thaliana
  misc_feature: MA Experiment 20000327 PARAMETER Experiment Name: At_42deg_Heat_Sub_P Parameter: Plant Line Value: WS
  misc_feature: MA Experiment 20000327 PARAMETER Experiment Name: At_42deg_Heat_Sub_P Parameter: Temperature (deg C) Value: 42 vs. 22
  misc_feature: MA Experiment 20000327 PARAMETER Experiment Name: At_42deg_Heat_Sub_P Parameter: Timepoint (hr) Value: 1
  misc_feature: MA Experiment 20000327 PARAMETER Experiment Name: At_42deg_Heat_Sub_P Parameter: Tissue Value: Aerial
  misc_feature: MA Experiment ID: 20000440 Result: Up-regulated in Transcription
  misc_feature: MA Experiment 20000440 PARAMETER Experiment Name: At_Closed-Flower__Sub_P Parameter: Tissue Value: Closed Flower vs. Whole Plant
atgtctgagggatcagaagatacgaaaacaaaactcgactctgccggagagttatcagatgttgataacgagaactgcagtagcagcggaagtggcggtggtagtagttctggtgataccaaaaggacttgcgttgattgcggaactatccgaactcctctttggcgtggtggtcctgccggaccaaagtcattgtgcaatgcttgtgggatcaagagtaggaagaagagacaagcagcacttggtatgagatcagaggagaagaagaagaacagaaaaagcaattgcaataatgatctaaacctcgaccatcgaaacgccaagaaatacaaaatcaacatagttgatgatggcaagatcgacatcgatgatgatccgaaaatttgcaataacaagcgtagtagtagtagtagcagtaacaaaggagtgagtaagtttttggatttagggtttaaagtaccggtgatgaagagatcagcggttgagaagaagaggttatggagaaaactcggtgaggaagaaagagctgctgtgcttctcatggctctctcttgtagctctgtttacgcctaa

SEQ ID NO: 91709 - protein, 190 aa, Arabidopsis thaliana
  peptide (1)..(190): Ceres Seq. ID no. 12728951
  misc_feature (1)..(190): Homolog of NCBI NO: 15228899 NR Description: GATA zinc finger protein; protein id: At3g16870.1 thaliana] >gi|11994746|dbj|BAB03075.1| gene_id:MUH15.3~unknown
  misc_feature (5)..(185): Homolog of NCBI NO: 26453042 NR Description: unknown protein [Arabidopsis thaliana]
  misc_feature (63)..(185): Homolog of NCBI NO: 22328703 NR Description: similar to GATA zinc finger protein; protein id:
  misc_feature (5)..(54): Homolog of NCBI NO: 22328703 NR Description: similar to GATA zinc finger protein; protein id:
  misc_feature (12)..(95): Homolog of NCBI NO: 15239847 NR Description: GATA zinc finger protein; protein id: At5g49300.1 thaliana] >gi|10177159|dbj|BAB10348.1|
  misc_feature (123)..(190): Homolog of NCBI NO: 15239847 NR Description: GATA zinc finger protein; protein id: At5g49300.1 thaliana] >gi|10177159|dbj|BAB10348.1|
  misc_feature (6)..(98): Homolog of NCBI NO: 18397703 NR Description: GATA zinc finger protein; protein id: supported by cDNA: 110655., supported by cDNA: gi_17380939, by cDNA: gi_20258946 [Arabidopsis thaliana]
  misc_feature (17)..(98): Homolog of NCBI NO: 7549639 NR Description: hypothetical protein [Arabidopsis thaliana]
  misc_feature (17)..(98): Homolog of NCBI NO: 21536761 NR Description: unknown [Arabidopsis thaliana]
  misc_feature (35)..(93): Homolog of NCBI NO: 34897256 NR Description: putative zinc finger protein [Oryza sativa
MSEGSEDTKTKLDSAGELSDVDNENCSSSGSGGGSSSGDTKRTCVDCGTIRTPLWRGGPAGPKSLCNACGIKSRKKRQAALGMRSEEKKKNRKSNCNNDLNLDHRNAKKYKINIVDDGKIDIDDDPKICNNKRSSSSSSNKGVSKFLDLGFKVPVMKRSAVEKKRLWRKLGEEERAAVLLMALSCSSVYA

SEQ ID NO: 91710 - protein, 108 aa, Arabidopsis thaliana
  peptide (1)..(108): Ceres Seq. ID no. 12728952
  misc_feature (1)..(108): Homolog of NCBI NO: 15228899 NR Description: GATA zinc finger protein; protein id: At3g16870.1 thaliana] >gi|11994746|dbj|BAB03075.1| gene_id:MUH15.3~unknown
  misc_feature (1)..(103): Homolog of NCBI NO: 26453042 NR Description: unknown protein [Arabidopsis thaliana]
  misc_feature (1)..(103): Homolog of NCBI NO: 22328703 NR Description: similar to GATA zinc finger protein; protein id:
  misc_feature (1)..(13): Homolog of NCBI NO: 15239847 NR Description: GATA zinc finger protein; protein id: At5g49300.1 thaliana] >gi|10177159|dbj|BAB10348.1|
  misc_feature (41)..(108): Homolog of NCBI NO: 15239847 NR Description: GATA zinc finger protein; protein id: At5g49300.1 thaliana] >gi|10177159|dbj|BAB10348.1|
  misc_feature (1)..(16): Homolog of NCBI NO: 18397703 NR Description: GATA zinc finger protein; protein id: supported by cDNA: 110655., supported by cDNA: gi_17380939, by cDNA: gi_20258946 [Arabidopsis thaliana]
  misc_feature (1)..(16): Homolog of NCBI NO: 7549639 NR Description: hypothetical protein [Arabidopsis thaliana]
  misc_feature (1)..(16): Homolog of NCBI NO: 21536761 NR Description: unknown [Arabidopsis thaliana]
  misc_feature (1)..(11): Homolog of NCBI NO: 34897256 NR Description: putative zinc finger protein [Oryza sativa
  misc_feature (1)..(107): Homolog of NCBI NO: 15236131 NR Description: GATA zinc finger protein; protein id: At4g26150.1
MRSEEKKKNRKSNCNNDLNLDHRNAKKYKINIVDDGKIDIDDDPKICNNKRSSSSSSNKGVSKFLDLGFKVPVMKRSAVEKKRLWRKLGEEERAAVLLMALSCSSVYA

SEQ ID NO: 91711 - DNA, 1980 bp, Arabidopsis thaliana
  misc_feature (1)..(1980): Ceres Seq. ID no. 12728957
  misc_feature: MA Experiment ID: 20000180 Result: Down-regulated in Transcription
  misc_feature: MA Experiment 20000180 PARAMETER Experiment Name: At_Germinating_Seeds_P Parameter: Age (hr) Value: 24 vs. 0
  misc_feature: MA Experiment 20000180 PARAMETER Experiment Name: At_Germinating_Seeds_P Parameter: Tissue Value: Germinating Seeds
  misc_feature: MA Experiment ID: 20001451 Result: Down-regulated in Transcription
  misc_feature: MA Experiment 20001451 PARAMETER Experiment Name: At_Far-red-induction_P Parameter: Age (day) Value: 7
  misc_feature: MA Experiment 20001451 PARAMETER Experiment Name: At_Far-red-induction_P Parameter: Light Value: Far-red vs. White
  misc_feature: MA Experiment 20001451 PARAMETER Experiment Name: At_Far-red-induction_P Parameter: Organism Value: A. thaliana
  misc_feature: MA Experiment 20001451 PARAMETER Experiment Name: At_Far-red-induction_P Parameter: Plant Line Value: Columbia
  misc_feature: MA Experiment 20001451 PARAMETER Experiment Name: At_Far-red-induction_P Parameter: Timepoint (hr) Value: 24
  misc_feature: MA Experiment 20001451 PARAMETER Experiment Name: At_Far-red-induction_P Parameter: Tissue Value: Whole Plant
atgagaggctttgcttcttcagcatctagaatagcgacggcggcagcagcttccaaatcactaaacgcttccacatccgtaaaccctaagctctcaaaaaccctaaactcttcaggtaaacccaccaatcctctgaaccagcgttacatttcgcaagtcatagagagaaaagattggtttttgatactgaatcaagaattcaccactcatcgaattggtctcaacactcgattcgtcatcagcgttttgcagaatcaagacaacccattacactccctgcgattttacctctgggtctccaacttcgacccggtttacgctaaggatcagtctctgaagagtgttctagggaacgcactttttcgtaaaggccccttattgttgtctatggaattgcttaaagagattagagattcagggtatcggattagtgatgaattgatgtgtgttttgatcggaagctggggaagattaggtttagctaagtactgtaatgatgtttttgctcagatatcttttcttggaatgaaaccaagtacaaggctttataatgctgtgattgatgcgttggtgaagtctaattcacttgatttggcttacctcaagtttcagcagatgcgtagtgatggctgtaaaccggatcggtttacctataatatacttatacatggtgtttgcaagaagggtgtggttgatgaagctattcgattggttaaacagatggaacaggaagggaatagacccaatgtgttcacatacacgattttgatcgacgggtttttgatagcagggagggttgatgaggcgttgaagcaattggagatgatgcgggtgagaaagttgaatcctaatgaagctacaatcagaactttcgtacacgggattttccgttgcttgccgccgtgtaaagcgtttgaggttttggttgggtttatggagaaagactcaaacttgcaaagagttggttacgatgctgtgttgtattgtctttcaaacaactcaatggctaaagagactggtcaattcttgaggaagataggtgagagaggttatattccggatagctcaacattcaatgctgcgatgagttgtctcctaaaagggcatgatcttgttgagacttgtaggatatttgacggttttgtcagccgtggagttaagccaggattcaatggttatcttgtgttagttcaagctctgttgaatgctcagaggttctctgaaggtgaccggtatctgaaacaaatgggtgttgacgggcttctatcaagtgtatatagttataatgcggtaattgactgtctctgcaaggctcgacgcatagagaatgcagctatgttcttaacagagatgcaggatagaggtatttctccgaatctcgtaactttcaatacctttctgagcggttatagcgtgaggggtgatgtaaagaaggttcacggcgtgctagagaagcttcttgtacatggtttcaaaccagacgtgatcactttcagtttgatcataaactgtctttgcagagcaaaagaaattaaagatgcatttgactgtttcaaggagatgttggaatggggtattgagccaaacgagatcacatacaatatcttgattcgctcctgttgttccaccggagataccgatagatcagtgaagctgtttgcgaagatgaaggaaaacgggttaagtccagacctttatgcgtacaatgcgactattcagagtttttgcaagatgagaaaggttaagaaggctgaggaattgcttaaaacaatgctgagaattggtttgaaaccagataactttacatatagcactctcatcaaagctctaagtgaatctggaagagagagtgaagcaagagagatgttcagttcaatcgaaagacatggatgtgttccagattcatatactaagcgtcttgttgaagaacttgacctaagaaaaagtggactctcgagagaaaccgtgtcagcctcatag

SEQ ID NO: 91712 - protein, 659 aa, Arabidopsis thaliana
  peptide (1)..(659): Ceres Seq. ID no. 12728958
  misc_feature (496)..(530): Pfam Name: PPR repeat Pfam Description: PPR repeat
  misc_feature (128)..(611): Homolog of NCBI NO: 15242446 NR Description: putative protein; protein id: At5g39710.1
  misc_feature (175)..(654): Homolog of NCBI NO: 33859440 NR Description: PPR protein [Oryza sativa (indica cultivar-group)]
  misc_feature (162)..(641): Homolog of NCBI NO: 34896698 NR Description: putative pentatricopeptide repeat protein [Oryza
  misc_feature (175)..(634): Homolog of NCBI NO: 15231863 NR Description: putative protein; protein id: At3g53700.1, by cDNA: gi_15982930 [Arabidopsis thaliana]
  misc_feature (79)..(636): Homolog of NCBI NO: 15231863 NR Description: putative protein; protein id: At3g53700.1, by cDNA: gi_15982930 [Arabidopsis thaliana]
  misc_feature (151)..(650): Homolog of NCBI NO: 15238505 NR Description: putative protein; protein id: At5g65560.1
  misc_feature (161)..(642): Homolog of NCBI NO: 15242446 NR Description: putative protein; protein id: At5g39710.1
  misc_feature (167)..(644): Homolog of NCBI NO: 25404377 NR Description: hypothetical protein F16P17.5 [imported] - thaliana >gi|8493578|gb|AAF75801.1|AC011000_4 Contains a RepB protein domain and multiple PPR PF|01535 repeats. [Arabidopsis
  misc_feature (114)..(644): Homolog of NCBI NO: 15221691 NR Description: unknown protein; protein id: At1g63130.1
  misc_feature (178)..(634): Homolog of NCBI NO: 15221549 NR Description: PPR-repeat protein; protein id: At1g62670.1
MRGFASSASRIATAAAASKSLNASTSVNPKLSKTLNSSGKPTNPLNQRYISQVIERKDWFLILNQEFTTHRIGLNTRFVISVLQNQDNPLHSLRFYLWVSNFDPVYAKDQSLKSVLGNALFRKGPLLLSMELLKEIRDSGYRISDELMCVLIGSWGRLGLAKYCNDVFAQISFLGMKPSTRLYNAVIDALVKSNSLDLAYLKFQQMRSDGCKPDRFTYNILIHGVCKKGVVDEAIRLVKQMEQEGNRPNVFTYTILIDGFLIAGRVDEALKQLEMMRVRKLNPNEATIRTFVHGIFRCLPPCKAFEVLVGFMEKDSNLQRVGYDAVLYCLSNNSMAKETGQFLRKIGERGYIPDSSTFNAAMSCLLKGHDLVETCRIFDGFVSRGVKPGFNGYLVLVQALLNAQRFSEGDRYLKQMGVDGLLSSVYSYNAVIDCLCKARRIENAAMFLTEMQDRGISPNLVTFNTFLSGYSVRGDVKKVHGVLEKLLVHGFKPDVITFSLIINCLCRAKEIKDAFDCFKEMLEWGIEPNEITYNILIRSCCSTGDTDRSVKLFAKMKENGLSPDLYAYNATIQSFCKMRKVKKAEELLKTMLRIGLKPDNFTYSTLIKALSESGRESEAREMFSSIERHGCVPDSYTKRLVEELDLRKSGLSRETVSAS

SEQ ID NO: 91713 - protein, 530 aa, Arabidopsis thaliana
  peptide (1)..(530): Ceres Seq. ID no. 12728959
  misc_feature (367)..(401): Pfam Name: PPR repeat Pfam Description: PPR repeat
  misc_feature (1)..(482): Homolog of NCBI NO: 15242446 NR Description: putative protein; protein id: At5g39710.1
  misc_feature (46)..(525): Homolog of NCBI NO: 33859440 NR Description: PPR protein [Oryza sativa (indica cultivar-group)]
  misc_feature (33)..(512): Homolog of NCBI NO: 34896698 NR Description: putative pentatricopeptide repeat protein [Oryza
  misc_feature (46)..(505): Homolog of NCBI NO: 15231863 NR Description: putative protein; protein id: At3g53700.1, by cDNA: gi_15982930 [Arabidopsis thaliana]
  misc_feature (1)..(507): Homolog of NCBI NO: 15231863 NR Description: putative protein; protein id: At3g53700.1, by cDNA: gi_15982930 [Arabidopsis thaliana]
  misc_feature (22)..(521): Homolog of NCBI NO: 15238505 NR Description: putative protein; protein id: At5g65560.1
  misc_feature (32)..(513): Homolog of NCBI NO: 15242446 NR Description: putative protein; protein id: At5g39710.1
  misc_feature (38)..(515): Homolog of NCBI NO: 25404377 NR Description: hypothetical protein F16P17.5 [imported] - thaliana >gi|8493578|gb|AAF75801.1|AC011000_4 Contains a RepB protein domain and multiple PPR PF|01535 repeats. [Arabidopsis
  misc_feature (1)..(515): Homolog of NCBI NO: 15221691 NR Description: unknown protein; protein id: At1g63130.1
  misc_feature (49)..(505): Homolog of NCBI NO: 15221549 NR Description: PPR-repeat protein; protein id: At1g62670.1
MELLKEIRDSGYRISDELMCVLIGSWGRLGLAKYCNDVFAQISFLGMKPSTRLYNAVIDALVKSNSLDLAYLKFQQMRSDGCKPDRFTYNILIHGVCKKGVVDEAIRLVKQMEQEGNRPNVFTYTILIDGFLIAGRVDEALKQLEMMRVRKLNPNEATIRTFVHGIFRCLPPCKAFEVLVGFMEKDSNLQRVGYDAVLYCLSNNSMAKETGQFLRKIGERGYIPDSSTFNAAMSCLLKGHDLVETCRIFDGFVSRGVKPGFNGYLVLVQALLNAQRFSEGDRYLKQMGVDGLLSSVYSYNAVIDCLCKARRIENAAMFLTEMQDRGISPNLVTFNTFLSGYSVRGDVKKVHGVLEKLLVHGFKPDVITFSLIINCLCRAKEIKDAFDCFKEMLEWGIEPNEITYNILIRSCCSTGDTDRSVKLFAKMKENGLSPDLYAYNATIQSFCKMRKVKKAEELLKTMLRIGLKPDNFTYSTLIKALSESGRESEAREMFSSIERHGCVPDSYTKRLVEELDLRKSGLSRETVSAS

SEQ ID NO: 91714 - protein, 512 aa, Arabidopsis thaliana
  peptide (1)..(512): Ceres Seq. ID no. 12728960
  misc_feature (349)..(383): Pfam Name: PPR repeat Pfam Description: PPR repeat
  misc_feature (1)..(464): Homolog of NCBI NO: 15242446 NR Description: putative protein; protein id: At5g39710.1
  misc_feature (28)..(507): Homolog of NCBI NO: 33859440 NR Description: PPR protein [Oryza sativa (indica cultivar-group)]
  misc_feature (15)..(494): Homolog of NCBI NO: 34896698 NR Description: putative pentatricopeptide repeat protein [Oryza
  misc_feature (28)..(487): Homolog of NCBI NO: 15231863 NR Description: putative protein; protein id: At3g53700.1, by cDNA: gi_15982930 [Arabidopsis thaliana]
  misc_feature (1)..(489): Homolog of NCBI NO: 15231863 NR Description: putative protein; protein id: At3g53700.1, by cDNA: gi_15982930 [Arabidopsis thaliana]
  misc_feature (4)..(503): Homolog of NCBI NO: 15238505 NR Description: putative protein; protein id: At5g65560.1
  misc_feature (14)..(495): Homolog of NCBI NO: 15242446 NR Description: putative protein; protein id: At5g39710.1
  misc_feature (20)..(497): Homolog of NCBI NO: 25404377 NR Description: hypothetical protein F16P17.5 [imported] - thaliana >gi|8493578|gb|AAF75801.1|AC011000_4 Contains a RepB protein domain and multiple PPR PF|01535 repeats. [Arabidopsis
  misc_feature (1)..(497): Homolog of NCBI NO: 15221691 NR Description: unknown protein; protein id: At1g63130.1
  misc_feature (31)..(487): Homolog of NCBI NO: 15221549 NR Description: PPR-repeat protein; protein id: At1g62670.1
MCVLIGSWGRLGLAKYCNDVFAQISFLGMKPSTRLYNAVIDALVKSNSLDLAYLKFQQMRSDGCKPDRFTYNILIHGVCKKGVVDEAIRLVKQMEQEGNRPNVFTYTILIDGFLIAGRVDEALKQLEMMRVRKLNPNEATIRTFVHGIFRCLPPCKAFEVLVGFMEKDSNLQRVGYDAVLYCLSNNSMAKETGQFLRKIGERGYIPDSSTFNAAMSCLLKGHDLVETCRIFDGFVSRGVKPGFNGYLVLVQALLNAQRFSEGDRYLKQMGVDGLLSSVYSYNAVIDCLCKARRIENAAMFLTEMQDRGISPNLVTFNTFLSGYSVRGDVKKVHGVLEKLLVHGFKPDVITFSLIINCLCRAKEIKDAFDCFKEMLEWGIEPNEITYNILIRSCCSTGDTDRSVKLFAKMKENGLSPDLYAYNATIQSFCKMRKVKKAEELLKTMLRIGLKPDNFTYSTLIKALSESGRESEAREMFSSIERHGCVPDSYTKRLVEELDLRKSGLSRETVSAS

SEQ ID NO: 91715 - DNA, 1002 bp, Arabidopsis thaliana
  misc_feature (1)..(1002): Ceres Seq. ID no. 12728965
  misc_feature: MA Experiment ID: 108434 Result: Down-regulated in Transcription
  misc_feature: MA Experiment 108434 PARAMETER Experiment Name: At_Root_Tips_cDNA_P Parameter: Tissue Value: Root Tips
  misc_feature: MA Experiment ID: 108461 Result: Up-regulated in Transcription
  misc_feature: MA Experiment 108461 PARAMETER Experiment Name: At_Germinating_Seeds_cDNA_P Parameter: Age (day) Value: 1 vs. 0
  misc_feature: MA Experiment 108461 PARAMETER Experiment Name: At_Germinating_Seeds_cDNA_P Parameter: Tissue Value: Germinating Seeds
  misc_feature: MA Experiment ID: 108462 Result: Up-regulated in Transcription
  misc_feature: MA Experiment 108462 PARAMETER Experiment Name: At_Germinating_Seeds_cDNA_P Parameter: Age (day) Value: 2 vs. 0
  misc_feature: MA Experiment 108462 PARAMETER Experiment Name: At_Germinating_Seeds_cDNA_P Parameter: Tissue Value: Germinating Seeds
  misc_feature: MA Experiment ID: 108463 Result: Up-regulated in Transcription
  misc_feature: MA Experiment 108463 PARAMETER Experiment Name: At_Germinating_Seeds_cDNA_P Parameter: Age (day) Value: 3 vs. 0
  misc_feature: MA Experiment 108463 PARAMETER Experiment Name: At_Germinating_Seeds_cDNA_P Parameter: Tissue Value: Germinating Seeds
  misc_feature: MA Experiment ID: 108464 Result: Up-regulated in Transcription
  misc_feature: MA Experiment 108464 PARAMETER Experiment Name: At_Germinating_Seeds_cDNA_P Parameter: Age (day) Value: 4 vs. 0
  misc_feature: MA Experiment 108464 PARAMETER Experiment Name: At_Germinating_Seeds_cDNA_P Parameter: Tissue Value: Germinating Seeds
  misc_feature: MA Experiment ID: 108474 Result: Down-regulated in Transcription
  misc_feature: MA Experiment 108474 PARAMETER Experiment Name: At_Drought_Flowers_cDNA_P Parameter: Timepoint (hr) Value: null
  misc_feature: MA Experiment 108474 PARAMETER Experiment Name: At_Drought_Flowers_cDNA_P Parameter: Treatment Value: Drought vs. No Drought
  misc_feature: MA Experiment ID: 108573 Result: Up-regulated in Transcription
  misc_feature: MA Experiment 108573 PARAMETER Experiment Name: At_Drought_cDNA_P Parameter: Timepoint (hr) Value: 6
  misc_feature: MA Experiment 108573 PARAMETER Experiment Name: At_Drought_cDNA_P Parameter: Tissue Value: Aerial
  misc_feature: MA Experiment 108573 PARAMETER Experiment Name: At_Drought_cDNA_P Parameter: Treatment Value: Drought vs. No Drought
  misc_feature: MA Experiment ID: 108594 Result: Down-regulated in Transcription
  misc_feature: MA Experiment 108594 PARAMETER Experiment Name: At_Ler-rhl_Root_cDNA_P Parameter: Plant Line Value: null
  misc_feature: MA Experiment ID: 108595 Result: Up-regulated in Transcription
  misc_feature: MA Experiment 108595 PARAMETER Experiment Name: At_Ler-pi_Ovule_cDNA_P Parameter: Plant Line Value: null
  misc_feature: MA Experiment ID: 20000071 Result: Up-regulated in Transcription
  misc_feature: MA Experiment 20000071 PARAMETER Experiment Name: At_100uM_ABA_Mutants_cDNA_P Parameter: Plant Line Value: CS8104
  misc_feature: MA Experiment 20000071 PARAMETER Experiment Name: At_100uM_ABA_Mutants_cDNA_P Parameter: Timepoint (hr) Value: 6
  misc_feature: MA Experiment 20000071 PARAMETER Experiment Name: At_100uM_ABA_Mutants_cDNA_P Parameter: Tissue Value: Aerial
  misc_feature: MA Experiment 20000071 PARAMETER Experiment Name: At_100uM_ABA_Mutants_cDNA_P Parameter: Treatment Value: 100uM ABA vs. No Treatment
atggtttcgaaaccgctattctccctattgcttctcacggttgcattggttgtgtttcaaaccggaacccttgtcaacgctgaagattccgagccttcgagttcaacgagaaagcctctggtgaagattgtgaaaggtaaaaaattatgcgacaaaggatgggaatgcaaaggatggtccgagtattgttgcaaccatacaatctccgatttttttgagacatatcaattcgagaatctattctctaagcgtaacagtccagtggctcacgccgtcggcttttgggattaccgatcattcattactgcggctgccgagtaccagcctcttggtttcggtactgctggtgagaaacttcaagggatgaaggaagtcgctgcgtttcttggccacgttgggagcaaaacctcatgcgggtacggggttgcaacaggcggaccattagcttggggattgtgttacaacaaggagatgagtcctgatcagctttattgcgatgattactacaaattgacatatccttgtactcctggtgtctcgtaccacggtcgaggagctttaccggtttactggaattacaattatggtcaaaccggggaggctttgaaagtggatctactgagtcatccagagtatctcgagaacaatgctacgttagcgtttcaagcggcgatttggcggtggatgacgccaccgaagaagcatttaccgtcggcgcacgatgttttcgtcggaaaatggaagccaacaaagaatgacactgctgcaaaacgaactccggggtttggagccaccataaacgttctttacggcgatcaaatctgcaacagcggattcgataacgatgagatgaacaacattgtttctcattatttgtattatcttgatctgataggtgttggacgagaagaagctggtcctcacgagaagctgtcatgcgcagatcaagaacctttttcttcttcctcctctgctcctccgagttctggttcctcttcttga

SEQ ID NO: 91716 - protein, 333 aa, Arabidopsis thaliana; identical to SEQ ID NO: 42185
  peptide (1)..(333): Ceres Seq. ID no. 12728966
  misc_feature (1)..(333): Homolog of NCBI NO: 15228911 NR Description: glycosyl hydrolase family 19 (chitinase); protein At3g16920.1, supported by cDNA: gi_15724261, supported by cDNA: [Arabidopsis thaliana] >gi|7670022|dbj|BAA94976.1| basic
  misc_feature (8)..(332): Homolog of NCBI NO: 15221283 NR Description: glycosyl hydrolase family 19 (chitinase); protein At1g05850.1, supported by cDNA: gi_12083323, supported by cDNA: supported by cDNA: gi_17226328, supported by cDNA: gi_21280934
  misc_feature (48)..(323): Homolog of NCBI NO: 27817867 NR Description: OJ1081_B12.16 [Oryza sativa (japonica
  misc_feature (68)..(321): Homolog of NCBI NO: 7798670 NR Description: class I chitinase [Arabis microphylla]
  misc_feature (68)..(321): Homolog of NCBI NO: 7798632 NR Description: class I chitinase [Arabis holboellii]
  misc_feature (68)..(321): Homolog of NCBI NO: 7798664 NR Description: class I chitinase [Arabis lignifera]
  misc_feature (56)..(321): Homolog of NCBI NO: 7798640 NR Description: class I chitinase [Arabis blepharophylla]
  misc_feature (68)..(319): Homolog of NCBI NO: 7798656 NR Description: class I chitinase [Halimolobos perplexa var.
  misc_feature (68)..(321): Homolog of NCBI NO: 7798666 NR Description: class I chitinase [Arabis lignifera]
  misc_feature (68)..(321): Homolog of NCBI NO: 7798678 NR Description: class I chitinase [Arabis parishii]

SEQ ID NO: 91717 - protein, 212 aa, Arabidopsis thaliana
  peptide (1)..(212): Ceres Seq. ID no. 12728967
  misc_feature (1)..(212): Homolog of NCBI NO: 15228911 NR Description: glycosyl hydrolase family 19 (chitinase); protein At3g16920.1, supported by cDNA: gi_15724261, supported by cDNA: [Arabidopsis thaliana] >gi|7670022|dbj|BAA94976.1| basic
  misc_feature (1)..(211): Homolog of NCBI NO: 15221283 NR Description: glycosyl hydrolase family 19 (chitinase); protein At1g05850.1, supported by cDNA: gi_12083323, supported by cDNA: supported by cDNA: gi_17226328, supported by cDNA: gi_21280934
  misc_feature (1)..(202): Homolog of NCBI NO: 27817867 NR Description: OJ1081_B12.16 [Oryza sativa (japonica
  misc_feature (1)..(200): Homolog of NCBI NO: 7798670 NR Description: class I chitinase [Arabis microphylla]
  misc_feature (1)..(200): Homolog of NCBI NO: 7798632 NR Description: class I chitinase [Arabis holboellii]
  misc_feature (1)..(200): Homolog of NCBI NO: 7798664 NR Description: class I chitinase [Arabis lignifera]
  misc_feature (1)..(200): Homolog of NCBI NO: 7798640 NR Description: class I chitinase [Arabis blepharophylla]
  misc_feature (1)..(198): Homolog of NCBI NO: 7798656 NR Description: class I chitinase [Halimolobos perplexa var.
  misc_feature (1)..(200): Homolog of NCBI NO: 7798666 NR Description: class I chitinase [Arabis lignifera]
  misc_feature (1)..(200): Homolog of NCBI NO: 7798678 NR Description: class I chitinase [Arabis parishii]
MKEVAAFLGHVGSKTSCGYGVATGGPLAWGLCYNKEMSPDQLYCDDYYKLTYPCTPGVSYHGRGALPVYWNYNYGQTGEALKVDLLSHPEYLENNATLAFQAAIWRWMTPPKKHLPSAHDVFVGKWKPTKNDTAAKRTPGFGATINVLYGDQICNSGFDNDEMNNIVSHYLYYLDLIGVGREEAGPHEKLSCADQEPFSSSSSAPPSSGSSS

SEQ ID NO: 91718 - protein, 176 aa, Arabidopsis thaliana
  peptide (1)..(176): Ceres Seq. ID no. 12728968
  misc_feature (1)..(176): Homolog of NCBI NO: 15228911 NR Description: glycosyl hydrolase family 19 (chitinase); protein At3g16920.1, supported by cDNA: gi_15724261, supported by cDNA: [Arabidopsis thaliana] >gi|7670022|dbj|BAA94976.1| basic
  misc_feature (1)..(175): Homolog of NCBI NO: 15221283 NR Description: glycosyl hydrolase family 19 (chitinase); protein At1g05850.1, supported by cDNA: gi_12083323, supported by cDNA: supported by cDNA: gi_17226328, supported by cDNA: gi_21280934
  misc_feature (1)..(166): Homolog of NCBI NO: 27817867 NR Description: OJ1081_B12.16 [Oryza sativa (japonica
  misc_feature (1)..(164): Homolog of NCBI NO: 7798670 NR Description: class I chitinase [Arabis microphylla]
  misc_feature (1)..(164): Homolog of NCBI NO: 7798632 NR Description: class I chitinase [Arabis holboellii]
  misc_feature (1)..(164): Homolog of NCBI NO: 7798664 NR Description: class I chitinase [Arabis lignifera]
  misc_feature (1)..(164): Homolog of NCBI NO: 7798640 NR Description: class I chitinase [Arabis blepharophylla]
  misc_feature (1)..(162): Homolog of NCBI NO: 7798656 NR Description: class I chitinase [Halimolobos perplexa var.
  misc_feature (1)..(164): Homolog of NCBI NO: 7798666 NR Description: class I chitinase [Arabis lignifera]
  misc_feature (1)..(164): Homolog of NCBI NO: 7798678 NR Description: class I chitinase [Arabis parishii]
MSPDQLYCDDYYKLTYPCTPGVSYHGRGALPVYWNYNYGQTGEALKVDLLSHPEYLENNATLAFQAAIWRWMTPPKKHLPSAHDVFVGKWKPTKNDTAAKRTPGFGATINVLYGDQICNSGFDNDEMNNIVSHYLYYLDLIGVGREEAGPHEKLSCADQEPFSSSSSAPPSSGSSS

SEQ ID NO: 91719 - DNA, 552 bp, Arabidopsis thaliana
  misc_feature (1)..(552): Ceres Seq. ID no. 12728984
  misc_feature: MA Experiment ID: 20000171 Result: Up-regulated in Transcription
  misc_feature: MA Experiment 20000171 PARAMETER Experiment Name: At_42deg_Heat_P Parameter: Age (day) Value: 14
  misc_feature: MA Experiment 20000171 PARAMETER Experiment Name: At_42deg_Heat_P Parameter: Organism Value: A. thaliana
  misc_feature: MA Experiment 20000171 PARAMETER Experiment Name: At_42deg_Heat_P Parameter: Plant Line Value: WS
  misc_feature: MA Experiment 20000171 PARAMETER Experiment Name: At_42deg_Heat_P Parameter: Temperature (deg C) Value: 42 vs. 22
  misc_feature: MA Experiment 20000171 PARAMETER Experiment Name: At_42deg_Heat_P Parameter: Timepoint (hr) Value: 1
  misc_feature: MA Experiment 20000171 PARAMETER Experiment Name: At_42deg_Heat_P Parameter: Tissue Value: Aerial
  misc_feature: MA Experiment ID: 20000173 Result: Up-regulated in Transcription
  misc_feature: MA Experiment 20000173 PARAMETER Experiment Name: At_42deg_Heat_P Parameter: Age (day) Value: 14
  misc_feature: MA Experiment 20000173 PARAMETER Experiment Name: At_42deg_Heat_P Parameter: Organism Value: A. thaliana
  misc_feature: MA Experiment 20000173 PARAMETER Experiment Name: At_42deg_Heat_P Parameter: Plant Line Value: WS
  misc_feature: MA Experiment 20000173 PARAMETER Experiment Name: At_42deg_Heat_P Parameter: Temperature (deg C) Value: 42 vs. 22
  misc_feature: MA Experiment 20000173 PARAMETER Experiment Name: At_42deg_Heat_P Parameter: Timepoint (hr) Value: 6
  misc_feature: MA Experiment 20000173 PARAMETER Experiment Name: At_42deg_Heat_P Parameter: Tissue Value: Aerial
  misc_feature: MA Experiment ID: 20000184 Result: Up-regulated in Transcription
  misc_feature: MA Experiment 20000184 PARAMETER Experiment Name: At_Shoots__P Parameter: Age (day) Value: 7
  misc_feature: MA Experiment 20000184 PARAMETER Experiment Name: At_Shoots__P Parameter: Tissue Value: Shoots vs. Whole Plant
  misc_feature: MA Experiment ID: 20000227 Result: Up-regulated in Transcription
  misc_feature: MA Experiment 20000227 PARAMETER Experiment Name: At_Root-Tips-vs-Tops_P Parameter: Tissue Value: Root Tips vs. Root Tops
  misc_feature: MA Experiment ID: 20000286 Result: Up-regulated in Transcription
  misc_feature: MA Experiment 20000286 PARAMETER Experiment Name: At_Open_Flower_P Parameter: Age (day) Value: 21
  misc_feature: MA Experiment 20000286 PARAMETER Experiment Name: At_Open_Flower_P Parameter: Plant Line Value: WS
  misc_feature: MA Experiment 20000286 PARAMETER Experiment Name: At_Open_Flower_P Parameter: Tissue Value: Half Open vs. Whole Plant
  misc_feature: MA Experiment ID: 20000436 Result: Up-regulated in Transcription
  misc_feature: MA Experiment 20000436 PARAMETER Experiment Name: At_Drought_P Parameter: Age (day) Value: 7
  misc_feature: MA Experiment 20000436 PARAMETER Experiment Name: At_Drought_P Parameter: Organism Value: A. thaliana
  misc_feature: MA Experiment 20000436 PARAMETER Experiment Name: At_Drought_P Parameter: Plant Line Value: WS
  misc_feature: MA Experiment 20000436 PARAMETER Experiment Name: At_Drought_P Parameter: Timepoint (hr) Value: 12
  misc_feature: MA Experiment 20000436 PARAMETER Experiment Name: At_Drought_P Parameter: Tissue Value: Whole Plant
  misc_feature: MA Experiment 20000436 PARAMETER Experiment Name: At_Drought_P Parameter: Treatment Value: Drought vs. No Drought
  misc_feature: MA Experiment ID: 20000451 Result: Down-regulated in Transcription
  misc_feature: MA Experiment 20000451 PARAMETER Experiment Name: At_CS6879_Shoots-Roots_P Parameter: Age (day) Value: 14
  misc_feature: MA Experiment 20000451 PARAMETER Experiment Name: At_CS6879_Shoots-Roots_P Parameter: Organism Value: A. thaliana
  misc_feature: MA Experiment 20000451 PARAMETER Experiment Name: At_CS6879_Shoots-Roots_P Parameter: Plant Line Value: CS6879 vs. WS
  misc_feature: MA Experiment 20000451 PARAMETER Experiment Name: At_CS6879_Shoots-Roots_P Parameter: Tissue Value: Roots
  misc_feature: MA Experiment ID: 20000794 Result: Up-regulated in Transcription
  misc_feature: MA Experiment 20000794 PARAMETER Experiment Name: At_Petals_P Parameter: Age (day) Value: 23-25 days
  misc_feature: MA Experiment 20000794 PARAMETER Experiment Name: At_Petals_P Parameter: Plant Line Value: WS
  misc_feature: MA Experiment 20000794 PARAMETER Experiment Name: At_Petals_P Parameter: Tissue Value: Petals vs. Whole plant
  misc_feature: MA Experiment ID: 20001248 Result: Down-regulated in Transcription
  misc_feature: MA Experiment 20001248 PARAMETER Experiment Name: At_Far-red-induction_P Parameter: Age (day) Value: 7
  misc_feature: MA Experiment 20001248 PARAMETER Experiment Name: At_Far-red-induction_P Parameter: Light Value: Far-red vs. White
  misc_feature: MA Experiment 20001248 PARAMETER Experiment Name: At_Far-red-induction_P Parameter: Organism Value: A. thaliana
  misc_feature: MA Experiment 20001248 PARAMETER Experiment Name: At_Far-red-induction_P Parameter: Plant Line Value: Columbia
  misc_feature: MA Experiment 20001248 PARAMETER Experiment Name: At_Far-red-induction_P Parameter: Timepoint (hr) Value: 4
  misc_feature: MA Experiment 20001248 PARAMETER Experiment Name: At_Far-red-induction_P Parameter: Tissue Value: Whole Plant
atgaaaagatcatccaccgtcacatcattaccgtgtctctccctctttctccttctgcttctgccgtcggtagtccaatcctccgacgaccttatcgacaaaatatgccaagcaacgccattctgcgacctatgtgaagcctctcttcgtccattctctccgtcaccttctgatcccaaatccttaggtgccgctatggccagcgtcgtgctcggaaacatgaccgatactttaggatacatccaatcgctgatcaaacatgctcacgatcctgcggcagagcgcgcgctggctcagtgcgctgagctgtaccggccggtggtcaagtttaatattcctcaggcgatggaggcaatgcagggcggcaaattcggctttgcgatatatgtgctcggagacgccgagaagcagactgattcttgtcagaaaggaatcacgaacgccggcgccgacgatgaaagctcggtggctgttacggctagaaacaagctagttaaaaatctttgtgacgtggcgatttctgtgcttaagtctctgatgaatggtctttaa

SEQ ID NO: 91720 - protein, 183 aa, Arabidopsis thaliana
  peptide (1)..(183): Ceres Seq. ID no. 12728985
  misc_feature (1)..(183): Homolog of NCBI NO: 15228972 NR Description: hypothetical protein; protein id: At3g17130.1 thaliana] >gi|7670037|dbj|BAA94991.1| gene_id:K14A17.20~unknown
  misc_feature (13)..(180): Homolog of NCBI NO: 18401982 NR Description: expressed protein; protein id: At1g47960.1, by cDNA: 102433., supported by cDNA: gi_15724356, supported by gi_15810208, supported by cDNA: gi_19699119 [Arabidopsis
MKRSSTVTSLPCLSLFLLLLLPSVVQSSDDLIDKICQATPFCDLCEASLRPFSPSPSDPKSLGAAMASVVLGNMTDTLGYIQSLIKHAHDPAAERALAQCAELYRPVVKFNIPQAMEAMQGGKFGFAIYVLGDAEKQTDSCQKGITNAGADDESSVAVTARNKLVKNLCDVAISVLKSLMNGL

SEQ ID NO: 91721 - protein, 118 aa, Arabidopsis thaliana
  peptide (1)..(118): Ceres Seq. ID no. 12728986
  misc_feature (1)..(118): Homolog of NCBI NO: 15228972 NR Description: hypothetical protein; protein id: At3g17130.1 thaliana] >gi|7670037|dbj|BAA94991.1| gene_id:K14A17.20~unknown
  misc_feature (1)..(115): Homolog of NCBI NO: 18401982 NR Description: expressed protein; protein id: At1g47960.1, by cDNA: 102433., supported by cDNA: gi_15724356, supported by gi_15810208, supported by cDNA: gi_19699119 [Arabidopsis
MASVVLGNMTDTLGYIQSLIKHAHDPAAERALAQCAELYRPVVKFNIPQAMEAMQGGKFGFAIYVLGDAEKQTDSCQKGITNAGADDESSVAVTARNKLVKNLCDVAISVLKSLMNGL

SEQ ID NO: 91722 - protein, 110 aa, Arabidopsis thaliana
  peptide (1)..(110): Ceres Seq. ID no. 12728987
  misc_feature (1)..(110): Homolog of NCBI NO: 15228972 NR Description: hypothetical protein; protein id: At3g17130.1 thaliana] >gi|7670037|dbj|BAA94991.1| gene_id:K14A17.20~unknown
  misc_feature (1)..(107): Homolog of NCBI NO: 18401982 NR Description: expressed protein; protein id: At1g47960.1, by cDNA: 102433., supported by cDNA: gi_15724356, supported by gi_15810208, supported by cDNA: gi_19699119 [Arabidopsis
MTDTLGYIQSLIKHAHDPAAERALAQCAELYRPVVKFNIPQAMEAMQGGKFGFAIYVLGDAEKQTDSCQKGITNAGADDESSVAVTARNKLVKNLCDVAISVLKSLMNGL

SEQ ID NO: 91723 - DNA, 1437 bp, Arabidopsis thaliana
  misc_feature (1)..(1437): Ceres Seq. ID no. 12728992
  misc_feature: MA Experiment ID: 20000180 Result: Down-regulated in Transcription
  misc_feature: MA Experiment 20000180 PARAMETER Experiment Name: At_Germinating_Seeds_P Parameter: Age (hr) Value: 24 vs. 0
  misc_feature: MA Experiment 20000180 PARAMETER Experiment Name: At_Germinating_Seeds_P Parameter: Tissue Value: Germinating Seeds
  misc_feature: MA Experiment ID: 20001904 Result: Up-regulated in Transcription
  misc_feature: MA Experiment 20001904 PARAMETER Experiment Name: At_Drought_Reproduction_P Parameter: Age (day) Value: 37
  misc_feature: MA Experiment 20001904 PARAMETER Experiment Name: At_Drought_Reproduction_P Parameter: Organism Value: A. thaliana
  misc_feature: MA Experiment 20001904 PARAMETER Experiment Name: At_Drought_Reproduction_P Parameter: Plant Line Value: WS
  misc_feature: MA Experiment 20001904 PARAMETER Experiment Name: At_Drought_Reproduction_P Parameter: Timepoint (day) Value: 7
  misc_feature: MA Experiment 20001904 PARAMETER Experiment Name: At_Drought_Reproduction_P Parameter: Tissue Value: Rosettes
  misc_feature: MA Experiment 20001904 PARAMETER Experiment Name: At_Drought_Reproduction_P Parameter: Treatment Value: Drought vs. No Drought
atgaatttgacacttccgatgaaaaaacaaaaatttctgctaatcatctcattattgatattattatcattacttcatcaagattatcacattgaagctcaaaattcagacaaagtagtcaatcttcctgaacaaccactgaacccaaagatctctcatttctcaggttatgtcaacgtcaatcaagaaaatacacgatcactcttcttttggttcttcgaagcattgtctgaatctccttcaacaagacctctagttctctggctcaatggaggtcctggatgttcatcgattggatatggagcagcatctgaattaggaccttttcgtgttgttgaaaatgggacaagtcttagtttcaatcaatactcttgggtccaagaagcgaatatgttgtttttagaatcaccagtcggagtagggttttcgtacacgaactcatcatctgatttggaaaacctcaacgacgctttcgttgcggaagatgcatacaacttcatggttgcttggtttgcaaggtatcctcagtataagtctcgtgatttcttcatagctggtgaaagctatgccggtcactactcacctcagctagccgagcttatatacgatcggaacaaagttcagccaaaggactccttcattaatctcaaaggcttcatcgtgggaaatccattgacggacgatgagtacgataacaaagggattctagaatacgcatggagccatgcagtgatctctgatcatctttacgactccgcaaaacataactgcgacttcaagtcttcgaactggtcagagccatgcaacgttgctatgaacacagtgttcacaaaatacaaagagattgatatttataacatatatgctcccaagtgcatatctaatagctcatcaggagcttcctacttaggtttcggagtcaatgataagtctccggcggttaaagactggttcaagagagtgagatggtttgaaggatacgatccttgttactctaattacgctgaagaatatttcaatagagtcgatgttcgattgtctcttcatgctactacacgaaatgtagcaaggtggaaagtttgcaatgattcgatattgcaaacgtaccattttacagtctcctcaatgttgcctacttatagtaagctcatcaaagctggcctcaagatatgggtttatagtggagatgccgacgggagagtcccggtgatcggaagtcggtattgtgttgaagctttagggatttccgtcaaatcggagtggcgttcttggttccacaatcatcaggtgggagggagaataacggagtacgagggagggttaacgttcgtaacggtgagaggagctggacacttggttcctctcaataaacctgaagaagctctcgcgcttttccggtccttccttaacggccaagaacttccgtcaagcccctag

SEQ ID NO: 91724 - protein, 478 aa, Arabidopsis thaliana
  peptide (1)..(478): Ceres Seq. ID no. 12728993
  misc_feature (1)..(478): Homolog of NCBI NO: 15228988 NR Description: putative serine carboxypeptidase II; protein id:
  misc_feature (7)..(478): Homolog of NCBI NO: 7670042 NR Description: serine carboxypeptidase II-like protein
  misc_feature (32)..(400): Homolog of NCBI NO: 34894888 NR Description: putative serine carboxypeptidase II-like protein
  misc_feature (403)..(476): Homolog of NCBI NO: 34894888 NR Description: putative serine carboxypeptidase II-like protein
  misc_feature (31)..(478): Homolog of NCBI NO: 10177810 NR Description: serine carboxypeptidase II-like protein
  misc_feature (13)..(288): Homolog of NCBI NO: 15220282 NR Description: Serine carboxypeptidase isolog; protein id: [Arabidopsis thaliana] >gi|25289784|pir||G86244 Serine
  misc_feature (322)..(477): Homolog of NCBI NO: 15220282 NR Description: Serine carboxypeptidase isolog; protein id: [Arabidopsis thaliana] >gi|25289784|pir||G86244 Serine
  misc_feature (7)..(477): Homolog of NCBI NO: 13877871 NR Description: putative serine carboxypeptidase II [Arabidopsis
  misc_feature (34)..(476): Homolog of NCBI NO: 15241571 NR Description: serine-type carboxypeptidase II-like protein; id: At5g08260.1, supported by cDNA: gi_13877962, supported by gi_17065641 [Arabidopsis thaliana] >gi|11264740|pir||T50511
  misc_feature (14)..(477): Homolog of NCBI NO: 15219869 NR Description: hypothetical protein; protein id: At1g61130.1
MNLTLPMKKQKFLLIISLLILLSLLHQDYHIEAQNSDKVVNLPEQPLNPKISHFSGYVNVNQENTRSLFFWFFEALSESPSTRPLVLWLNGGPGCSSIGYGAASELGPFRVVENGTSLSFNQYSWVQEANMLFLESPVGVGFSYTNSSSDLENLNDAFVAEDAYNFMVAWFARYPQYKSRDFFIAGESYAGHYSPQLAELIYDRNKVQPKDSFINLKGFIVGNPLTDDEYDNKGILEYAWSHAVISDHLYDSAKHNCDFKSSNWSEPCNVAMNTVFTKYKEIDIYNIYAPKCISNSSSGASYLGFGVNDKSPAVKDWFKRVRWFEGYDPCYSNYAEEYFNRVDVRLSLHATTRNVARWKVCNDSILQTYHFTVSSMLPTYSKLIKAGLKIWVYSGDADGRVPVIGSRYCVEALGISVKSEWRSWFHNHQVGGRITEYEGGLTFVTVRGAGHLVPLNKPEEALALFRSFLNGQELPSSP

SEQ ID NO: 91725 - protein, 472 aa, Arabidopsis thaliana
  peptide (1)..(472): Ceres Seq. ID no. 12728994
  misc_feature (1)..(472): Homolog of NCBI NO: 15228988 NR Description: putative serine carboxypeptidase II; protein id:
  misc_feature (1)..(472): Homolog of NCBI NO: 7670042 NR Description: serine carboxypeptidase II-like protein
  misc_feature (26)..(394): Homolog of NCBI NO: 34894888 NR Description: putative serine carboxypeptidase II-like protein
  misc_feature (397)..(470): Homolog of NCBI NO: 34894888 NR Description: putative serine carboxypeptidase II-like protein
  misc_feature (25)..(472): Homolog of NCBI NO: 10177810 NR Description: serine carboxypeptidase II-like protein
  misc_feature (7)..(282): Homolog of NCBI NO: 15220282 NR Description: Serine carboxypeptidase isolog; protein id: [Arabidopsis thaliana] >gi|25289784|pir||G86244 Serine
  misc_feature (316)..(471): Homolog of NCBI NO: 15220282 NR Description: Serine carboxypeptidase isolog; protein id: [Arabidopsis thaliana] >gi|25289784|pir||G86244 Serine
  misc_feature (1)..(471): Homolog of NCBI NO: 13877871 NR Description: putative serine carboxypeptidase II [Arabidopsis
  misc_feature (28)..(470): Homolog of NCBI NO: 15241571 NR Description: serine-type carboxypeptidase II-like protein; id: At5g08260.1, supported by cDNA: gi_13877962, supported by gi_17065641 [Arabidopsis thaliana] >gi|11264740|pir||T50511
  misc_feature (8)..(471): Homolog of NCBI NO: 15219869 NR Description: hypothetical protein; protein id: At1g61130.1
MKKQKFLLIISLLILLSLLHQDYHIEAQNSDKVVNLPEQPLNPKISHFSGYVNVNQENTRSLFFWFFEALSESPSTRPLVLWLNGGPGCSSIGYGAASELGPFRVVENGTSLSFNQYSWVQEANMLFLESPVGVGFSYTNSSSDLENLNDAFVAEDAYNFMVAWFARYPQYKSRDFFIAGESYAGHYSPQLAELIYDRNKVQPKDSFINLKGFIVGNPLTDDEYDNKGILEYAWSHAVISDHLYDSAKHNCDFKSSNWSEPCNVAMNTVFTKYKEIDIYNIYAPKCISNSSSGASYLGFGVNDKSPAVKDWFKRVRWFEGYDPCYSNYAEEYFNRVDVRLSLHATTRNVARWKVCNDSILQTYHFTVSSMLPTYSKLIKAGLKIWVYSGDADGRVPVIGSRYCVEALGISVKSEWRSWFHNHQVGGRITEYEGGLTFVTVRGAGHLVPLNKPEEALALFRSFLNGQELPSSP

SEQ ID NO: 91726 - protein, 348 aa, Arabidopsis thaliana
  peptide (1)..(348): Ceres Seq. ID no. 12728995
  misc_feature (1)..(348): Homolog of NCBI NO: 15228988 NR Description: putative serine carboxypeptidase II; protein id:
  misc_feature (1)..(348): Homolog of NCBI NO: 7670042 NR Description: serine carboxypeptidase II-like protein
  misc_feature (1)..(270): Homolog of NCBI NO: 34894888 NR Description: putative serine carboxypeptidase II-like protein
  misc_feature (273)..(346): Homolog of NCBI NO: 34894888 NR Description: putative serine carboxypeptidase II-like protein
  misc_feature (1)..(348): Homolog of NCBI NO: 10177810 NR Description: serine carboxypeptidase II-like protein
  misc_feature (1)..(158): Homolog of NCBI NO: 15220282 NR Description: Serine carboxypeptidase isolog; protein id: [Arabidopsis thaliana] >gi|25289784|pir||G86244 Serine
  misc_feature (192)..(347): Homolog of NCBI NO: 15220282 NR Description: Serine carboxypeptidase isolog; protein id: [Arabidopsis thaliana] >gi|25289784|pir||G86244 Serine
  misc_feature (1)..(347): Homolog of NCBI NO: 13877871 NR Description: putative serine carboxypeptidase II [Arabidopsis
  misc_feature (1)..(346): Homolog of NCBI NO: 15241571 NR Description: serine-type carboxypeptidase II-like protein; id: At5g08260.1, supported by cDNA: gi_13877962, supported by gi_17065641 [Arabidopsis thaliana] >gi|11264740|pir||T50511
  misc_feature (1)..(347): Homolog of NCBI NO: 15219869 NR Description: hypothetical protein; protein id: At1g61130.1
MLFLESPVGVGFSYTNSSSDLENLNDAFVAEDAYNFMVAWFARYPQYKSRDFFIAGESYAGHYSPQLAELIYDRNKVQPKDSFINLKGFIVGNPLTDDEYDNKGILEYAWSHAVISDHLYDSAKHNCDFKSSNWSEPCNVAMNTVFTKYKEIDIYNIYAPKCISNSSSGASYLGFGVNDKSPAVKDWFKRVRWFEGYDPCYSNYAEEYFNRVDVRLSLHATTRNVARWKVCNDSILQTYHFTVSSMLPTYSKLIKAGLKIWVYSGDADGRVPVIGSRYCVEALGISVKSEWRSWFHNHQVGGRITEYEGGLTFVTVRGAGHLVPLNKPEEALALFRSFLNGQELPSSP

SEQ ID NO: 91727 - DNA, 6027 bp, Arabidopsis thaliana
  misc_feature (1)..(6027): Ceres Seq. ID no. 12729019
  misc_feature: MA Experiment ID: 20000180 Result: Up-regulated in Transcription
  misc_feature: MA Experiment 20000180 PARAMETER Experiment Name: At_Germinating_Seeds_P Parameter: Age (hr) Value: 24 vs. 0
  misc_feature: MA Experiment 20000180 PARAMETER Experiment Name: At_Germinating_Seeds_P Parameter: Tissue Value: Germinating Seeds
atgtcccgaaacgttccgagaatagagatgccggaatcggaagaaaacgagttcgcgagcttgtctttgttttcgccttcaagacctcctctgaattcgataccggatccaagtcaaattcagaaggcgaatcatctaccccatttcgatttggttcagaaattggaaggtacaagagcgcagcatcaacgaacacttggtccagagaagaaatttgaagttttggaaggtagagctggaaattcgagtgattcgaaccctaagattgttaatcgtaatggaaaatctcggtcggagccaaactctgcgcagagtacgcccactaggaacggtgctagggtttctcttggtggtggttgtgctaccggcgcaagatttcttcagtctttcggtggaagaggaaggattccgaggggagtttctattgctgagtctgttagcttcgcggaaacaactccacattttgaactcaatgaagatcattcgttttggaaagaccacaatgtgcaggttttgataaggctgagaccattaggcacaatggaaagggctaatcaaggatatggccatccagaggccagattcacctttgaccacgttgccagtgagacaatatctcaggaaaaactgtttcgcgttgctggactgcccatggtggagaattgcttatctggttacaacagctgtgtgtttgcctacggtcagactggtagtggcaagacttatactatgatgggagagatatctgaggcagagggaagcctcggtgaagactgcggagttactgctcgtatttttgagtatctgttctcaagaattaaaatggaagaagaggaaaggagagatgaaaatttgaagttcagttgcaaatgttcttttcttgagatatataacgagcagataaccgacctcttggaaccatcgtcaaccaatttgcaacttagagaagacttggggaaaggagtatatgttgaaaatcttgtagaacataatgtgagaactgttagtgacgttctaaagcttctactacagggagcaactaaccggaagattgctgcaacccgtatgaacagtgaaagcagcagatcccacagcgttttcacttgtacaattgagagtctctgggagaaagattctctaactcgttcaagatttgccagactaaacttggtcgatttggctggttctgaaaggcagaaaagctcaggtgcggaaggggatcgcctaaaagaagcagcaaacattaacaaatccttatcaactttgggcttggtgataatgtctctggtggatttggcacatgggaaacatagacatgttccctatagagattctcgacttacctttttactgcaggattctctagggggtaactccaaaacaatgataatagctaatgtcagcccatctctttgctctacaaacgaaaccctcagcaccctgaagttcgcgcaacgggcaaaactaatccagaataatgctaaagtaaatgaagatgcctctggggatgttacagcactccaacaggaaataagaaagttaaaggtccaactgacttctcttctgaagaaccatgactcttgtggggctctttcagactgcatatcttctcttgaagaatccagatactctggtacatgtaaagtagcaggagaaacaagacaagacaagtgtcactgtcaggtgcataattcactgagagtgaaggtgaaaaatatgaacgataatatgattggtgctctcagaagggaaaagattgctgaatctgcccttcagaagtccgaggctgagattgagcgtatagattgcttggttagagacatggaagaagatgctaagcgcattaaaataatgcttaatcttagggaagagaaagttggagagatggaattctgtacgtctggttcattgatgacaaaagagtgtctcattgaagaaaataaaactctaaaaggagagatcaagcttcttcgcgacagcattgacaagaatccagagttgacacgttcagccttggagaacaccaagctccgggagcagctacaacgatatcagaaattttacgagcatggggaacgagaggcattacttgctgaggtgacaggactacgtgaccagcttcttgatgttcttgaagcaaaagatgaatccttttctaaacacgttatgaaggagaacgaaatggaaaaggaattcgaagactgcagaaacatgaactctagtttgatcagagaactagatgaaatacaagcaggacttggaagatacttgaatttcgatcaaatacaatccaacgttgttgcatcttccaccagaggagctgagcaggcagaaacaatgccaactataagtgaaatccaagaggaggtggctatttcacatagtaaaaactatgatagaggtgcactagtgaagacagatgaggggatagaccggtcaatcctgcagttcaagttagggaagttaatgaaggacctcgaggaggccagaacactcaattgtaaatatgaaaaagatcataagtcgcagttatctcaacaagaagacattgaagtagtccgtgagcaagtcgagacagaaactgctagaaccattcttgagttgcaggaagaggtgattgctctccagtctgaatttcaaagaagaatctgtaacttgaccgaggaaaatcagtcgataaaagatactataactgctagagagtcagaaataagagcacttaaccaagactgggaaaaggctaccttagaactgactaatttcatcgtcgctgggtccaaatccatcaaaaatgcctctacacagattgaaagtatcatctgttcatttccacaagtgaatgcgtggataggtgattatgttgagaaggctgcaaaaaattgtataaaaaaggaagaaacaattttacttctacagaaaagcttggaagatgcaaggatattagtagcagagatgaatttgaagctgaattctttaaagggcgcaacaattgctctcaacgaatttcaactgggtggcaatgctgcaacgactgaagaggctttcaacttgaataatgatgtagacaggatgagcgatgaggtagacacgcttgagagtaactttaaagcaaatcaatattctattctgaaaacagaacgacatgccgaagctgctttagctgttacaaaatggctttctgattctagagatcaacaccaaatgatggaaaaagtacaagatcaatcagttaaagaatttggtacattaagttcaatctctgcttctcttagtgcggaagggaatgctgatattagtttgtcaagggatggacatctaagtgacgcaacatatccaaagggtgatgagctttcaacatcaagctctgacttttcaaactgtagatggcaacatgattgtgcactgaacgtaaagtgtcaaggagtttcaagttctgaatctgacgctcaagaaagtaataacaagattacatcagcagctttaattgctaagaatggttctgcacattctgtttactgtggagaggggaggcagtcagttgagaagccattgaccattatgatggggagagaagaaacagaatacaaatgcagtaaaccgctttcttctggggtatatatgggtcttatgcagagaatggatcctgttagaactttcttcgatcgatttgaggaagtcaatgctaccatgaaagaagctgatctcacaatatgtgaattagtaaaggccaatgaaaaatcaaatagtgttactgaaatgtggcttcaaacccatgaagagttaataagtaaggaaaaaaatttgatggatgatcttgaacaggtcaagtctatactatctgcttgtgaagaagaaaaacaagtcttgctaaatcaaacacacaccactttggcggacatggaaaattcagtgtctttgcttgaagaatattttcaggaaatgaaaagaggagtagaagaaacagtagaggctttgttttcccatgcccgtttagctggaaaagagcttctccaattgatttccaactcaagaccatcacttgaacagattgcatctgaattcatggagagagagttcaccatgtatgcaacataccaatgccacattgggaaactgatcgatcaaattttggatcagagaaaacaggttatcactcccaacctttcaggccaagaaaccaatcagtcagtgaagattaatgccattgggtataatgccgaagatgaagtcactaaaaagcaaagcagagaagagattgtcacaggcttagaaaatgatgaagttgttcagtcacatgaaagcctattatatgagaacttgtatctgaaaaaggagcttgagagaaaagaagctttgtttgaaggcttgctttttgattttaggctacttcaggaatcagcatcaaataaaagagatatcaagaatgaaatggatgagctgtttgacgcattatgcaaagtacagctagagctggaactgaaagcaagtcaagttcatgagctttttgttcataacgagaatcttgaaaattgctccattgacttgaaaacggcgttgttcacgtcacagtcagatctagagcaggctaaacagaggatacaaattcttgcggagcagaatgatgagttaagggcccttgttagtgatctctgtaaggaaaaggctgcagctgaggagggattggacgaacaaagggatcttgtcaataggttggaaaaagaaatccttcacttgactactacagcagagaagcaattgctttctgcggtcaagtccattaaagaaaatttgaaaaagaccagcgatgagaaagatcagattgttgacgaaatatgttcgttaaataataagcttgagttggcctatgctatagctgatgaaaaagaagcaattgccgtagaggctcatcaggaatctgaagcaagtaaaatatatgctgaacaaaaggaagaggaggtcaagattctagaaatttctgttgaggaacttgagcgtacgataaatatattagaaagacgggtgtatgatatggatgaagaagtaaaaaggcatcgtaccacccaagattcgttagagacagagctgcaagctctcagacagagattgtttcgatttgaaaacttcactggcactatggtcacaaccaatgaaagcacagaggaatataagagtcacatatccaggtcgacagggctgcaaggtgcgcatagtcagatacaagtcctacagaaggaagtagcagaacaaaccaaagagattaaacagctaaaagagtacatctccgagatcttactgcattctgaggcccaatcatctgcttaccaagagaagatgaaactggagaaggatcaggaattgacaatggcaagggttcgtgttgaagaattggagtcattgctagctgttaaacagaaagagatttgcacattgaacacgaggatagctgcagctgatagcatgactcatgatgtgattcgggatttacttggtgtgaaaatggatataaccagctatgctgagttgattgaccagcaccaggtccaaagagtggttgaaaaggctcagcaacatgctgaagagatcctgtccaaggagcaagaagtcatgaacctgaagagacatattgattatctatttaaggatagagagagttgcatgtcagagttgaacaagaaagatacagatgttcttgcgacacagatatcattagaccaactacaagagcgagttcagttgctttctatgcaaaacgaaatgcttaagaatgacaagagcaatttgctgaggaagttagctgaacttgatcgaacagtccacaatgcacaggccagtaaccatcgtgttccacagacaacaaaggatacagcgtcatttaaacttgctgatactgattataccaagagactggaaaacgctcagaagcttctttcccatgctaataacgaattggcaaagtatcgcaaaacgagcaataaccatccatctacaagaactcaaggacagagctctggtacaagatatcggtaa

SEQ ID NO: 91728 - protein, 2008 aa, Arabidopsis thaliana
  peptide (1)..(2008): Ceres Seq. ID no. 12729020
  misc_feature (1427)..(1992): Pfam Name: Synaptonemal complex protein 1 (SCP-1) Pfam Description: Synaptonemal complex protein 1 (SCP-1)
  misc_feature (30)..(1034): Homolog of NCBI NO: 9280323 NR Description: kinesin (centromeric protein)-like protein
  misc_feature (1376)..(1994): Homolog of NCBI NO: 9280323 NR Description: kinesin (centromeric protein)-like protein
  misc_feature (84)..(1034): Homolog of NCBI NO: 22331168 NR Description: kinesin-related protein; protein id: At3g19050.1
  misc_feature (1376)..(1975): Homolog of NCBI NO: 22331168 NR Description: kinesin-related protein; protein id: At3g19050.1
  misc_feature (92)..(1989): Homolog of NCBI NO: 27261081 NR Description: OJ1340_C08.3 [Oryza sativa (japonica
  misc_feature (155)..(788): Homolog of NCBI NO: 40539007 NR Description: kinesin-like protein [Oryza sativa (japonica
  misc_feature (155)..(934): Homolog of NCBI NO: 15229853 NR Description: kinesin-related protein; protein id: At3g44050.1
  misc_feature (1363)..(1943): Homolog of NCBI NO: 9887310 NR Description: kinesin-like protein KRP180 [Strongylocentrotus
  misc_feature (188)..(719): Homolog of NCBI NO: 9887310 NR Description: kinesin-like protein KRP180 [Strongylocentrotus
  misc_feature (166)..(518): Homolog of NCBI NO: 22331291 NR Description: phragmoplast-associated kinesin-related protein, protein id: At3g23670.1 [Arabidopsis thaliana] AT3g23670/MDB19_16 [Arabidopsis thaliana]
MSRNVPRIEMPESEENEFASLSLFSPSRPPLNSIPDPSQIQKANHLPHFDLVQKLEGTRAQHQRTLGPEKKFEVLEGRAGNSSDSNPKIVNRNGKSRSEPNSAQSTPTRNGARVSLGGGCATGARFLQSFGGRGRIPRGVSIAESVSFAETTPHFELNEDHSFWKDHNVQVLIRLRPLGTMERANQGYGHPEARFTFDHVASETISQEKLFRVAGLPMVENCLSGYNSCVFAYGQTGSGKTYTMMGEISEAEGSLGEDCGVTARIFEYLFSRIKMEEEERRDENLKFSCKCSFLEIYNEQITDLLEPSSTNLQLREDLGKGVYVENLVEHNVRTVSDVLKLLLQGATNRKIAATRMNSESSRSHSVFTCTIESLWEKDSLTRSRFARLNLVDLAGSERQKSSGAEGDRLKEAANINKSLSTLGLVIMSLVDLAHGKHRHVPYRDSRLTFLLQDSLGGNSKTMIIANVSPSLCSTNETLSTLKFAQRAKLIQNNAKVNEDASGDVTALQQEIRKLKVQLTSLLKNHDSCGALSDCISSLEESRYSGTCKVAGETRQDKCHCQVHNSLRVKVKNMNDNMIGALRREKIAESALQKSEAEIERIDCLVRDMEEDAKRIKIMLNLREEKVGEMEFCTSGSLMTKECLIEENKTLKGEIKLLRDSIDKNPELTRSALENTKLREQLQRYQKFYEHGEREALLAEVTGLRDQLLDVLEAKDESFSKHVMKENEMEKEFEDCRNMNSSLIRELDEIQAGLGRYLNFDQIQSNVVASSTRGAEQAETMPTISEIQEEVAISHSKNYDRGALVKTDEGIDRSILQFKLGKLMKDLEEARTLNCKYEKDHKSQLSQQEDIEVVREQVETETARTILELQEEVIALQSEFQRRICNLTEENQSIKDTITARESEIRALNQDWEKATLELTNFIVAGSKSIKNASTQIESIICSFPQVNAWIGDYVEKAAKNCIKKEETILLLQKSLEDARILVAEMNLKLNSLKGATIALNEFQLGGNAATTEEAFNLNNDVDRMSDEVDTLESNFKANQYSILKTERHAEAALAVTKWLSDSRDQHQMMEKVQDQSVKEFGTLSSISASLSAEGNADISLSRDGHLSDATYPKGDELSTSSSDFSNCRWQHDCALNVKCQGVSSSESDAQESNNKITSAALIAKNGSAHSVYCGEGRQSVEKPLTIMMGREETEYKCSKPLSSGVYMGLMQRMDPVRTFFDRFEEVNATMKEADLTICELVKANEKSNSVTEMWLQTHEELISKEKNLMDDLEQVKSILSACEEEKQVLLNQTHTTLADMENSVSLLEEYFQEMKRGVEETVEALFSHARLAGKELLQLISNSRPSLEQIASEFMEREFTMYATYQCHIGKLIDQILDQRKQVITPNLSGQETNQSVKINAIGYNAEDEVTKKQSREEIVTGLENDEVVQSHESLLYENLYLKKELERKEALFEGLLFDFRLLQESASNKRDIKNEMDELFDALCKVQLELELKASQVHELFVHNENLENCSIDLKTALFTSQSDLEQAKQRIQILAEQNDELRALVSDLCKEKAAAEEGLDEQRDLVNRLEKEILHLTTTAEKQLLSAVKSIKENLKKTSDEKDQIVDEICSLNNKLELAYAIADEKEAIAVEAHQESEASKIYAEQKEEEVKILEISVEELERTINILERRVYDMDEEVKRHRTTQDSLETELQALRQRLFRFENFTGTMVTTNESTEEYKSHISRSTGLQGAHSQIQVLQKEVAEQTKEIKQLKEYISEILLHSEAQSSAYQEKMKLEKDQELTMARVRVEELESLLAVKQKEICTLNTRIAAADSMTHDVIRDLLGVKMDITSYAELIDQHQVQRVVEKAQQHAEEILSKEQEVMNLKRHIDYLFKDRESCMSELNKKDTDVLATQISLDQLQERVQLLSMQNEMLKNDKSNLLRKLAELDRTVHNAQASNHRVPQTTKDTASFKLADTDYTKRLENAQKLLSHANNELAKYRKTSNNHPSTRTQGQSSGTRYR

SEQ ID NO: 91729 - protein, 1999 aa, Arabidopsis thaliana
  peptide (1)..(1999): Ceres Seq. ID no. 12729021
  misc_feature (1418)..(1983): Pfam Name: Synaptonemal complex protein 1 (SCP-1) Pfam Description: Synaptonemal complex protein 1 (SCP-1)
  misc_feature (21)..(1025): Homolog of NCBI NO: 9280323 NR Description: kinesin (centromeric protein)-like protein
  misc_feature (1367)..(1985): Homolog of NCBI NO: 9280323 NR Description: kinesin (centromeric protein)-like protein
  misc_feature (75)..(1025): Homolog of NCBI NO: 22331168 NR Description: kinesin-related protein; protein id: At3g19050.1
  misc_feature (1367)..(1966): Homolog of NCBI NO: 22331168 NR Description: kinesin-related protein; protein id: At3g19050.1
  misc_feature (83)..(1980): Homolog of NCBI NO: 27261081 NR Description: OJ1340_C08.3 [Oryza sativa (japonica
  misc_feature (146)..(779): Homolog of NCBI NO: 40539007 NR Description: kinesin-like protein [Oryza sativa (japonica
  misc_feature (146)..(925): Homolog of NCBI NO: 15229853 NR Description: kinesin-related protein; protein id: At3g44050.1
  misc_feature (1354)..(1934): Homolog of NCBI NO: 9887310 NR Description: kinesin-like protein KRP180 [Strongylocentrotus
  misc_feature (179)..(710): Homolog of NCBI NO: 9887310 NR Description: kinesin-like protein KRP180 [Strongylocentrotus
  misc_feature (157)..(509): Homolog of NCBI NO: 22331291 NR Description: phragmoplast-associated kinesin-related protein, protein id: At3g23670.1 [Arabidopsis thaliana] AT3g23670/MDB19_16 [Arabidopsis thaliana]
MPESEENEFASLSLFSPSRPPLNSIPDPSQIQKANHLPHFDLVQKLEGTRAQHQRTLGPEKKFEVLEGRAGNSSDSNPKIVNRNGKSRSEPNSAQSTPTRNGARVSLGGGCATGARFLQSFGGRGRIPRGVSIAESVSFAETTPHFELNEDHSFWKDHNVQVLIRLRPLGTMERANQGYGHPEARFTFDHVASETISQEKLFRVAGLPMVENCLSGYNSCVFAYGQTGSGKTYTMMGEISEAEGSLGEDCGVTARIFEYLFSRIKMEEEERRDENLKFSCKCSFLEIYNEQITDLLEPSSTNLQLREDLGKGVYVENLVEHNVRTVSDVLKLLLQGATNRKIAATRMNSESSRSHSVFTCTIESLWEKDSLTRSRFARLNLVDLAGSERQKSSGAEGDRLKEAANINKSLSTLGLVIMSLVDLAHGKHRHVPYRDSRLTFLLQDSLGGNSKTMIIANVSPSLCSTNETLSTLKFAQRAKLIQNNAKVNEDASGDVTALQQEIRKLKVQLTSLLKNHDSCGALSDCISSLEESRYSGTCKVAGETRQDKCHCQVHNSLRVKVKNMNDNMIGALRREKIAESALQKSEAEIERIDCLVRDMEEDAKRIKIMLNLREEKVGEMEFCTSGSLMTKECLIEENKTLKGEIKLLRDSIDKNPELTRSALENTKLREQLQRYQKFYEHGEREALLAEVTGLRDQLLDVLEAKDESFSKHVMKENEMEKEFEDCRNMNSSLIRELDEIQAGLGRYLNFDQIQSNVVASSTRGAEQAETMPTISEIQEEVAISHSKNYDRGALVKTDEGIDRSILQFKLGKLMKDLEEARTLNCKYEKDHKSQLSQQEDIEVVREQVETETARTILELQEEVIALQSEFQRRICNLTEENQSIKDTITARESEIRALNQDWEKATLELTNFIVAGSKSIKNASTQIESIICSFPQVNAWIGDYVEKAAKNCIKKEETILLLQKSLEDARILVAEMNLKLNSLKGATIALNEFQLGGNAATTEEAFNLNNDVDRMSDEVDTLESNFKANQYSILKTERHAEAALAVTKWLSDSRDQHQMMEKVQDQSVKEFGTLSSISASLSAEGNADISLSRDGHLSDATYPKGDELSTSSSDFSNCRWQHDCALNVKCQGVSSSESDAQESNNKITSAALIAKNGSAHSVYCGEGRQSVEKPLTIMMGREETEYKCSKPLSSGVYMGLMQRMDPVRTFFDRFEEVNATMKEADLTICELVKANEKSNSVTEMWLQTHEELISKEKNLMDDLEQVKSILSACEEEKQVLLNQTHTTLADMENSVSLLEEYFQEMKRGVEETVEALFSHARLAGKELLQLISNSRPSLEQIASEFMEREFTMYATYQCHIGKLIDQILDQRKQVITPNLSGQETNQSVKINAIGYNAEDEVTKKQSREEIVTGLENDEVVQSHESLLYENLYLKKELERKEALFEGLLFDFRLLQESASNKRDIKNEMDELFDALCKVQLELELKASQVHELFVHNENLENCSIDLKTALFTSQSDLEQAKQRIQILAEQNDELRALVSDLCKEKAAAEEGLDEQRDLVNRLEKEILHLTTTAEKQLLSAVKSIKENLKKTSDEKDQIVDEICSLNNKLELAYAIADEKEAIAVEAHQESEASKIYAEQKEEEVKILEISVEELERTINILERRVYDMDEEVKRHRTTQDSLETELQALRQRLFRFENFTGTMVTTNESTEEYKSHISRSTGLQGAHSQIQVLQKEVAEQTKEIKQLKEYISEILLHSEAQSSAYQEKMKLEKDQELTMARVRVEELESLLAVKQKEICTLNTRIAAADSMTHDVIRDLLGVKMDITSYAELIDQHQVQRVVEKAQQHAEEILSKEQEVMNLKRHIDYLFKDRESCMSELNKKDTDVLATQISLDQLQERVQLLSMQNEMLKNDKSNLLRKLAELDRTVHNAQASNHRVPQTTKDTASFKLADTDYTKRLENAQKLLSHANNELAKYRKTSNNHPSTRTQGQSSGTRYR

SEQ ID NO: 91730 - protein, 1828 aa, Arabidopsis thaliana
  peptide (1)..(1828): Ceres Seq. ID no. 12729022
  misc_feature (1247)..(1812): Pfam Name: Synaptonemal complex protein 1 (SCP-1) Pfam Description: Synaptonemal complex protein 1 (SCP-1)
  misc_feature (1)..(854): Homolog of NCBI NO: 9280323 NR Description: kinesin (centromeric protein)-like protein
  misc_feature (1196)..(1814): Homolog of NCBI NO: 9280323 NR Description: kinesin (centromeric protein)-like protein
  misc_feature (1)..(854): Homolog of NCBI NO: 22331168 NR Description: kinesin-related protein; protein id: At3g19050.1
  misc_feature (1196)..(1795): Homolog of NCBI NO: 22331168 NR Description: kinesin-related protein; protein id: At3g19050.1
  misc_feature (1)..(1809): Homolog of NCBI NO: 27261081 NR Description: OJ1340_C08.3 [Oryza sativa (japonica
  misc_feature (1)..(608): Homolog of NCBI NO: 40539007 NR Description: kinesin-like protein [Oryza sativa (japonica
  misc_feature (1)..(754): Homolog of NCBI NO: 15229853 NR Description: kinesin-related protein; protein id: At3g44050.1
  misc_feature (1183)..(1763): Homolog of NCBI NO: 9887310 NR Description: kinesin-like protein KRP180 [Strongylocentrotus
  misc_feature (8)..(539): Homolog of NCBI NO: 9887310 NR Description: kinesin-like protein KRP180 [Strongylocentrotus
  misc_feature (1)..(338): Homolog of NCBI NO: 22331291 NR Description: phragmoplast-associated kinesin-related protein, protein id: At3g23670.1 [Arabidopsis thaliana] AT3g23670/MDB19_16 [Arabidopsis thaliana]
MERANQGYGHPEARFTFDHVASETISQEKLFRVAGLPMVENCLSGYNSCVFAYGQTGSGKTYTMMGEISEAEGSLGEDCGVTARIFEYLFSRIKMEEEERRDENLKFSCKCSFLEIYNEQITDLLEPSSTNLQLREDLGKGVYVENLVEHNVRTVSDVLKLLLQGATNRKIAATRMNSESSRSHSVFTCTIESLWEKDSLTRSRFARLNLVDLAGSERQKSSGAEGDRLKEAANINKSLSTLGLVIMSLVDLAHGKHRHVPYRDSRLTFLLQDSLGGNSKTMIIANVSPSLCSTNETLSTLKFAQRAKLIQNNAKVNEDASGDVTALQQEIRKLKVQLTSLLKNHDSCGALSDCISSLEESRYSGTCKVAGETRQDKCHCQVHNSLRVKVKNMNDNMIGALRREKIAESALQKSEAEIERIDCLVRDMEEDAKRIKIMLNLREEKVGEMEFCTSGSLMTKECLIEENKTLKGEIKLLRDSIDKNPELTRSALENTKLREQLQRYQKFYEHGEREALLAEVTGLRDQLLDVLEAKDESFSKHVMKENEMEKEFEDCRNMNSSLIRELDEIQAGLGRYLNFDQIQSNVVASSTRGAEQAETMPTISEIQEEVAISHSKNYDRGALVKTDEGIDRSILQFKLGKLMKDLEEARTLNCKYEKDHKSQLSQQEDIEVVREQVETETARTILELQEEVIALQSEFQRRICNLTEENQSIKDTITARESEIRALNQDWEKATLELTNFIVAGSKSIKNASTQIESIICSFPQVNAWIGDYVEKAAKNCIKKEETILLLQKSLEDARILVAEMNLKLNSLKGATIALNEFQLGGNAATTEEAFNLNNDVDRMSDEVDTLESNFKANQYSILKTERHAEAALAVTKWLSDSRDQHQMMEKVQDQSVKEFGTLSSISASLSAEGNADISLSRDGHLSDATYPKGDELSTSSSDFSNCRWQHDCALNVKCQGVSSSESDAQESNNKITSAALIAKNGSAHSVYCGEGRQSVEKPLTIMMGREETEYKCSKPLSSGVYMGLMQRMDPVRTFFDRFEEVNATMKEADLTICELVKANEKSNSVTEMWLQTHEELISKEKNLMDDLEQVKSILSACEEEKQVLLNQTHTTLADMENSVSLLEEYFQEMKRGVEETVEALFSHARLAGKELLQLISNSRPSLEQIASEFMEREFTMYATYQCHIGKLIDQILDQRKQVITPNLSGQETNQSVKINAIGYNAEDEVTKKQSREEIVTGLENDEVVQSHESLLYENLYLKKELERKEALFEGLLFDFRLLQESASNKRDIKNEMDELFDALCKVQLELELKASQVHELFVHNENLENCSIDLKTALFTSQSDLEQAKQRIQILAEQNDELRALVSDLCKEKAAAEEGLDEQRDLVNRLEKEILHLTTTAEKQLLSAVKSIKENLKKTSDEKDQIVDEICSLNNKLELAYAIADEKEAIAVEAHQESEASKIYAEQKEEEVKILEISVEELERTINILERRVYDMDEEVKRHRTTQDSLETELQALRQRLFRFENFTGTMVTTNESTEEYKSHISRSTGLQGAHSQIQVLQKEVAEQTKEIKQLKEYISEILLHSEAQSSAYQEKMKLEKDQELTMARVRVEELESLLAVKQKEICTLNTRIAAADSMTHDVIRDLLGVKMDITSYAELIDQHQVQRVVEKAQQHAEEILSKEQEVMNLKRHIDYLFKDRESCMSELNKKDTDVLATQISLDQLQERVQLLSMQNEMLKNDKSNLLRKLAELDRTVHNAQASNHRVPQTTKDTASFKLADTDYTKRLENAQKLLSHANNELAKYRKTSNNHPSTRTQGQSSGTRYR

SEQ ID NO: 91731 - DNA, 1324 bp, Arabidopsis thaliana
  misc_feature (1)..(1324): Ceres Seq. ID no. 12729055
  misc_feature: MA Experiment ID: 20000171 Result: Up-regulated in Transcription
  misc_feature: MA Experiment 20000171 PARAMETER Experiment Name: At_42deg_Heat_P Parameter: Age (day) Value: 14
  misc_feature: MA Experiment 20000171 PARAMETER Experiment Name: At_42deg_Heat_P Parameter: Organism Value: A. thaliana
  misc_feature: MA Experiment 20000171 PARAMETER Experiment Name: At_42deg_Heat_P Parameter: Plant Line Value: WS
  misc_feature: MA Experiment 20000171 PARAMETER Experiment Name: At_42deg_Heat_P Parameter: Temperature (deg C) Value: 42 vs. 22
  misc_feature: MA Experiment 20000171 PARAMETER Experiment Name: At_42deg_Heat_P Parameter: Timepoint (hr) Value: 1
  misc_feature: MA Experiment 20000171 PARAMETER Experiment Name: At_42deg_Heat_P Parameter: Tissue Value: Aerial
  misc_feature: MA Experiment ID: 20000173 Result: Up-regulated in Transcription
  misc_feature: MA Experiment 20000173 PARAMETER Experiment Name: At_42deg_Heat_P Parameter: Age (day) Value: 14
  misc_feature: MA Experiment 20000173 PARAMETER Experiment Name: At_42deg_Heat_P Parameter: Organism Value: A. thaliana
  misc_feature: MA Experiment 20000173 PARAMETER Experiment Name: At_42deg_Heat_P Parameter: Plant Line Value: WS
  misc_feature: MA Experiment 20000173 PARAMETER Experiment Name: At_42deg_Heat_P Parameter: Temperature (deg C) Value: 42 vs. 22
  misc_feature: MA Experiment 20000173 PARAMETER Experiment Name: At_42deg_Heat_P Parameter: Timepoint (hr) Value: 6
  misc_feature: MA Experiment 20000173 PARAMETER Experiment Name: At_42deg_Heat_P Parameter: Tissue Value: Aerial
  misc_feature: MA Experiment ID: 20001248 Result: Down-regulated in Transcription
  misc_feature: MA Experiment 20001248 PARAMETER Experiment Name: At_Far-red-induction_P Parameter: Age (day) Value: 7
  misc_feature: MA Experiment 20001248 PARAMETER Experiment Name: At_Far-red-induction_P Parameter: Light Value: Far-red vs. White
  misc_feature: MA Experiment 20001248 PARAMETER Experiment Name: At_Far-red-induction_P Parameter: Organism Value: A. thaliana
  misc_feature: MA Experiment 20001248 PARAMETER Experiment Name: At_Far-red-induction_P Parameter: Plant Line Value: Columbia
  misc_feature: MA Experiment 20001248 PARAMETER Experiment Name: At_Far-red-induction_P Parameter: Timepoint (hr) Value: 4
  misc_feature: MA Experiment 20001248 PARAMETER Experiment Name: At_Far-red-induction_P Parameter: Tissue Value: Whole Plant
acttgtaagtgattcagagagatcagaagaaaagaataattacgaagaaatggagaattttggtgaagggagaagaagtggaggcggaatgttgccgttgctggctctaagcgccgtcgcggagtactatagactaccgtggaaaccaccggtgacggcgagtctcctggccgcgaacactctcgtttatctcaggccggcgtttatcgatcccgttattcctcacatcagtgaggtctggttcaatcctcacctcatcttcaagcataaggacttgaagcgtttatttctatcagcgttctaccatgttaacgagcctcacttagtctataacatgatgtcacttctctggaaaggtatcaagcttgagacatcaatgggaagcagtgagtttgcttcaatggtctttactcttattggtatgtctcaaggagtcacattgttgttagccaaatcgcttcttctcttgtttgactatgacagagcttactacaacgagtatgcggttgggttctcgggtgttctctttgctatgaaagttgttcttaattctcaagctgaggattactcaagtgtgtatggtatcttggttccaacaaagtatgctgcttgggcagaattgattctagtgcagatgtttgtacctaacgcttcgtttcttgggcatttgggtggaatccttgctggtattatctatttgaagctgaaaggttcttactcaggctcagatccagtcactatggcggttagaggtgtatctcgattggtgacgtggcccttgaggtttctgaatggtatggttaggtctcggagaaggaggattacggggagaggaagagtgggaagaggtcagactgggatagcaggacctggtatttggagatgtcagtcgtgtacatatgacaattctggttggttaagtgcttgcgagatgtgtggctcgggacgggctagaggaaatggatggtcactgaatcagggaccagcactttcttcttctaatgatctccctttagatgagctgcgccgtcgaagagtagagaggtttagttgatctcgggagcgcattcttaaagctgaggaaggattgtgaatgaagctttgttgaatcattcattgcattagcttatgaatagcagagttagtggtcgtgtttttcgatctgtttcttcaatttgtcttctcttttgttgttgaagatttggttctacgtgaactggtcctttgattagattgctgaaagtagcgagtgattcagataatatagtatcttcacaccaaacttacagtttcacagactttcgattttaacaaaattttatcc

SEQ ID NO: 91732 - protein, 350 aa, Arabidopsis thaliana
  peptide (1)..(350): Ceres Seq. ID no. 12729056
  misc_feature (289)..(318): Pfam Name: Zn-finger in Ran binding protein and others Pfam Description: Zn-finger in Ran binding protein and others
  misc_feature (6)..(350): Homolog of NCBI NO: 9294149 NR Description: gene_id:MKP6.17~unknown protein [Arabidopsis
  misc_feature (17)..(350): Homolog of NCBI NO: 30684602 NR Description: expressed protein [Arabidopsis thaliana] unknown protein [Arabidopsis thaliana]
  misc_feature (21)..(350): Homolog of NCBI NO: 34902516 NR Description: P0581F09.16 [Oryza sativa (japonica >gi|13486724|dbj|BAB39959.1| hypothetical protein~similar to thaliana chromosome 3, MKP6.17 [Oryza sativa (japonica sativa
  misc_feature (48)..(202): Homolog of NCBI NO: 18419592 NR Description: unknown [Narcissus pseudonarcissus]
  misc_feature (24)..(232): Homolog of NCBI NO: 33300639 NR Description: hypothetical protein DKFZp547E052 [Homo sapiens]
  misc_feature (49)..(232): Homolog of NCBI NO: 16041108 NR Description: hypothetical protein [Macaca fascicularis]
  misc_feature (49)..(232): Homolog of NCBI NO: 26325686 NR Description: unnamed protein product [Mus musculus] unnamed protein product [Mus musculus]
  misc_feature (24)..(232): Homolog of NCBI NO: 34876979 NR Description: hypothetical protein XP_237331 [Rattus norvegicus]
  misc_feature (78)..(232): Homolog of NCBI NO: 18410961 NR Description: putative protein; protein id: At3g58460.1, by cDNA: 35896. [Arabidopsis thaliana] putative protein [Arabidopsis thaliana]
  misc_feature (78)..(232): Homolog of NCBI NO: 21593075 NR Description: unknown [Arabidopsis thaliana]
LVSDSERSEEKNNYEEMENFGEGRRSGGGMLPLLALSAVAEYYRLPWKPPVTASLLAANTLVYLRPAFIDPVIPHISEVWFNPHLIFKHKDLKRLFLSAFYHVNEPHLVYNMMSLLWKGIKLETSMGSSEFASMVFTLIGMSQGVTLLLAKSLLLLFDYDRAYYNEYAVGFSGVLFAMKVVLNSQAEDYSSVYGILVPTKYAAWAELILVQMFVPNASFLGHLGGILAGIIYLKLKGSYSGSDPVTMAVRGVSRLVTWPLRFLNGMVRSRRRRITGRGRVGRGQTGIAGPGIWRCQSCTYDNSGWLSACEMCGSGRARGNGWSLNQGPALSSSNDLPLDELRRRRVERFS

SEQ ID NO: 91733 - protein, 334 aa, Arabidopsis thaliana
  peptide (1)..(334): Ceres Seq. ID no. 12729057
  misc_feature (273)..(302): Pfam Name: Zn-finger in Ran binding protein and others Pfam Description: Zn-finger in Ran binding protein and others
  misc_feature (1)..(334): Homolog of NCBI NO: 9294149 NR Description: gene_id:MKP6.17~unknown protein [Arabidopsis
  misc_feature (1)..(334): Homolog of NCBI NO: 30684602 NR Description: expressed protein [Arabidopsis thaliana] unknown protein [Arabidopsis thaliana]
  misc_feature (5)..(334): Homolog of NCBI NO: 34902516 NR Description: P0581F09.16 [Oryza sativa (japonica >gi|13486724|dbj|BAB39959.1| hypothetical protein~similar to thaliana chromosome 3, MKP6.17 [Oryza sativa (japonica sativa
  misc_feature (32)..(186): Homolog of NCBI NO: 18419592 NR Description: unknown [Narcissus pseudonarcissus]
  misc_feature (8)..(216): Homolog of NCBI NO: 33300639 NR Description: hypothetical protein DKFZp547E052 [Homo sapiens]
  misc_feature (33)..(216): Homolog of NCBI NO: 16041108 NR Description: hypothetical protein [Macaca fascicularis]
  misc_feature (33)..(216): Homolog of NCBI NO: 26325686 NR Description: unnamed protein product [Mus musculus] unnamed protein product [Mus musculus]
  misc_feature (8)..(216): Homolog of NCBI NO: 34876979 NR Description: hypothetical protein XP_237331 [Rattus norvegicus]
  misc_feature (62)..(216): Homolog of NCBI NO: 18410961 NR Description: putative protein; protein id: At3g58460.1, by cDNA: 35896. [Arabidopsis thaliana] putative protein [Arabidopsis thaliana]
  misc_feature (62)..(216): Homolog of NCBI NO: 21593075 NR Description: unknown [Arabidopsis thaliana]
MENFGEGRRSGGGMLPLLALSAVAEYYRLPWKPPVTASLLAANTLVYLRPAFIDPVIPHISEVWFNPHLIFKHKDLKRLFLSAFYHVNEPHLVYNMMSLLWKGIKLETSMGSSEFASMVFTLIGMSQGVTLLLAKSLLLLFDYDRAYYNEYAVGFSGVLFAMKVVLNSQAEDYSSVYGILVPTKYAAWAELILVQMFVPNASFLGHLGGILAGIIYLKLKGSYSGSDPVTMAVRGVSRLVTWPLRFLNGMVRSRRRRITGRGRVGRGQTGIAGPGIWRCQSCTYDNSGWLSACEMCGSGRARGNGWSLNQGPALSSSNDLPLDELRRRRVERFS

SEQ ID NO: 91734 - protein, 321 aa, Arabidopsis thaliana
  peptide (1)..(321): Ceres Seq. ID no. 12729058
  misc_feature (260)..(289): Pfam Name: Zn-finger in Ran binding protein and others Pfam Description: Zn-finger in Ran binding protein and others
  misc_feature (1)..(321): Homolog of NCBI NO: 9294149 NR Description: gene_id:MKP6.17~unknown protein [Arabidopsis
  misc_feature (1)..(321): Homolog of NCBI NO: 30684602 NR Description: expressed protein [Arabidopsis thaliana] unknown protein [Arabidopsis thaliana]
  misc_feature (1)..(321): Homolog of NCBI NO: 34902516 NR Description: P0581F09.16 [Oryza sativa (japonica >gi|13486724|dbj|BAB39959.1| hypothetical protein~similar to thaliana chromosome 3, MKP6.17 [Oryza sativa (japonica sativa
  misc_feature (19)..(173): Homolog of NCBI NO: 18419592 NR Description: unknown [Narcissus pseudonarcissus]
  misc_feature (1)..(203): Homolog of NCBI NO: 33300639 NR Description: hypothetical protein DKFZp547E052 [Homo sapiens]
  misc_feature (20)..(203): Homolog of NCBI NO: 16041108 NR Description: hypothetical protein [Macaca fascicularis]
  misc_feature (20)..(203): Homolog of NCBI NO: 26325686 NR Description: unnamed protein product [Mus musculus] unnamed protein product [Mus musculus]
  misc_feature (1)..(203): Homolog of NCBI NO: 34876979 NR Description: hypothetical protein XP_237331 [Rattus norvegicus]
  misc_feature (49)..(203): Homolog of NCBI NO: 18410961 NR Description: putative protein; protein id: At3g58460.1, by cDNA: 35896. [Arabidopsis thaliana] putative protein [Arabidopsis thaliana]
  misc_feature (49)..(203): Homolog of NCBI NO: 21593075 NR Description: unknown [Arabidopsis thaliana]
MLPLLALSAVAEYYRLPWKPPVTASLLAANTLVYLRPAFIDPVIPHISEVWFNPHLIFKHKDLKRLFLSAFYHVNEPHLVYNMMSLLWKGIKLETSMGSSEFASMVFTLIGMSQGVTLLLAKSLLLLFDYDRAYYNEYAVGFSGVLFAMKVVLNSQAEDYSSVYGILVPTKYAAWAELILVQMFVPNASFLGHLGGILAGIIYLKLKGSYSGSDPVTMAVRGVSRLVTWPLRFLNGMVRSRRRRITGRGRVGRGQTGIAGPGIWRCQSCTYDNSGWLSACEMCGSGRARGNGWSLNQGPALSSSNDLPLDELRRRRVERFS

SEQ ID NO: 91735 - DNA, 2067 bp, Arabidopsis thaliana
  misc_feature (1)..(2067): Ceres Seq. ID no. 12729094
  misc_feature: MA Experiment ID: 20000180 Result: Down-regulated in Transcription
  misc_feature: MA Experiment 20000180 PARAMETER Experiment Name: At_Germinating_Seeds_P Parameter: Age (hr) Value: 24 vs. 0
  misc_feature: MA Experiment 20000180 PARAMETER Experiment Name: At_Germinating_Seeds_P Parameter: Tissue Value: Germinating Seeds
atgttcttcgtcactcgtctgcgactacgagccagagaaaatggcttcttcttctctaaatccctctctttctcatctgcctccgtattgaaatctgatgatgtcgaaggagaagatgatgcaatagaagcagaagatcgtcgacgcagtgtaaccgatagagcttactggagaagacggatacacagtatctgcgccgtacggaggaatcctgacgaagctcttcggattctagacggactctgcctccgtgggtatcgtcctgattcgcttaacctcagcagtgtgatccactctctttgtgacgccggacgatttgacgaagctcaccgtcggtttttactcttcctcgcttcaggttttatcccagacgagcgaacctgcaacgttatcatcgcaagattgttatattcgagatctccggtgagtacgttgggagttatacaccgtttgatcggtttcaagaaggagtttgtgccatcgttgacgaattacaaccgtttgatgaatcagttgtgtacgatctatagagtaatcgatgcgcataagctagtattcgatatgagaaacagagggcatctcccagatgttgtgactttcacaactttaatcggtggttactgtgagattcgagaactggaagttgctcataaagtgttcgacgaaatgcgtgtgtgtggcataaggcctaattctctcacattgagtgttcttattggtgggtttttgaaaatgagagatgttgaaacaggacggaagctgatgaaggaactatgggaatacatgaagaatgagactgatacatcaatgaaagcagcagcttttgcgaatctcgttgattctatgtgcagggaagggtatttcaatgatatttttgagattgcagagaacatgtcactatgcgagtctgtgaacgttgaatttgcttacgggcatatgatagattccttgtgtcgatacaggagaaaccatggagcagcgaggattgtttatataatgaagagtaaagggttaaaaccgagaagaacgtcatacaatgctataattcatggcttgtgcaaggatggtgggtgtatgagggcttatcagttgctagaagagggatctgaatttgagttttttccgtctgagtatacttataagctcctaatggagagtctatgcaaggaactggacacgggtaaagccaggaatgttctagagctgatgttgagaaaagaaggagcagatagaactcgaatctataatatttatctacgcggtctctgcgtgatggataacccgactgagatcctgaacgtactggtcagtatgcttcagggagactgcaggcctgatgagtatacacttaacacagttattaatggattatgcaagatgggcagggtggacgatgccatgaaagttcttgatgatatgatgacagggaagttctgtgcaccagatgctgtgactttaaatactgttatgtgtggcttgctcgctcaaggaagagcagaagaagctctggatgtgttgaatcgcgttatgccggagaacaagattaagccaggtgttgttgcatacaatgctgttatacgtgggttgttcaagctccacaagggagatgaagctatgtctgtgtttggtcagctggaaaaggcgagtgtgactgcggatagcactacatatgcaataatcattgacgggttgtgtgtgactaataaggtggatatggcgaagaagttctgggatgatgtgatatggccatcaggcagacatgatgcgtttgtgtatgcagcatttctgaaagggctttgtcagtctggttatctaagtgatgcttgccatttcctatatgacctggcagattctggagcaatccctaatgttgtgtgctataatactgtgattgctgagtgtagcagaagtgggttaaagagagaagcgtaccagattttggaggagatgaggaagaacggtcaggctcctgatgctgttacatggcggatactcgataaactacatgattctatggatctaactgtggaaagagagttaatttcaaaccctgcaacctcaggatag

SEQ ID NO: 91736 - protein, 688 aa, Arabidopsis thaliana
  peptide (1)..(688): Ceres Seq. ID no. 12729095
  misc_feature (555)..(589): Pfam Name: PPR repeat Pfam Description: PPR repeat
  misc_feature (84)..(688): Homolog of NCBI NO: 34393854 NR Description: pentatricopeptide (PPR) repeat-containing
  misc_feature (162)..(670): Homolog of NCBI NO: 25404380 NR Description: hypothetical protein F16P17.7 [imported] - thaliana >gi|8493580|gb|AAF75803.1|AC011000_6 Contains weak to leaf protein from Ipomea nil gb|D85101 and contains a RepB
  misc_feature (165)..(670): Homolog of NCBI NO: 15221549 NR Description: PPR-repeat protein; protein id: At1g62670.1
  misc_feature (68)..(670): Homolog of NCBI NO: 15221674 NR Description: unknown protein; protein id: At1g63080.1
  misc_feature (162)..(665): Homolog of NCBI NO: 15221635 NR Description: unknown protein; protein id: At1g62930.1
  misc_feature (59)..(670): Homolog of NCBI NO: 15221515 NR Description: putative membrane-associated salt-inducible (AL021637); similar to EST gb|AA728420; protein id: At1g62590.1
  misc_feature (165)..(670): Homolog of NCBI NO: 6630464 NR Description: F23N19.4 [Arabidopsis thaliana]
  misc_feature (154)..(677): Homolog of NCBI NO: 34908368 NR Description: P0529E05.10 [Oryza sativa (japonica
  misc_feature (157)..(670): Homolog of NCBI NO: 22531122 NR Description: putative membrane-associated salt-inducible
  misc_feature (166)..(654): Homolog of NCBI NO: 15218325 NR Description: hypothetical protein; protein id: At1g09900.1
MFFVTRLRLRARENGFFFSKSLSFSSASVLKSDDVEGEDDAIEAEDRRRSVTDRAYWRRRIHSICAVRRNPDEALRILDGLCLRGYRPDSLNLSSVIHSLCDAGRFDEAHRRFLLFLASGFIPDERTCNVIIARLLYSRSPVSTLGVIHRLIGFKKEFVPSLTNYNRLMNQLCTIYRVIDAHKLVFDMRNRGHLPDVVTFTTLIGGYCEIRELEVAHKVFDEMRVCGIRPNSLTLSVLIGGFLKMRDVETGRKLMKELWEYMKNETDTSMKAAAFANLVDSMCREGYFNDIFEIAENMSLCESVNVEFAYGHMIDSLCRYRRNHGAARIVYIMKSKGLKPRRTSYNAIIHGLCKDGGCMRAYQLLEEGSEFEFFPSEYTYKLLMESLCKELDTGKARNVLELMLRKEGADRTRIYNIYLRGLCVMDNPTEILNVLVSMLQGDCRPDEYTLNTVINGLCKMGRVDDAMKVLDDMMTGKFCAPDAVTLNTVMCGLLAQGRAEEALDVLNRVMPENKIKPGVVAYNAVIRGLFKLHKGDEAMSVFGQLEKASVTADSTTYAIIIDGLCVTNKVDMAKKFWDDVIWPSGRHDAFVYAAFLKGLCQSGYLSDACHFLYDLADSGAIPNVVCYNTVIAECSRSGLKREAYQILEEMRKNGQAPDAVTWRILDKLHDSMDLTVERELISNPATSG

SEQ ID NO: 91737 - protein, 520 aa, Arabidopsis thaliana
  peptide (1)..(520): Ceres Seq. ID no. 12729096
  misc_feature (387)..(421): Pfam Name: PPR repeat Pfam Description: PPR repeat
  misc_feature (1)..(520): Homolog of NCBI NO: 34393854 NR Description: pentatricopeptide (PPR) repeat-containing
  misc_feature (1)..(502): Homolog of NCBI NO: 25404380 NR Description: hypothetical protein F16P17.7 [imported] - thaliana >gi|8493580|gb|AAF75803.1|AC011000_6 Contains weak to leaf protein from Ipomea nil gb|D85101 and contains a RepB
  misc_feature (1)..(502): Homolog of NCBI NO: 15221549 NR Description: PPR-repeat protein; protein id: At1g62670.1
  misc_feature (1)..(502): Homolog of NCBI NO: 15221674 NR Description: unknown protein; protein id: At1g63080.1
  misc_feature (1)..(497): Homolog of NCBI NO: 15221635 NR Description: unknown protein; protein id: At1g62930.1
  misc_feature (1)..(502): Homolog of NCBI NO: 15221515 NR Description: putative membrane-associated salt-inducible (AL021637); similar to EST gb|AA728420; protein id: At1g62590.1
  misc_feature (1)..(502): Homolog of NCBI NO: 6630464 NR Description: F23N19.4 [Arabidopsis thaliana]
  misc_feature (1)..(509): Homolog of NCBI NO: 34908368 NR Description: P0529E05.10 [Oryza sativa (japonica
  misc_feature (1)..(502): Homolog of NCBI NO: 22531122 NR Description: putative membrane-associated salt-inducible
  misc_feature (1)..(486): Homolog of NCBI NO: 15218325 NR Description: hypothetical protein; protein id: At1g09900.1
MNQLCTIYRVIDAHKLVFDMRNRGHLPDVVTFTTLIGGYCEIRELEVAHKVFDEMRVCGIRPNSLTLSVLIGGFLKMRDVETGRKLMKELWEYMKNETDTSMKAAAFANLVDSMCREGYFNDIFEIAENMSLCESVNVEFAYGHMIDSLCRYRRNHGAARIVYIMKSKGLKPRRTSYNAIIHGLCKDGGCMRAYQLLEEGSEFEFFPSEYTYKLLMESLCKELDTGKARNVLELMLRKEGADRTRIYNIYLRGLCVMDNPTEILNVLVSMLQGDCRPDEYTLNTVINGLCKMGRVDDAMKVLDDMMTGKFCAPDAVTLNTVMCGLLAQGRAEEALDVLNRVMPENKIKPGVVAYNAVIRGLFKLHKGDEAMSVFGQLEKASVTADSTTYAIIIDGLCVTNKVDMAKKFWDDVIWPSGRHDAFVYAAFLKGLCQSGYLSDACHFLYDLADSGAIPNVVCYNTVIAECSRSGLKREAYQILEEMRKNGQAPDAVTWRILDKLHDSMDLTVERELISNPATSG

SEQ ID NO: 91738 - protein, 501 aa, Arabidopsis thaliana
  peptide (1)..(501): Ceres Seq. ID no. 12729097
  misc_feature (368)..(402): Pfam Name: PPR repeat Pfam Description: PPR repeat
  misc_feature (1)..(501): Homolog of NCBI NO: 34393854 NR Description: pentatricopeptide (PPR) repeat-containing
  misc_feature (1)..(483): Homolog of NCBI NO: 25404380 NR Description: hypothetical protein F16P17.7 [imported] - thaliana >gi|8493580|gb|AAF75803.1|AC011000_6 Contains weak to leaf protein from Ipomea nil gb|D85101 and contains a RepB
  misc_feature (1)..(483): Homolog of NCBI NO: 15221549 NR Description: PPR-repeat protein; protein id: At1g62670.1
  misc_feature (1)..(483): Homolog of NCBI NO: 15221674 NR Description: unknown protein; protein id: At1g63080.1
  misc_feature (1)..(478): Homolog of NCBI NO: 15221635 NR Description: unknown protein; protein id: At1g62930.1
  misc_feature (1)..(483): Homolog of NCBI NO: 15221515 NR Description: putative membrane-associated salt-inducible (AL021637); similar to EST gb|AA728420; protein id: At1g62590.1
  misc_feature (1)..(483): Homolog of NCBI NO: 6630464 NR Description: F23N19.4 [Arabidopsis thaliana]
  misc_feature (1)..(490): Homolog of NCBI NO: 34908368 NR Description: P0529E05.10 [Oryza sativa (japonica
  misc_feature (1)..(483): Homolog of NCBI NO: 22531122 NR Description: putative membrane-associated salt-inducible
  misc_feature (1)..(467): Homolog of NCBI NO: 15218325 NR Description: hypothetical protein; protein id: At1g09900.1
MRNRGHLPDVVTFTTLIGGYCEIRELEVAHKVFDEMRVCGIRPNSLTLSVLIGGFLKMRDVETGRKLMKELWEYMKNETDTSMKAAAFANLVDSMCREGYFNDIFEIAENMSLCESVNVEFAYGHMIDSLCRYRRNHGAARIVYIMKSKGLKPRRTSYNAIIHGLCKDGGCMRAYQLLEEGSEFEFFPSEYTYKLLMESLCKELDTGKARNVLELMLRKEGADRTRIYNIYLRGLCVMDNPTEILNVLVSMLQGDCRPDEYTLNTVINGLCKMGRVDDAMKVLDDMMTGKFCAPDAVTLNTVMCGLLAQGRAEEALDVLNRVMPENKIKPGVVAYNAVIRGLFKLHKGDEAMSVFGQLEKASVTADSTTYAIIIDGLCVTNKVDMAKKFWDDVIWPSGRHDAFVYAAFLKGLCQSGYLSDACHFLYDLADSGAIPNVVCYNTVIAECSRSGLKREAYQILEEMRKNGQAPDAVTWRILDKLHDSMDLTVERELISNPATSG

SEQ ID NO: 91739 - DNA, 1533 bp, Arabidopsis thaliana
  misc_feature (1)..(1533): Ceres Seq. ID no. 12729098
  misc_feature: MA Experiment ID: 108573 Result: Up-regulated in Transcription
  misc_feature: MA Experiment 108573 PARAMETER Experiment Name: At_Drought_cDNA_P Parameter: Timepoint (hr) Value: 6
  misc_feature: MA Experiment 108573 PARAMETER Experiment Name: At_Drought_cDNA_P Parameter: Tissue Value: Aerial
  misc_feature: MA Experiment 108573 PARAMETER Experiment Name: At_Drought_cDNA_P Parameter: Treatment Value: Drought vs. No Drought
  misc_feature: MA Experiment ID: 20000144 Result: Down-regulated in Transcription
  misc_feature: MA Experiment 20000144 PARAMETER Experiment Name: At_42deg_Heat_cDNA_P Parameter: Temperature (deg C) Value: 42 vs. 22
  misc_feature: MA Experiment 20000144 PARAMETER Experiment Name: At_42deg_Heat_cDNA_P Parameter: Timepoint (hr) Value: 1
  misc_feature: MA Experiment 20000144 PARAMETER Experiment Name: At_42deg_Heat_cDNA_P Parameter: Tissue Value: Aerial
  misc_feature: MA Experiment ID: 20000224 Result: Up-regulated in Transcription
atggatcctcataaaaaggttgcactggagactgagttctttacagaatacggtgaagctagccgataccaaatccaagaagttatagggaaaggaagttacggtgttgtggcatctgcaatcgacacacattcaggcgaaaaggttgccattaagaaaatcaatgatgtgtttgagcacgtctctgatgcaacgcggattctaagagagatcaagcttctcaggttgctccgccatcctgatatagtggagataaagcatgtaatgcttcctccttcacgccgtgagttcagagacatttatgttgttttcgagttgatggaatcagatcttcaccaagttatcaaggcgaacgatgatcttacacctgagcactaccagtttttcctctaccagcttcttcgtggtctgaagttcatacacacagctaatgtgtttcatcgtgatttgaagcctaaaaatattctagccaactctgattgcaagttgaagatttgcgactttgggcttgctcgagtgtcctttaatgatgcaccttcggctatattctggactgactatgttgctacaagatggtaccgtgcgccagaactttgtggctctttcttctccaaatatactcctgccattgatatatggagcataggatgcatatttgcagaaatgctcactgggaagccattgtttcctgggaagaatgtggtgcaccaattggatattatgactgatttgcttggtactcctcctcccgaagctattgcaaggattcgtaatgaaaaggcgaggagatatctcggcaatatgaggagaaaaccgccagttccattcactcacaaatttcctcatgtagacccattggcccttcgcttactgcaccgtcttcttgcatttgatcccaaagaccgtccctcagctgaagaggcactggcagatccttacttctatggtctggcaaacgttgatcgggaaccatctactcaaccgattccgaaactcgagtttgagtttgaaagaaggaagataacaaaagaagatgtgagagaattgatctacagagagatattagagtatcatcctcagatgctgcaagaatatcttcgaggtggagaacagactagcttcatgtacccaagtggtgttgatcgctttaagagacaatttgctcatcttgaggaaaattacggtaagggtgagaaaggctcacctcttcaacgccaacacgcttccttgcctagagagcgagtccctgctcctaagaaagagaatggatcacataatcacgatatcgagaacagatccatagcgtctttagtcacgaccctcgaaagccctccaacgtcacaacacgaggggtcagactacaggaatgggacgagccagacgggttacagcgctcgcagcttgctgaaaagtgccagcatcagtgcatctaaatgcattggcatgaaaccaagaaacaagtccgagtacggggaatcaaacaatgatacggttgatgctctgtctcaaaaggtcgcggctctccacacttga

SEQ ID NO: 91740 - protein, 510 aa, Arabidopsis thaliana; identical to SEQ ID NO: 87363
  peptide (1)..(510): Ceres Seq. ID no. 12729099
  misc_feature (23)..(314): Pfam Name: Protein kinase domain Pfam Description: Protein kinase domain
  misc_feature (1)..(510): Homolog of NCBI NO: 9294059 NR Description: MAP kinase [Arabidopsis thaliana]
  misc_feature (1)..(510): Homolog of NCBI NO: 18401750 NR Description: putative MAP kinase; protein id: At3g18040.1,
  misc_feature (1)..(510): Homolog of NCBI NO: 7106544 NR Description: ATMPK9 [Arabidopsis thaliana]
  misc_feature (1)..(509): Homolog of NCBI NO: 15220976 NR Description: mitogen-activated protein kinase, putative; id: At1g18150.1, supported by cDNA: gi_7106541 [Arabidopsis >gi|9719729|gb|AAF97831.1|AC034107_14 Strong similarity
  misc_feature (5)..(509): Homolog of NCBI NO: 25406284 NR Description: probable MAP kinase F25P22.9 [imported] -
  misc_feature (12)..(510): Homolog of NCBI NO: 5815410 NR Description: blast and wounding induced mitogen-activated
  misc_feature (12)..(510): Homolog of NCBI NO: 6689924 NR Description: MAP kinase homolog [Oryza sativa]
  misc_feature (1)..(509): Homolog of NCBI NO: 38174819 NR Description: putative MAP kinase [Hordeum vulgare subsp.
  misc_feature (1)..(509): Homolog of NCBI NO: 8671782 NR Description: T10O22.12 [Arabidopsis thaliana]
  misc_feature (1)..(450): Homolog of NCBI NO: 7106542 NR Description: ATMPK8 [Arabidopsis thaliana]

SEQ ID NO: 91741 - protein, 422 aa, Arabidopsis thaliana; identical to SEQ ID NO: 87364
  peptide (1)..(422): Ceres Seq. ID no. 12729100
  misc_feature (1)..(226): Pfam Name: Protein kinase domain Pfam Description: Protein kinase domain
  misc_feature (1)..(422): Homolog of NCBI NO: 9294059 NR Description: MAP kinase [Arabidopsis thaliana]
  misc_feature (1)..(422): Homolog of NCBI NO: 18401750 NR Description: putative MAP kinase; protein id: At3g18040.1,
  misc_feature (1)..(422): Homolog of NCBI NO: 7106544 NR Description: ATMPK9 [Arabidopsis thaliana]
  misc_feature (1)..(421): Homolog of NCBI NO: 15220976 NR Description: mitogen-activated protein kinase, putative; id: At1g18150.1, supported by cDNA: gi_7106541 [Arabidopsis >gi|9719729|gb|AAF97831.1|AC034107_14 Strong similarity
  misc_feature (1)..(421): Homolog of NCBI NO: 25406284 NR Description: probable MAP kinase F25P22.9 [imported] -
  misc_feature (1)..(422): Homolog of NCBI NO: 5815410 NR Description: blast and wounding induced mitogen-activated
  misc_feature (1)..(422): Homolog of NCBI NO: 6689924 NR Description: MAP kinase homolog [Oryza sativa]
  misc_feature (1)..(421): Homolog of NCBI NO: 38174819 NR Description: putative MAP kinase [Hordeum vulgare subsp.
  misc_feature (1)..(421): Homolog of NCBI NO: 8671782 NR Description: T10O22.12 [Arabidopsis thaliana]
  misc_feature (1)..(362): Homolog of NCBI NO: 7106542 NR Description: ATMPK8 [Arabidopsis thaliana]

SEQ ID NO: 91742 - protein, 404 aa, Arabidopsis thaliana
  peptide (1)..(404): Ceres Seq. ID no. 12729101
  misc_feature (1)..(208): Pfam Name: Protein kinase domain Pfam Description: Protein kinase domain
  misc_feature (1)..(404): Homolog of NCBI NO: 9294059 NR Description: MAP kinase [Arabidopsis thaliana]
  misc_feature (1)..(404): Homolog of NCBI NO: 18401750 NR Description: putative MAP kinase; protein id: At3g18040.1,
  misc_feature (1)..(404): Homolog of NCBI NO: 7106544 NR Description: ATMPK9 [Arabidopsis thaliana]
  misc_feature (1)..(403): Homolog of NCBI NO: 15220976 NR Description: mitogen-activated protein kinase, putative; id: At1g18150.1, supported by cDNA: gi_7106541 [Arabidopsis >gi|9719729|gb|AAF97831.1|AC034107_14 Strong similarity
  misc_feature (1)..(403): Homolog of NCBI NO: 25406284 NR Description: probable MAP kinase F25P22.9 [imported] -
  misc_feature (1)..(404): Homolog of NCBI NO: 5815410 NR Description: blast and wounding induced mitogen-activated
  misc_feature (1)..(404): Homolog of NCBI NO: 6689924 NR Description: MAP kinase homolog [Oryza sativa]
  misc_feature (1)..(403): Homolog of NCBI NO: 38174819 NR Description: putative MAP kinase [Hordeum vulgare subsp.
  misc_feature (1)..(403): Homolog of NCBI NO: 8671782 NR Description: T10O22.12 [Arabidopsis thaliana]
  misc_feature (1)..(344): Homolog of NCBI NO: 7106542 NR Description: ATMPK8 [Arabidopsis thaliana]
MESDLHQVIKANDDLTPEHYQFFLYQLLRGLKFIHTANVFHRDLKPKNILANSDCKLKICDFGLARVSFNDAPSAIFWTDYVATRWYRAPELCGSFFSKYTPAIDIWSIGCIFAEMLTGKPLFPGKNVVHQLDIMTDLLGTPPPEAIARIRNEKARRYLGNMRRKPPVPFTHKFPHVDPLALRLLHRLLAFDPKDRPSAEEALADPYFYGLANVDREPSTQPIPKLEFEFERRKITKEDVRELIYREILEYHPQMLQEYLRGGEQTSFMYPSGVDRFKRQFAHLEENYGKGEKGSPLQRQHASLPRERVPAPKKENGSHNHDIENRSIASLVTTLESPPTSQHEGSDYRNGTSQTGYSARSLLKSASISASKCIGMKPRNKSEYGESNNDTVDALSQKVAALHT

SEQ ID NO: 91743 - DNA, 1506 bp, Arabidopsis thaliana
  misc_feature (1)..(1506): Ceres Seq. ID no. 12729102
  misc_feature: MA Experiment ID: 20000235 Result: Up-regulated in Transcription
  misc_feature: MA Experiment 20000235 PARAMETER Experiment Name: At_Siliques_P Parameter: Age (day) Value: 21
  misc_feature: MA Experiment 20000235 PARAMETER Experiment Name: At_Siliques_P Parameter: Organism Value: A. thaliana
  misc_feature: MA Experiment 20000235 PARAMETER Experiment Name: At_Siliques_P Parameter: Plant Line Value: WS
  misc_feature: MA Experiment 20000235 PARAMETER Experiment Name: At_Siliques_P Parameter: Tissue Value: 5-10mm Siliques vs. Whole Plant
  misc_feature: MA Experiment ID: 20000496 Result: Up-regulated in Transcription
  misc_feature: MA Experiment 20000496 PARAMETER Experiment Name: At_Guard_Cells_P Parameter: Harvest Date Value: 7/19/2002
  misc_feature: MA Experiment 20000496 PARAMETER Experiment Name: At_Guard_Cells_P Parameter: Organism Value: Canola
  misc_feature: MA Experiment 20000496 PARAMETER Experiment Name: At_Guard_Cells_P Parameter: Tissue Value: Guard Cells vs. Leaves
  misc_feature: MA Experiment ID: 20001451 Result: Down-regulated in Transcription
  misc_feature: MA Experiment 20001451 PARAMETER Experiment Name: At_Far-red-induction_P Parameter: Age (day) Value: 7
  misc_feature: MA Experiment 20001451 PARAMETER Experiment Name: At_Far-red-induction_P Parameter: Light Value: Far-red vs. White
  misc_feature: MA Experiment 20001451 PARAMETER Experiment Name: At_Far-red-induction_P Parameter: Organism Value: A. thaliana
  misc_feature: MA Experiment 20001451 PARAMETER Experiment Name: At_Far-red-induction_P Parameter: Plant Line Value: Columbia
  misc_feature: MA Experiment 20001451 PARAMETER Experiment Name: At_Far-red-induction_P Parameter: Timepoint (hr) Value: 24
  misc_feature: MA Experiment 20001451 PARAMETER Experiment Name: At_Far-red-induction_P Parameter: Tissue Value: Whole Plant
  misc_feature: MA Experiment ID: 20001558 Result: Down-regulated in Transcription
  misc_feature: MA Experiment 20001558 PARAMETER Experiment Name: At_Drought_Soil_Dry_P Parameter: Age (day) Value: 27
  misc_feature: MA Experiment 20001558 PARAMETER Experiment Name: At_Drought_Soil_Dry_P Parameter: Organism Value: A. thaliana
  misc_feature: MA Experiment 20001558 PARAMETER Experiment Name: At_Drought_Soil_Dry_P Parameter: Plant Line Value: WS
  misc_feature: MA Experiment 20001558 PARAMETER Experiment Name: At_Drought_Soil_Dry_P Parameter: Post Timepoint (hr) Value: 6
  misc_feature: MA Experiment 20001558 PARAMETER Experiment Name: At_Drought_Soil_Dry_P Parameter: Post-Treatment Value: Re-Water vs. No Drought
  misc_feature: MA Experiment 20001558 PARAMETER Experiment Name: At_Drought_Soil_Dry_P Parameter: Timepoint (day) Value: 13
  misc_feature: MA Experiment 20001558 PARAMETER Experiment Name: At_Drought_Soil_Dry_P Parameter: Treatment Value: Drought vs. No Drought
atgtttctttttctcctcctcctctctgcttcccgctccggcgaagagtcgccgtccggagacgccgtcccattggccaccggcggtcttaacagaaagagttttccggaaggattcttgttcggaaccgccacgtcagcttaccaggtcgaaggcgagacccaccaagatggtcgtggtccaagcatttgggatgcattcgtcaagattcctggtaagattgccaacaatgccactgctgagataacagtggaccaatatcatcgttacaaggaagatgtagatttgatgcagaacctgaacattgatgcctacagattttccatttcatggtctagaatattccctgagggatccggtaaaatcaactcgaatggagttgcttattacaatagattgatcgattacttgatcgaaaaagggattacaccgtatgctaatctgtaccactatgaccttcctttagccttggaacaaaagtatcaaggcctgcttagtaaacaaggaagattttgcggattacgcagagttttgtttcaaacatttggagatagagtgaagaactggatgacgtttaacgagcctcgtgtagtagctgctctaggttatgataacggcatttttgcgccgggtagatgctctgaagcatttggaaactgcactgatggaaactctgcaactgaaccatacattgttgcacatcaccttatcttggcacatgcagcagccgtccagagataccgccaaaattatcaggagaaacaaaagggaagggttgggattctactggattttgtttggtttgagccacttacgagtagtcaagcagacaatgacgctgctcaaagagcaagagacttccatgttggatggtttattcacccaatagtgtatggagagtacccaaatacgttgcaaaacatcgtgaaggagagacttccgaagttcaccgaggaagaagtgaaaatggtgaaaggttccatagacttcgtggggataaaccaatacacaacttatttcatgtctgatcctaaaatatctaccacacctaaagatttgggttatcaacaagattggaacgtcacttttaactttgcaaagaatgggacaccaattggtccaagggcacattcagaatggttatacaatgtcccatggggaatgtacaaagctttaatgtacattgaggaacgttatggcaacccaactatgattctctccgaaaacggtatggatgatccgggcaacataactctaactcaaggactaaatgatacaacaagagtcaagtattatagagactatttagtgcagcttaaaaaagcagtagacgatggagccaatctaactggatattttgcgtggtcgttgctagataatttcgaatggttatcaggatatacttcaaggtttggaatagtgtacgttgattacaaggacttgaagagataccccaagatgtctgctttatggtttaaacaacttttgaaacgggaccagaaatga

SEQ ID NO: 91744 - protein, 501 aa, Arabidopsis thaliana
  peptide (1)..(501): Ceres Seq. ID no. 12729103
  misc_feature (31)..(501): Pfam Name: Glycosyl hydrolase family 1 Pfam Description: Glycosyl hydrolase family 1
  misc_feature (1)..(501): Homolog of NCBI NO: 22331147 NR Description: glycosyl hydrolase family 1; protein id:
  misc_feature (1)..(501): Homolog of NCBI NO: 9294062 NR Description: beta-glucosidase [Arabidopsis thaliana]
  misc_feature (3)..(501): Homolog of NCBI NO: 15229584 NR Description: glycosyl hydrolase family 1; protein id: supported by cDNA: 11984. [Arabidopsis thaliana]
  misc_feature (3)..(500): Homolog of NCBI NO: 17226270 NR Description: beta-mannosidase enzyme [Lycopersicon esculentum]
  misc_feature (27)..(501): Homolog of NCBI NO: 1362162 NR Description: beta-glucosidase BGQ60 precursor - barley
  misc_feature (28)..(501): Homolog of NCBI NO: 34899014 NR Description: putative non-cyanogenic beta-glucosidase
  misc_feature (1)..(497): Homolog of NCBI NO: 18875458 NR Description: beta-glucosidase [Oryza sativa]
  misc_feature (28)..(497): Homolog of NCBI NO: 22658440 NR Description: beta-glucosidase [Oryza sativa (japonica
  misc_feature (30)..(501): Homolog of NCBI NO: 38344467 NR Description: OSJNBa0022H21.2 [Oryza sativa (japonica
  misc_feature (35)..(499): Homolog of NCBI NO: 30696622 NR Description: glycosyl hydrolase family 1 [Arabidopsis thaliana]
MFLFLLLLSASRSGEESPSGDAVPLATGGLNRKSFPEGFLFGTATSAYQVEGETHQDGRGPSIWDAFVKIPGKIANNATAEITVDQYHRYKEDVDLMQNLNIDAYRFSISWSRIFPEGSGKINSNGVAYYNRLIDYLIEKGITPYANLYHYDLPLALEQKYQGLLSKQGRFCGLRRVLFQTFGDRVKNWMTFNEPRVVAALGYDNGIFAPGRCSEAFGNCTDGNSATEPYIVAHHLILAHAAAVQRYRQNYQEKQKGRVGILLDFVWFEPLTSSQADNDAAQRARDFHVGWFIHPIVYGEYPNTLQNIVKERLPKFTEEEVKMVKGSIDFVGINQYTTYFMSDPKISTTPKDLGYQQDWNVTFNFAKNGTPIGPRAHSEWLYNVPWGMYKALMYIEERYGNPTMILSENGMDDPGNITLTQGLNDTTRVKYYRDYLVQLKKAVDDGANLTGYFAWSLLDNFEWLSGYTSRFGIVYVDYKDLKRYPKMSALWFKQLLKRDQK

SEQ ID NO: 91745 - protein, 405 aa, Arabidopsis thaliana
  peptide (1)..(405): Ceres Seq. ID no. 12729104
  misc_feature (1)..(405): Pfam Name: Glycosyl hydrolase family 1 Pfam Description: Glycosyl hydrolase family 1
  misc_feature (1)..(405): Homolog of NCBI NO: 22331147 NR Description: glycosyl hydrolase family 1; protein id:
  misc_feature (1)..(405): Homolog of NCBI NO: 9294062 NR Description: beta-glucosidase [Arabidopsis thaliana]
  misc_feature (1)..(405): Homolog of NCBI NO: 15229584 NR Description: glycosyl hydrolase family 1; protein id: supported by cDNA: 11984. [Arabidopsis thaliana]
  misc_feature (1)..(404): Homolog of NCBI NO: 17226270 NR Description: beta-mannosidase enzyme [Lycopersicon esculentum]
  misc_feature (1)..(405): Homolog of NCBI NO: 1362162 NR Description: beta-glucosidase BGQ60 precursor - barley
  misc_feature (1)..(405): Homolog of NCBI NO: 34899014 NR Description: putative non-cyanogenic beta-glucosidase
  misc_feature (1)..(401): Homolog of NCBI NO: 18875458 NR Description: beta-glucosidase [Oryza sativa]
  misc_feature (1)..(401): Homolog of NCBI NO: 22658440 NR Description: beta-glucosidase [Oryza sativa (japonica
  misc_feature (1)..(405): Homolog of NCBI NO: 38344467 NR Description: OSJNBa0022H21.2 [Oryza sativa (japonica
  misc_feature (1)..(403): Homolog of NCBI NO: 30696622 NR Description: glycosyl hydrolase family 1 [Arabidopsis thaliana]
MQNLNIDAYRFSISWSRIFPEGSGKINSNGVAYYNRLIDYLIEKGITPYANLYHYDLPLALEQKYQGLLSKQGRFCGLRRVLFQTFGDRVKNWMTFNEPRVVAALGYDNGIFAPGRCSEAFGNCTDGNSATEPYIVAHHLILAHAAAVQRYRQNYQEKQKGRVGILLDFVWFEPLTSSQADNDAAQRARDFHVGWFIHPIVYGEYPNTLQNIVKERLPKFTEEEVKMVKGSIDFVGINQYTTYFMSDPKISTTPKDLGYQQDWNVTFNFAKNGTPIGPRAHSEWLYNVPWGMYKALMYIEERYGNPTMILSENGMDDPGNITLTQGLNDTTRVKYYRDYLVQLKKAVDDGANLTGYFAWSLLDNFEWLSGYTSRFGIVYVDYKDLKRYPKMSALWFKQLLKRDQK

SEQ ID NO: 91746 - protein, 312 aa, Arabidopsis thaliana
  peptide (1)..(312): Ceres Seq. ID no. 12729105
  misc_feature (1)..(312): Pfam Name: Glycosyl hydrolase family 1 Pfam Description: Glycosyl hydrolase family 1
  misc_feature (1)..(312): Homolog of NCBI NO: 22331147 NR Description: glycosyl hydrolase family 1; protein id:
  misc_feature (1)..(312): Homolog of NCBI NO: 9294062 NR Description: beta-glucosidase [Arabidopsis thaliana]
  misc_feature (1)..(312): Homolog of NCBI NO: 15229584 NR Description: glycosyl hydrolase family 1; protein id: supported by cDNA: 11984. [Arabidopsis thaliana]
  misc_feature (1)..(311): Homolog of NCBI NO: 17226270 NR Description: beta-mannosidase enzyme [Lycopersicon esculentum]
  misc_feature (1)..(312): Homolog of NCBI NO: 1362162 NR Description: beta-glucosidase BGQ60 precursor - barley
  misc_feature (1)..(312): Homolog of NCBI NO: 34899014 NR Description: putative non-cyanogenic beta-glucosidase
  misc_feature (1)..(308): Homolog of NCBI NO: 18875458 NR Description: beta-glucosidase [Oryza sativa]
  misc_feature (1)..(308): Homolog of NCBI NO: 22658440 NR Description: beta-glucosidase [Oryza sativa (japonica
  misc_feature (1)..(312): Homolog of NCBI NO: 38344467 NR Description: OSJNBa0022H21.2 [Oryza sativa (japonica
  misc_feature (1)..(310): Homolog of NCBI NO: 30696622 NR Description: glycosyl hydrolase family 1 [Arabidopsis thaliana]
MTFNEPRVVAALGYDNGIFAPGRCSEAFGNCTDGNSATEPYIVAHHLILAHAAAVQRYRQNYQEKQKGRVGILLDFVWFEPLTSSQADNDAAQRARDFHVGWFIHPIVYGEYPNTLQNIVKERLPKFTEEEVKMVKGSIDFVGINQYTTYFMSDPKISTTPKDLGYQQDWNVTFNFAKNGTPIGPRAHSEWLYNVPWGMYKALMYIEERYGNPTMILSENGMDDPGNITLTQGLNDTTRVKYYRDYLVQLKKAVDDGANLTGYFAWSLLDNFEWLSGYTSRFGIVYVDYKDLKRYPKMSALWFKQLLKRDQK

SEQ ID NO: 91747 - DNA, 1311 bp, Arabidopsis thaliana
  misc_feature (1)..(1311): Ceres Seq. ID no. 12729130
  misc_feature: MA Experiment ID: 108573 Result: Up-regulated in Transcription
  misc_feature: MA Experiment 108573 PARAMETER Experiment Name: At_Drought_cDNA_P Parameter: Timepoint (hr) Value: 6
  misc_feature: MA Experiment 108573 PARAMETER Experiment Name: At_Drought_cDNA_P Parameter: Tissue Value: Aerial
  misc_feature: MA Experiment 108573 PARAMETER Experiment Name: At_Drought_cDNA_P Parameter: Treatment Value: Drought vs. No Drought
  misc_feature: MA Experiment ID: 20000224 Result: Up-regulated in Transcription
atgccatcgccaccgacgacgacttctctctcggtgacacagaccataaacggatcacacagcttcacaatcaaaggctattctttggctaaaggaatcgggatcggaaaacacatcgccagcgatactttcaccgtcgggggttatcaatgggctatctatttctatcctgatggcaagaatcctgaggataattcggcttatgtctccgttttcattgctttagctagcgatggtaccgatgttagggctctttttgagctttctttgcttgatcagagtggtaaagggaagcataaggttcatagccacttcgatcgtgctcttgagagcggtccttatactctcaagtatcgtggcagcatgtggggctacaagcgcttttttcgaagacttatgctggaaacatctgattttctgaaggatgattgtctgaaaattaattgcaccgtgggagttgtggtctcagaaatagattgcccacggttacattctattcatgtccctgcatctgatattggatctcatttcgggatgcttctagagaacgaggacggttcagatataacttttaacgtctctggtgaaaagttccgtgctcacaggttagtattggctgctcgatctcctgtctttgaaagcgagttcctcgatgttacgggagaagaagatcgtgatatcgaagttactgacatggagcctaaggttttcaaggctttgctccactacatatacaaggatgctctcattgaagatgcagagtcatcatcatcttccggttcatctgttggtccatctgcctcagacacattagctgcaaagctactaggagccgctgataaatacaagttgcctagattaagtctaatgtgcgagtcagtgctctgcaaggatatatcagtagattccgttgcaaatattttggcgcttgctgaccgttacaatgcttccgccttgaaatccgtttgtctgaaattcgcagcagaaaatctcatcgctgttatgaggtcagatgggtttgattatctaagggaacactgcccgtcacttcagtctgagcttctgaaaacagttgcgggttgcgaagaggagttaagcggaggaggagggaagacgagaagcgtatggggccaattctcagacggtggagctgagacaaacggaagacaagcacagacttggggagatatcaatggaggagcagagagaagccagagtgtttgggtcgaagttgtgaacgctaatggaagcggtagaaacaataatgacaacaataacagtgatgacccaatggcagaactagaagattga

SEQ ID NO: 91748 - protein, 436 aa, Arabidopsis thaliana; identical to SEQ ID NO: 38880
  peptide (1)..(436): Ceres Seq. ID no. 12729131
  misc_feature (177)..(299): Pfam Name: BTB/POZ domain Pfam Description: BTB/POZ domain
  misc_feature (1)..(436): Homolog of NCBI NO: 21536509 NR Description: unknown [Arabidopsis thaliana]
  misc_feature (1)..(436): Homolog of NCBI NO: 30678912 NR Description: expressed protein [Arabidopsis thaliana] unknown protein [Arabidopsis thaliana] AT3g03740/F20H23_23 [Arabidopsis thaliana]
  misc_feature (1)..(392): Homolog of NCBI NO: 34900034 NR Description: OJ1641_C04.24 [Oryza sativa (japonica >gi|22202734|dbj|BAC07391.1| putative zinc finger POZ domain
  misc_feature (1)..(392): Homolog of NCBI NO: 28269444 NR Description: unknown protein [Oryza sativa (japonica
  misc_feature (7)..(392): Homolog of NCBI NO: 15242126 NR Description: hypothetical protein (fragment); protein id: supported by cDNA: 113260., supported by cDNA: gi_14596182
  misc_feature (7)..(392): Homolog of NCBI NO: 21536843 NR Description: unknown [Arabidopsis thaliana]
  misc_feature (7)..(392): Homolog of NCBI NO: 11282376 NR Description: hypothetical protein F23N14.80 - Arabidopsis >gi|7362795|emb|CAB83071.1| putative protein [Arabidopsis
  misc_feature (7)..(392): Homolog of NCBI NO: 30691638 NR Description: expressed protein [Arabidopsis thaliana]
  misc_feature (7)..(384): Homolog of NCBI NO: 14596183 NR Description: Unknown protein [Arabidopsis thaliana]
  misc_feature (3)..(392): Homolog of NCBI NO: 23617108 NR Description: contains ESTs to Arabidopsis thaliana chromosome 5, At5g19000~unknown protein

SEQ ID NO: 91749 - protein, 315 aa, Arabidopsis thaliana; identical to SEQ ID NO: 38881
  peptide (1)..(315): Ceres Seq. ID no. 12729132
  misc_feature (56)..(178): Pfam Name: BTB/POZ domain Pfam Description: BTB/POZ domain
  misc_feature (1)..(315): Homolog of NCBI NO: 21536509 NR Description: unknown [Arabidopsis thaliana]
  misc_feature (1)..(315): Homolog of NCBI NO: 30678912 NR Description: expressed protein [Arabidopsis thaliana] unknown protein [Arabidopsis thaliana] AT3g03740/F20H23_23 [Arabidopsis thaliana]
  misc_feature (1)..(271): Homolog of NCBI NO: 34900034 NR Description: OJ1641_C04.24 [Oryza sativa (japonica >gi|22202734|dbj|BAC07391.1| putative zinc finger POZ domain
  misc_feature (1)..(271): Homolog of NCBI NO: 28269444 NR Description: unknown protein [Oryza sativa (japonica
  misc_feature (1)..(271): Homolog of NCBI NO: 15242126 NR Description: hypothetical protein (fragment); protein id: supported by cDNA: 113260., supported by cDNA: gi_14596182
  misc_feature (1)..(271): Homolog of NCBI NO: 21536843 NR Description: unknown [Arabidopsis thaliana]
  misc_feature (1)..(271): Homolog of NCBI NO: 11282376 NR Description: hypothetical protein F23N14.80 - Arabidopsis >gi|7362795|emb|CAB83071.1| putative protein [Arabidopsis
  misc_feature (1)..(271): Homolog of NCBI NO: 30691638 NR Description: expressed protein [Arabidopsis thaliana]
  misc_feature (1)..(263): Homolog of NCBI NO: 14596183 NR Description: Unknown protein [Arabidopsis thaliana]
  misc_feature (1)..(271): Homolog of NCBI NO: 23617108 NR Description: contains ESTs to Arabidopsis thaliana chromosome 5, At5g19000~unknown protein

SEQ ID NO: 91750 - protein, 304 aa, Arabidopsis thaliana
  peptide (1)..(304): Ceres Seq. ID no. 12729133
  misc_feature (45)..(167): Pfam Name: BTB/POZ domain Pfam Description: BTB/POZ domain
  misc_feature (1)..(304): Homolog of NCBI NO: 21536509 NR Description: unknown [Arabidopsis thaliana]
  misc_feature (1)..(304): Homolog of NCBI NO: 30678912 NR Description: expressed protein [Arabidopsis thaliana] unknown protein [Arabidopsis thaliana] AT3g03740/F20H23_23 [Arabidopsis thaliana]
  misc_feature (1)..(260): Homolog of NCBI NO: 34900034 NR Description: OJ1641_C04.24 [Oryza sativa (japonica >gi|22202734|dbj|BAC07391.1| putative zinc finger POZ domain
  misc_feature (1)..(260): Homolog of NCBI NO: 28269444 NR Description: unknown protein [Oryza sativa (japonica
  misc_feature (1)..(260): Homolog of NCBI NO: 15242126 NR Description: hypothetical protein (fragment); protein id: supported by cDNA: 113260., supported by cDNA: gi_14596182
  misc_feature (1)..(260): Homolog of NCBI NO: 21536843 NR Description: unknown [Arabidopsis thaliana]
  misc_feature (1)..(260): Homolog of NCBI NO: 11282376 NR Description: hypothetical protein F23N14.80 - Arabidopsis >gi|7362795|emb|CAB83071.1| putative protein [Arabidopsis
  misc_feature (1)..(260): Homolog of NCBI NO: 30691638 NR Description: expressed protein [Arabidopsis thaliana]
  misc_feature (1)..(252): Homolog of NCBI NO: 14596183 NR Description: Unknown protein [Arabidopsis thaliana]
  misc_feature (1)..(260): Homolog of NCBI NO: 23617108 NR Description: contains ESTs to Arabidopsis thaliana chromosome 5, At5g19000~unknown protein
MLETSDFLKDDCLKINCTVGVVVSEIDCPRLHSIHVPASDIGSHFGMLLENEDGSDITFNVSGEKFRAHRLVLAARSPVFESEFLDVTGEEDRDIEVTDMEPKVFKALLHYIYKDALIEDAESSSSSGSSVGPSASDTLAAKLLGAADKYKLPRLSLMCESVLCKDISVDSVANILALADRYNASALKSVCLKFAAENLIAVMRSDGFDYLREHCPSLQSELLKTVAGCEEELSGGGGKTRSVWGQFSDGGAETNGRQAQTWGDINGGAERSQSVWVEVVNANGSGRNNNDNNNSDDPMAELED

SEQ ID NO: 91751 - DNA, 627 bp, Arabidopsis thaliana
  misc_feature (1)..(627): Ceres Seq. ID no. 12729164
  misc_feature: MA Experiment ID: 20000173 Result: Up-regulated in Transcription
  misc_feature: MA Experiment 20000173 PARAMETER Experiment Name: At_42deg_Heat_P Parameter: Age (day) Value: 14
  misc_feature: MA Experiment 20000173 PARAMETER Experiment Name: At_42deg_Heat_P Parameter: Organism Value: A. thaliana
  misc_feature: MA Experiment 20000173 PARAMETER Experiment Name: At_42deg_Heat_P Parameter: Plant Line Value: WS
  misc_feature: MA Experiment 20000173 PARAMETER Experiment Name: At_42deg_Heat_P Parameter: Temperature (deg C) Value: 42 vs. 22
  misc_feature: MA Experiment 20000173 PARAMETER Experiment Name: At_42deg_Heat_P Parameter: Timepoint (hr) Value: 6
  misc_feature: MA Experiment 20000173 PARAMETER Experiment Name: At_42deg_Heat_P Parameter: Tissue Value: Aerial
  misc_feature: MA Experiment ID: 20000234 Result: Up-regulated in Transcription
  misc_feature: MA Experiment 20000234 PARAMETER Experiment Name: At_Siliques_P Parameter: Age (day) Value: 21
  misc_feature: MA Experiment 20000234 PARAMETER Experiment Name: At_Siliques_P Parameter: Organism Value: A. thaliana
  misc_feature: MA Experiment 20000234 PARAMETER Experiment Name: At_Siliques_P Parameter: Plant Line Value: WS
  misc_feature: MA Experiment 20000234 PARAMETER Experiment Name: At_Siliques_P Parameter: Tissue Value: Less Than 5mm Siliques vs. Whole Plant
  misc_feature: MA Experiment ID: 20000265 Result: Up-regulated in Transcription
  misc_feature: MA Experiment 20000265 PARAMETER Experiment Name: At_Open_Flower_P Parameter: Age (day) Value: 21
  misc_feature: MA Experiment 20000265 PARAMETER Experiment Name: At_Open_Flower_P Parameter: Plant Line Value: WS
  misc_feature: MA Experiment 20000265 PARAMETER Experiment Name: At_Open_Flower_P Parameter: Tissue Value: Closed Flower vs. Whole Plant
  misc_feature: MA Experiment ID: 20000436 Result: Up-regulated in Transcription
  misc_feature: MA Experiment 20000436 PARAMETER Experiment Name: At_Drought_P Parameter: Age (day) Value: 7
  misc_feature: MA Experiment 20000436 PARAMETER Experiment Name: At_Drought_P Parameter: Organism Value: A. thaliana
  misc_feature: MA Experiment 20000436 PARAMETER Experiment Name: At_Drought_P Parameter: Plant Line Value: WS
  misc_feature: MA Experiment 20000436 PARAMETER Experiment Name: At_Drought_P Parameter: Timepoint (hr) Value: 12
  misc_feature: MA Experiment 20000436 PARAMETER Experiment Name: At_Drought_P Parameter: Tissue Value: Whole Plant
  misc_feature: MA Experiment 20000436 PARAMETER Experiment Name: At_Drought_P Parameter: Treatment Value: Drought vs. No Drought
  misc_feature: MA Experiment ID: 20000437 Result: Up-regulated in Transcription
  misc_feature: MA Experiment 20000437 PARAMETER Experiment Name: At_Drought_P Parameter: Age (day) Value: 8
  misc_feature: MA Experiment 20000437 PARAMETER Experiment Name: At_Drought_P Parameter: Organism Value: A. thaliana
  misc_feature: MA Experiment 20000437 PARAMETER Experiment Name: At_Drought_P Parameter: Plant Line Value: WS
  misc_feature: MA Experiment 20000437 PARAMETER Experiment Name: At_Drought_P Parameter: Timepoint (hr) Value: 24
  misc_feature: MA Experiment 20000437 PARAMETER Experiment Name: At_Drought_P Parameter: Tissue Value: Whole Plant
  misc_feature: MA Experiment 20000437 PARAMETER Experiment Name: At_Drought_P Parameter: Treatment Value: Drought vs. No Drought
  misc_feature: MA Experiment ID: 20001457 Result: Up-regulated in Transcription
  misc_feature: MA Experiment 20001457 PARAMETER Experiment Name: At_50mM_NH4NO3_L-to-H_P Parameter: Age (day) Value: Undefined
  misc_feature: MA Experiment 20001457 PARAMETER Experiment Name: At_50mM_NH4NO3_L-to-H_P Parameter: Organism Value: Undefined
  misc_feature: MA Experiment 20001457 PARAMETER Experiment Name: At_50mM_NH4NO3_L-to-H_P Parameter: Plant Line Value: Undefined
  misc_feature: MA Experiment 20001457 PARAMETER Experiment Name: At_50mM_NH4NO3_L-to-H_P Parameter: Timepoint (hr) Value: 0.5
  misc_feature: MA Experiment 20001457 PARAMETER Experiment Name: At_50mM_NH4NO3_L-to-H_P Parameter: Tissue Value: Siliques
  misc_feature: MA Experiment 20001457 PARAMETER Experiment Name: At_50mM_NH4NO3_L-to-H_P Parameter: Treatment Value: 50mM NH4NO3 vs. 100mM Manitol
  misc_feature: MA Experiment ID: 20001555 Result: Up-regulated in Transcription
  misc_feature: MA Experiment 20001555 PARAMETER Experiment Name: At_Drought_Soil_Dry_P Parameter: Age (day) Value: 24
  misc_feature: MA Experiment 20001555 PARAMETER Experiment Name: At_Drought_Soil_Dry_P Parameter: Organism Value: A. thaliana
  misc_feature: MA Experiment 20001555 PARAMETER Experiment Name: At_Drought_Soil_Dry_P Parameter: Plant Line Value: WS
  misc_feature: MA Experiment 20001555 PARAMETER Experiment Name: At_Drought_Soil_Dry_P Parameter: Post Timepoint (hr) Value: None
  misc_feature: MA Experiment 20001555 PARAMETER Experiment Name: At_Drought_Soil_Dry_P Parameter: Post-Treatment Value: None
  misc_feature: MA Experiment 20001555 PARAMETER Experiment Name: At_Drought_Soil_Dry_P Parameter: Timepoint (day) Value: 10
  misc_feature: MA Experiment 20001555 PARAMETER Experiment Name: At_Drought_Soil_Dry_P Parameter: Treatment Value: Drought vs. No Drought
  misc_feature: MA Experiment ID: 20001556 Result: Up-regulated in Transcription
  misc_feature: MA Experiment 20001556 PARAMETER Experiment Name: At_Drought_Soil_Dry_P Parameter: Age (day) Value: 26
  misc_feature: MA Experiment 20001556 PARAMETER Experiment Name: At_Drought_Soil_Dry_P Parameter: Organism Value: A. thaliana
  misc_feature: MA Experiment 20001556 PARAMETER Experiment Name: At_Drought_Soil_Dry_P Parameter: Plant Line Value: WS
  misc_feature: MA Experiment 20001556 PARAMETER Experiment Name: At_Drought_Soil_Dry_P Parameter: Post Timepoint (hr) Value: None
  misc_feature: MA Experiment 20001556 PARAMETER Experiment Name: At_Drought_Soil_Dry_P Parameter: Post-Treatment Value: None
  misc_feature: MA Experiment 20001556 PARAMETER Experiment Name: At_Drought_Soil_Dry_P Parameter: Timepoint (day) Value: 12
  misc_feature: MA Experiment 20001556 PARAMETER Experiment Name: At_Drought_Soil_Dry_P Parameter: Treatment Value: Drought vs. No Drought
  misc_feature: MA Experiment ID: 20001904 Result: Up-regulated in Transcription
  misc_feature: MA Experiment 20001904 PARAMETER Experiment Name: At_Drought_Reproduction_P Parameter: Age (day) Value: 37
  misc_feature: MA Experiment 20001904 PARAMETER Experiment Name: At_Drought_Reproduction_P Parameter: Organism Value: A. thaliana
  misc_feature: MA Experiment 20001904 PARAMETER Experiment Name: At_Drought_Reproduction_P Parameter: Plant Line Value: WS
  misc_feature: MA Experiment 20001904 PARAMETER Experiment Name: At_Drought_Reproduction_P Parameter: Timepoint (day) Value: 7
  misc_feature: MA Experiment 20001904 PARAMETER Experiment Name: At_Drought_Reproduction_P Parameter: Tissue Value: Rosettes
  misc_feature: MA Experiment 20001904 PARAMETER Experiment Name: At_Drought_Reproduction_P Parameter: Treatment Value: Drought vs. No Drought
  misc_feature: MA Experiment ID: 20001905 Result: Up-regulated in Transcription
  misc_feature: MA Experiment 20001905 PARAMETER Experiment Name: At_Drought_Reproduction_P Parameter: Age (day) Value: 40
  misc_feature: MA Experiment 20001905 PARAMETER Experiment Name: At_Drought_Reproduction_P Parameter: Organism Value: A. thaliana
  misc_feature: MA Experiment 20001905 PARAMETER Experiment Name: At_Drought_Reproduction_P Parameter: Plant Line Value: WS
  misc_feature: MA Experiment 20001905 PARAMETER Experiment Name: At_Drought_Reproduction_P Parameter: Timepoint (day) Value: 10
  misc_feature: MA Experiment 20001905 PARAMETER Experiment Name: At_Drought_Reproduction_P Parameter: Tissue Value: Rosettes
  misc_feature: MA Experiment 20001905 PARAMETER Experiment Name: At_Drought_Reproduction_P Parameter: Treatment Value: Drought vs. No Drought
  misc_feature: MA Experiment ID: 20001911 Result: Up-regulated in Transcription
  misc_feature: MA Experiment 20001911 PARAMETER Experiment Name: At_Drought_Reproduction_P Parameter: Age (day) Value: 40
  misc_feature: MA Experiment 20001911 PARAMETER Experiment Name: At_Drought_Reproduction_P Parameter: Organism Value: A. thaliana
  misc_feature: MA Experiment 20001911 PARAMETER Experiment Name: At_Drought_Reproduction_P Parameter: Plant Line Value: WS
  misc_feature: MA Experiment 20001911 PARAMETER Experiment Name: At_Drought_Reproduction_P Parameter: Timepoint (day) Value: 10
  misc_feature: MA Experiment 20001911 PARAMETER Experiment Name: At_Drought_Reproduction_P Parameter: Tissue Value: Flowers
  misc_feature: MA Experiment 20001911 PARAMETER Experiment Name: At_Drought_Reproduction_P Parameter: Treatment Value: Drought vs. No Drought
atgtcgacagtgggaaattcaacgaacatattttggcaagaatcccccattgggaaaactgaaaggcagaagttgttaaatcagaagggttgtgtggtgtggatcacagggctcagtggctcagggaaaagcacgttagcttgctcgcttagtagagagctgaacaaccggggaaagctatcatatattcttgatggtgacaatcttcgtcatggtttgaacaaagatcttggtttcaaggcagaggatagagtggaaaatatacgcagggtcggagaagtagccaaactctttgcggatgctggtttaatctgtattgccagcctcatatccccgtatagaaaagaccgtgacgcctgcagggaaatgatacagaattcatcttttattgaggttttcatgaacatgtctctgcaattgtgtgaagcaagggaccctaaaggcctatacaagcttgcacgtgcaggaaagatcaaaggtttcacaggaatagatgatccgtatgagtctcccttgaactgtgagatagagttgaaagagaaagagggagagtgtccttcccctgtagctatggctgaggaagtgatctcttatctagaagacaaaggtttccttcaaaacgagtaa

SEQ ID NO: 91752 - protein, 208 aa, Arabidopsis thaliana
  peptide (1)..(208): Ceres Seq. ID no. 12729165
  misc_feature (29)..(184): Pfam Name: Adenylylsulphate kinase Pfam Description: Adenylylsulphate kinase
  misc_feature (1)..(208): Homolog of NCBI NO: 15228666 NR Description: putative adenylylsulfate kinase; protein id: [Arabidopsis thaliana] >gi|6006852|gb|AAF00628.1|AC009540_5
  misc_feature (2)..(205): Homolog of NCBI NO: 6563285 NR Description: adenosine-5'-phosphosulfate kinase [Zea mays]
  misc_feature (2)..(207): Homolog of NCBI NO: 34393551 NR Description: putative adenosine-5'-phosphosulfate kinase
  misc_feature (1)..(206): Homolog of NCBI NO: 15225999 NR Description: putative adenosine phosphosulfate kinase; protein At2g14750.1, supported by cDNA: 14216., supported by cDNA: supported by cDNA: gi_450234 [Arabidopsis thaliana]
  misc_feature (1)..(206): Homolog of NCBI NO: 21553403 NR Description: putative adenosine phosphosulfate kinase
  misc_feature (1)..(152): Homolog of NCBI NO: 6223636 NR Description: putative adenylylsulfate kinase, 3' partial
  misc_feature (2)..(206): Homolog of NCBI NO: 7387809 NR Description: Adenylylsulfate kinase, chloroplast precursor
  misc_feature (9)..(206): Homolog of NCBI NO: 15236087 NR Description: adenosine-5-phosphosulfate-kinase; protein id: supported by cDNA: gi_18087562, supported by cDNA: gi_20453396, by cDNA: gi_2829132 [Arabidopsis thaliana]
  misc_feature (5)..(206): Homolog of NCBI NO: 9757873 NR Description: adenylylsulfate kinase-like protein [Arabidopsis
  misc_feature (5)..(206): Homolog of NCBI NO: 18425199 NR Description: adenylylsulfate kinase-like protein; protein id: supported by cDNA: 125039. [Arabidopsis thaliana] putative adenylylsulfate kinase [Arabidopsis thaliana]
MSTVGNSTNIFWQESPIGKTERQKLLNQKGCVVWITGLSGSGKSTLACSLSRELNNRGKLSYILDGDNLRHGLNKDLGFKAEDRVENIRRVGEVAKLFADAGLICIASLISPYRKDRDACREMIQNSSFIEVFMNMSLQLCEARDPKGLYKLARAGKIKGFTGIDDPYESPLNCEIELKEKEGECPSPVAMAEEVISYLEDKGFLQNE

SEQ ID NO: 91753 - DNA, 1236 bp, Arabidopsis thaliana
  misc_feature (1)..(1236): Ceres Seq. ID no. 12729166
  misc_feature: MA Experiment ID: 20000355 Result: Up-regulated in Transcription
  misc_feature: MA Experiment 20000355 PARAMETER Experiment Name: At_Siliques_Sub_P Parameter: Age (day) Value: 21
  misc_feature: MA Experiment 20000355 PARAMETER Experiment Name: At_Siliques_Sub_P Parameter: Organism Value: A. thaliana
  misc_feature: MA Experiment 20000355 PARAMETER Experiment Name: At_Siliques_Sub_P Parameter: Plant Line Value: WS
  misc_feature: MA Experiment 20000355 PARAMETER Experiment Name: At_Siliques_Sub_P Parameter: Tissue Value: Less Than 5mm Siliques vs. Whole Plant
  misc_feature: MA Experiment ID: 20000440 Result: Up-regulated in Transcription
  misc_feature: MA Experiment 20000440 PARAMETER Experiment Name: At_Closed-Flower__Sub_P Parameter: Tissue Value: Closed Flower vs. Whole Plant
  misc_feature: MA Experiment ID: 20001806 Result: Down-regulated in Transcription
  misc_feature: MA Experiment 20001806 PARAMETER Experiment Name: At_50mM_NH4NO3_L-to-H_Sub_P Parameter: Timepoint (hr) Value: 4
  misc_feature: MA Experiment 20001806 PARAMETER Experiment Name: At_50mM_NH4NO3_L-to-H_Sub_P Parameter: Tissue Value: Leaf
  misc_feature: MA Experiment 20001806 PARAMETER Experiment Name: At_50mM_NH4NO3_L-to-H_Sub_P Parameter: Treatment Value: 50mM NH4NO3 vs 100mM Mannitol
atgaatgctttagcagcaaccaacagaaacttcaagcttgcttctaggcttcttggtttagactcaaagctcgagaaaagtcttctcattcccttcagagagatcaaggtggaatgtaccataccaaaagacgatggaactctagcatcctttgttggattcagagttcaacacgacaatgcaagaggtcccatgaaaggtggaatcagatatcatccagaggttgaaccggatgaagtaaacgctttggctcaacttatgacatggaaaacagcagtggctaagataccttatggaggagccaaaggaggaatcggttgtgacccgagcgagctaagtctctcagagctcgaacgtttgactcgagttttcactcagaagattcacgatcttattgggattcatactgatgttccagctcctgatatgggaaccggtcctcagacaatggcttggattcttgatgaatactcaaaattccatggacattctcctgctgttgtcactggaaaacccattgatcttggtggatctcttgggagagatgctgctacaggaagaggagtgttgtttgcaacagaagctttactcaacgaacatggaaagaccatatctggacagcgattcgccatccagggctttggaaatgtgggttcttgggcagcgaagttgataagtgacaaaggtggtaagattgtggcggtgagtgatgtcacaggagcaatcaagaacaataatggaattgacatcttgagtttgctcgagcatgctgaagaaaacagaggaatcaaagggtttgatggtgctgattcaatcgatcctgattcgattcttgtcgaagattgtgatattcttgtccctgcagctctagggggagtcatcaacagggaaaatgcaaacgaaataaaagccaaattcatcattgaaggtgctaatcacccaactgatcctgaggctgacgagatcttgaagaagaaaggtgttatgatcctcccagatatatacgcaaactcaggaggagtcactgtaagttacttcgagtgggttcagaacatacaaggattcatgtgggatgaggaaaaggtgaatagggagctaaagacctacatgactcgcgggttcaaagacttgaaagaaatgtgtcagacgcactcatgtgatctccgtatgggagctttcaccctcggtattaatcgtgtcgctcaagctaccactatcagaggctggggttcttga

SEQ ID NO: 91754 - protein, 411 aa, Arabidopsis thaliana
  peptide (1)..(411): Ceres Seq. ID no. 12729167
  misc_feature (176)..(408): Pfam Name: Glutamate/Leucine/Phenylalanine/Valine dehydrogenase Pfam Description: Glutamate/Leucine/Phenylalanine/Valine
  misc_feature (1)..(411): Homolog of NCBI NO: 15228667 NR Description: putative glutamate dehydrogenase; protein id: [Arabidopsis thaliana] >gi|12229816|sp|Q9S7A0|DHE3_ARATH Probable dehydrogenase 3 (GDH 3) >gi|6006851|gb|AAF00627.1|AC009540_4
  misc_feature (1)..(411): Homolog of NCBI NO: 15238762 NR Description: glutamate dehydrogenase (EC 1.4.1.-) 1 protein id: At5g18170.1, supported by cDNA: gi_1098959, supported cDNA: gi_1293094, supported by cDNA: gi_15146203 [Arabidopsis
  misc_feature (1)..(409): Homolog of NCBI NO: 12643806 NR Description: Glutamate dehydrogenase B (GDH B)
  misc_feature (1)..(409): Homolog of NCBI NO: 7431768 NR Description: glutamate dehydrogenase (EC 1.4.1.-) B - tobacco >gi|4688955|emb|CAA69601.2| NADH glutamate dehydrogenase
  misc_feature (1)..(409): Homolog of NCBI NO: 20873461 NR Description: glutamate dehydrogenase [Nicotiana tabacum]
  misc_feature (1)..(409): Homolog of NCBI NO: 21314959 NR Description: NADH-glutamate dehydrogenase [Lycopersicon
  misc_feature (1)..(409): Homolog of NCBI NO: 28269441 NR Description: glutamate dehydrogenase [Oryza sativa (japonica
  misc_feature (1)..(409): Homolog of NCBI NO: 12229803 NR Description: Glutamate dehydrogenase (GDH) (Legdh1)
  misc_feature (1)..(409): Homolog of NCBI NO: 4150965 NR Description: glutamate dehydrogenase [Asparagus officinalis]
  misc_feature (1)..(409): Homolog of NCBI NO: 7431775 NR Description: glutamate dehydrogenase (EC 1.4.1.2) - maize
MNALAATNRNFKLASRLLGLDSKLEKSLLIPFREIKVECTIPKDDGTLASFVGFRVQHDNARGPMKGGIRYHPEVEPDEVNALAQLMTWKTAVAKIPYGGAKGGIGCDPSELSLSELERLTRVFTQKIHDLIGIHTDVPAPDMGTGPQTMAWILDEYSKFHGHSPAVVTGKPIDLGGSLGRDAATGRGVLFATEALLNEHGKTISGQRFAIQGFGNVGSWAAKLISDKGGKIVAVSDVTGAIKNNNGIDILSLLEHAEENRGIKGFDGADSIDPDSILVEDCDILVPAALGGVINRENANEIKAKFIIEGANHPTDPEADEILKKKGVMILPDIYANSGGVTVSYFEWVQNIQGFMWDEEKVNRELKTYMTRGFKDLKEMCQTHSCDLRMGAFTLGINRVAQATTIRGWGS

SEQ ID NO: 91755 - protein, 347 aa, Arabidopsis thaliana
  peptide (1)..(347): Ceres Seq. ID no. 12729168
  misc_feature (112)..(344): Pfam Name: Glutamate/Leucine/Phenylalanine/Valine dehydrogenase Pfam Description: Glutamate/Leucine/Phenylalanine/Valine
  misc_feature (1)..(347): Homolog of NCBI NO: 15228667 NR Description: putative glutamate dehydrogenase; protein id: [Arabidopsis thaliana] >gi|12229816|sp|Q9S7A0|DHE3_ARATH Probable dehydrogenase 3 (GDH 3) >gi|6006851|gb|AAF00627.1|AC009540_4
  misc_feature (1)..(347): Homolog of NCBI NO: 15238762 NR Description: glutamate dehydrogenase (EC 1.4.1.-) 1 protein id: At5g18170.1, supported by cDNA: gi_1098959, supported cDNA: gi_1293094, supported by cDNA: gi_15146203 [Arabidopsis
  misc_feature (1)..(345): Homolog of NCBI NO: 12643806 NR Description: Glutamate dehydrogenase B (GDH B)
  misc_feature (1)..(345): Homolog of NCBI NO: 7431768 NR Description: glutamate dehydrogenase (EC 1.4.1.-) B - tobacco >gi|4688955|emb|CAA69601.2| NADH glutamate dehydrogenase
  misc_feature (1)..(345): Homolog of NCBI NO: 20873461 NR Description: glutamate dehydrogenase [Nicotiana tabacum]
  misc_feature (1)..(345): Homolog of NCBI NO: 21314959 NR Description: NADH-glutamate dehydrogenase [Lycopersicon
  misc_feature (1)..(345): Homolog of NCBI NO: 28269441 NR Description: glutamate dehydrogenase [Oryza sativa (japonica
  misc_feature (1)..(345): Homolog of NCBI NO: 12229803 NR Description: Glutamate dehydrogenase (GDH) (Legdh1)
  misc_feature (1)..(345): Homolog of NCBI NO: 4150965 NR Description: glutamate dehydrogenase [Asparagus officinalis]
  misc_feature (1)..(345): Homolog of NCBI NO: 7431775 NR Description: glutamate dehydrogenase (EC 1.4.1.2) - maize
MKGGIRYHPEVEPDEVNALAQLMTWKTAVAKIPYGGAKGGIGCDPSELSLSELERLTRVFTQKIHDLIGIHTDVPAPDMGTGPQTMAWILDEYSKFHGHSPAVVTGKPIDLGGSLGRDAATGRGVLFATEALLNEHGKTISGQRFAIQGFGNVGSWAAKLISDKGGKIVAVSDVTGAIKNNNGIDILSLLEHAEENRGIKGFDGADSIDPDSILVEDCDILVPAALGGVINRENANEIKAKFIIEGANHPTDPEADEILKKKGVMILPDIYANSGGVTVSYFEWVQNIQGFMWDEEKVNRELKTYMTRGFKDLKEMCQTHSCDLRMGAFTLGINRVAQATTIRGWGS

SEQ ID NO: 91756 - protein, 325 aa, Arabidopsis thaliana
  peptide (1)..(325): Ceres Seq. ID no. 12729169
  misc_feature (90)..(322): Pfam Name: Glutamate/Leucine/Phenylalanine/Valine dehydrogenase Pfam Description: Glutamate/Leucine/Phenylalanine/Valine
  misc_feature (1)..(325): Homolog of NCBI NO: 15228667 NR Description: putative glutamate dehydrogenase; protein id: [Arabidopsis thaliana] >gi|12229816|sp|Q9S7A0|DHE3_ARATH Probable dehydrogenase 3 (GDH 3) >gi|6006851|gb|AAF00627.1|AC009540_4
  misc_feature (1)..(325): Homolog of NCBI NO: 15238762 NR Description: glutamate dehydrogenase (EC 1.4.1.-) 1 protein id: At5g18170.1, supported by cDNA: gi_1098959, supported cDNA: gi_1293094, supported by cDNA: gi_15146203 [Arabidopsis
  misc_feature (1)..(323): Homolog of NCBI NO: 12643806 NR Description: Glutamate dehydrogenase B (GDH B)
  misc_feature (1)..(323): Homolog of NCBI NO: 7431768 NR Description: glutamate dehydrogenase (EC 1.4.1.-) B - tobacco >gi|4688955|emb|CAA69601.2| NADH glutamate dehydrogenase
  misc_feature (1)..(323): Homolog of NCBI NO: 20873461 NR Description: glutamate dehydrogenase [Nicotiana tabacum]
  misc_feature (1)..(323): Homolog of NCBI NO: 21314959 NR Description: NADH-glutamate dehydrogenase [Lycopersicon
  misc_feature (1)..(323): Homolog of NCBI NO: 28269441 NR Description: glutamate dehydrogenase [Oryza sativa (japonica
  misc_feature (1)..(323): Homolog of NCBI NO: 12229803 NR Description: Glutamate dehydrogenase (GDH) (Legdh1)
  misc_feature (1)..(323): Homolog of NCBI NO: 4150965 NR Description: glutamate dehydrogenase [Asparagus officinalis]
  misc_feature (1)..(323): Homolog of NCBI NO: 7431775 NR Description: glutamate dehydrogenase (EC 1.4.1.2) - maize
MTWKTAVAKIPYGGAKGGIGCDPSELSLSELERLTRVFTQKIHDLIGIHTDVPAPDMGTGPQTMAWILDEYSKFHGHSPAVVTGKPIDLGGSLGRDAATGRGVLFATEALLNEHGKTISGQRFAIQGFGNVGSWAAKLISDKGGKIVAVSDVTGAIKNNNGIDILSLLEHAEENRGIKGFDGADSIDPDSILVEDCDILVPAALGGVINRENANEIKAKFIIEGANHPTDPEADEILKKKGVMILPDIYANSGGVTVSYFEWVQNIQGFMWDEEKVNRELKTYMTRGFKDLKEMCQTHSCDLRMGAFTLGINRVAQATTIRGWGS

SEQ ID NO: 91757 - DNA, 1359 bp, Arabidopsis thaliana
  misc_feature (1)..(1359): Ceres Seq. ID no. 12729181
  misc_feature: MA Experiment ID: 20000171 Result: Up-regulated in Transcription
  misc_feature: MA Experiment 20000171 PARAMETER Experiment Name: At_42deg_Heat_P Parameter: Age (day) Value: 14
  misc_feature: MA Experiment 20000171 PARAMETER Experiment Name: At_42deg_Heat_P Parameter: Organism Value: A. thaliana
  misc_feature: MA Experiment 20000171 PARAMETER Experiment Name: At_42deg_Heat_P Parameter: Plant Line Value: WS
  misc_feature: MA Experiment 20000171 PARAMETER Experiment Name: At_42deg_Heat_P Parameter: Temperature (deg C) Value: 42 vs. 22
  misc_feature: MA Experiment 20000171 PARAMETER Experiment Name: At_42deg_Heat_P Parameter: Timepoint (hr) Value: 1
  misc_feature: MA Experiment 20000171 PARAMETER Experiment Name: At_42deg_Heat_P Parameter: Tissue Value: Aerial
  misc_feature: MA Experiment ID: 20000182 Result: Up-regulated in Transcription
  misc_feature: MA Experiment 20000182 PARAMETER Experiment Name: At_2mM_SA_P Parameter: Age (day) Value: 14
  misc_feature: MA Experiment 20000182 PARAMETER Experiment Name: At_2mM_SA_P Parameter: Organism Value: A. thaliana
  misc_feature: MA Experiment 20000182 PARAMETER Experiment Name: At_2mM_SA_P Parameter: Plant Line Value: WS
  misc_feature: MA Experiment 20000182 PARAMETER Experiment Name: At_2mM_SA_P Parameter: Timepoint (hr) Value: 6
  misc_feature: MA Experiment 20000182 PARAMETER Experiment Name: At_2mM_SA_P Parameter: Tissue Value: Aerial
  misc_feature: MA Experiment 20000182 PARAMETER Experiment Name: At_2mM_SA_P Parameter: Treatment Value: 2mM SA vs. No Treatment
  misc_feature: MA Experiment ID: 20000437 Result: Up-regulated in Transcription
  misc_feature: MA Experiment 20000437 PARAMETER Experiment Name: At_Drought_P Parameter: Age (day) Value: 8
  misc_feature: MA Experiment 20000437 PARAMETER Experiment Name: At_Drought_P Parameter: Organism Value: A. thaliana
  misc_feature: MA Experiment 20000437 PARAMETER Experiment Name: At_Drought_P Parameter: Plant Line Value: WS
  misc_feature: MA Experiment 20000437 PARAMETER Experiment Name: At_Drought_P Parameter: Timepoint (hr) Value: 24
  misc_feature: MA Experiment 20000437 PARAMETER Experiment Name: At_Drought_P Parameter: Tissue Value: Whole Plant
  misc_feature: MA Experiment 20000437 PARAMETER Experiment Name: At_Drought_P Parameter: Treatment Value: Drought vs. No Drought
atggcgagtcatcagttaccgccgaagacggtggtggagatgcttaaagacaacaatatacagaaagtgaagttgttcgatgccgacacaaacaccatgggagctctcgccggctccggcgtcgaagtgatggtggctatccctaatgatctgctcctagcgatgggaaactatcaaagagctaaagattgggtccaaagaaacgtctctagattcaactttaacaacggcgttaagatcaaatacgttgcagtggggaacgaaccgttcttgacagcgtacaacggatcattcataaacctaacgtacccagcactcttcaacatccaaaccgctttaaacgaggctggagttggtgattttaccaaagccaccgttcctttaaacgccgacgtttacaattctcctccggacaatcaagtcccatccgccggaagattccgttccgacattatccaagaaatgacacaaatcgttaacttcctcgcacagaacaaagctcctttcacagtcaacatttatcctttcctcagtctctacttaagcagcgactttcctttcgaatacgctttctttgacggccaaaacaccgttaacgataacggcgttatctacacgaacgtcttcgacgctagtttcgacacgcttttagcttctttaaacgcgttgaatcacggtaacatggaagtgattgttggagaagttggttggcctacggatggtgacaagaacgcaaacgttccaaacgcggaacggttttattccggtttgcttccgcggttggcgaacaacgttggaactcctatgcgtaaaggttacattgaggtttatcttttcggatttatcgatgaagatgcgaaaagtgtagcgccagggaacttcgaacgtcattgggggatatttaaatttgatggccaaccgaaattcccggtagattttcgtggacaaggtcagaaaaagttcttaacgggagctcaaaacgttcagtactttctgaaccagtggtgtatgtttaatcctaatggtcgtggtaatatgagtaggctcggagataatataaactacgcgtgttcgcattcggactgtaccgctttaggttatggatcatcttgtggcaatcttgatgcgaatggaaacgcatcttacgcgtttaatatgtatttccaagtgcaaaatcaggaagctcaggcgtgcgattttgaagggcttgcaacgattactactcaaaatatatctcaaggacaatgtaattttccaattcagattggagagccatcttctggtcattatgattatagctatggttcgatggttaggttgtgtttggtgatgagtggcttggtctttcttctcatatag

SEQ ID NO: 91758 - protein, 452 aa, Arabidopsis thaliana
  peptide (1)..(452): Ceres Seq. ID no. 12729182
  misc_feature (1)..(313): Pfam Name: Glycosyl hydrolases family 17 Pfam Description: Glycosyl hydrolases family 17
  misc_feature (1)..(452): Homolog of NCBI NO: 6223646 NR Description: putative beta-1,3-glucanase [Arabidopsis thaliana]
  misc_feature (1)..(452): Homolog of NCBI NO: 22330833 NR Description: glycosyl hydrolase family 17; protein id:
  misc_feature (1)..(449): Homolog of NCBI NO: 15238768 NR Description: glycosyl hydrolase family 17; protein id:
  misc_feature (1)..(449): Homolog of NCBI NO: 15217739 NR Description: glycosyl hydrolase family 17; protein id:
  misc_feature (1)..(449): Homolog of NCBI NO: 25404490 NR Description: hypothetical protein F13O11.7 [imported] -
  misc_feature (1)..(449): Homolog of NCBI NO: 15224778 NR Description: glycosyl hydrolase family 17; protein id:
  misc_feature (2)..(451): Homolog of NCBI NO: 28269434 NR Description: putative beta-1,3 glucanase [Oryza sativa
  misc_feature (1)..(444): Homolog of NCBI NO: 18483232 NR Description: 3-glucanase [Sorghum bicolor]
  misc_feature (2)..(422): Homolog of NCBI NO: 34395009 NR Description: putative 3-glucanase [Oryza sativa (japonica
  misc_feature (76)..(449): Homolog of NCBI NO: 7486246 NR Description: hypothetical protein F27F23.24 - Arabidopsis
MASHQLPPKTVVEMLKDNNIQKVKLFDADTNTMGALAGSGVEVMVAIPNDLLLAMGNYQRAKDWVQRNVSRFNFNNGVKIKYVAVGNEPFLTAYNGSFINLTYPALFNIQTALNEAGVGDFTKATVPLNADVYNSPPDNQVPSAGRFRSDIIQEMTQIVNFLAQNKAPFTVNIYPFLSLYLSSDFPFEYAFFDGQNTVNDNGVIYTNVFDASFDTLLASLNALNHGNMEVIVGEVGWPTDGDKNANVPNAERFYSGLLPRLANNVGTPMRKGYIEVYLFGFIDEDAKSVAPGNFERHWGIFKFDGQPKFPVDFRGQGQKKFLTGAQNVQYFLNQWCMFNPNGRGNMSRLGDNINYACSHSDCTALGYGSSCGNLDANGNASYAFNMYFQVQNQEAQACDFEGLATITTQNISQGQCNFPIQIGEPSSGHYDYSYGSMVRLCLVMSGLVFLLI

SEQ ID NO: 91759 - protein, 439 aa, Arabidopsis thaliana
  peptide (1)..(439): Ceres Seq. ID no. 12729183
  misc_feature (1)..(300): Pfam Name: Glycosyl hydrolases family 17 Pfam Description: Glycosyl hydrolases family 17
  misc_feature (1)..(439): Homolog of NCBI NO: 6223646 NR Description: putative beta-1,3-glucanase [Arabidopsis thaliana]
  misc_feature (1)..(439): Homolog of NCBI NO: 22330833 NR Description: glycosyl hydrolase family 17; protein id:
  misc_feature (1)..(436): Homolog of NCBI NO: 15238768 NR Description: glycosyl hydrolase family 17; protein id:
  misc_feature (1)..(436): Homolog of NCBI NO: 15217739 NR Description: glycosyl hydrolase family 17; protein id:
  misc_feature (1)..(436): Homolog of NCBI NO: 25404490 NR Description: hypothetical protein F13O11.7 [imported] -
  misc_feature (1)..(436): Homolog of NCBI NO: 15224778 NR Description: glycosyl hydrolase family 17; protein id:
  misc_feature (1)..(438): Homolog of NCBI NO: 28269434 NR Description: putative beta-1,3 glucanase [Oryza sativa
  misc_feature (1)..(431): Homolog of NCBI NO: 18483232 NR Description: 3-glucanase [Sorghum bicolor]
  misc_feature (1)..(409): Homolog of NCBI NO: 34395009 NR Description: putative 3-glucanase [Oryza sativa (japonica
  misc_feature (63)..(436): Homolog of NCBI NO: 7486246 NR Description: hypothetical protein F27F23.24 - Arabidopsis
MLKDNNIQKVKLFDADTNTMGALAGSGVEVMVAIPNDLLLAMGNYQRAKDWVQRNVSRFNFNNGVKIKYVAVGNEPFLTAYNGSFINLTYPALFNIQTALNEAGVGDFTKATVPLNADVYNSPPDNQVPSAGRFRSDIIQEMTQIVNFLAQNKAPFTVNIYPFLSLYLSSDFPFEYAFFDGQNTVNDNGVIYTNVFDASFDTLLASLNALNHGNMEVIVGEVGWPTDGDKNANVPNAERFYSGLLPRLANNVGTPMRKGYIEVYLFGFIDEDAKSVAPGNFERHWGIFKFDGQPKFPVDFRGQGQKKFLTGAQNVQYFLNQWCMFNPNGRGNMSRLGDNINYACSHSDCTALGYGSSCGNLDANGNASYAFNMYFQVQNQEAQACDFEGLATITTQNISQGQCNFPIQIGEPSSGHYDYSYGSMVRLCLVMSGLVFLLI

SEQ ID NO: 91760 - protein, 420 aa, Arabidopsis thaliana
  peptide (1)..(420): Ceres Seq. ID no. 12729184
  misc_feature (1)..(281): Pfam Name: Glycosyl hydrolases family 17 Pfam Description: Glycosyl hydrolases family 17
  misc_feature (1)..(420): Homolog of NCBI NO: 6223646 NR Description: putative beta-1,3-glucanase [Arabidopsis thaliana]
  misc_feature (1)..(420): Homolog of NCBI NO: 22330833 NR Description: glycosyl hydrolase family 17; protein id:
  misc_feature (1)..(417): Homolog of NCBI NO: 15238768 NR Description: glycosyl hydrolase family 17; protein id:
  misc_feature (1)..(417): Homolog of NCBI NO: 15217739 NR Description: glycosyl hydrolase family 17; protein id:
  misc_feature (1)..(417): Homolog of NCBI NO: 25404490 NR Description: hypothetical protein F13O11.7 [imported] -
  misc_feature (1)..(417): Homolog of NCBI NO: 15224778 NR Description: glycosyl hydrolase family 17; protein id:
  misc_feature (1)..(419): Homolog of NCBI NO: 28269434 NR Description: putative beta-1,3 glucanase [Oryza sativa
  misc_feature (1)..(412): Homolog of NCBI NO: 18483232 NR Description: 3-glucanase [Sorghum bicolor]
  misc_feature (1)..(390): Homolog of NCBI NO: 34395009 NR Description: putative 3-glucanase [Oryza sativa (japonica
  misc_feature (44)..(417): Homolog of NCBI NO: 7486246 NR Description: hypothetical protein F27F23.24 - Arabidopsis
MGALAGSGVEVMVAIPNDLLLAMGNYQRAKDWVQRNVSRFNFNNGVKIKYVAVGNEPFLTAYNGSFINLTYPALFNIQTALNEAGVGDFTKATVPLNADVYNSPPDNQVPSAGRFRSDIIQEMTQIVNFLAQNKAPFTVNIYPFLSLYLSSDFPFEYAFFDGQNTVNDNGVIYTNVFDASFDTLLASLNALNHGNMEVIVGEVGWPTDGDKNANVPNAERFYSGLLPRLANNVGTPMRKGYIEVYLFGFIDEDAKSVAPGNFERHWGIFKFDGQPKFPVDFRGQGQKKFLTGAQNVQYFLNQWCMFNPNGRGNMSRLGDNINYACSHSDCTALGYGSSCGNLDANGNASYAFNMYFQVQNQEAQACDFEGLATITTQNISQGQCNFPIQIGEPSSGHYDYSYGSMVRLCLVMSGLVFLLI

SEQ ID NO: 91761 - DNA, 1328 bp, Arabidopsis thaliana
  misc_feature (1)..(1328): Ceres Seq. ID no. 12729185
  misc_feature: MA Experiment ID: 20000185 Result: Up-regulated in Transcription
  misc_feature: MA Experiment 20000185 PARAMETER Experiment Name: At_Roots__P Parameter: Age (day) Value: 7 vs. 21
  misc_feature: MA Experiment 20000185 PARAMETER Experiment Name: At_Roots__P Parameter: Organism Value: A. thaliana
  misc_feature: MA Experiment 20000185 PARAMETER Experiment Name: At_Roots__P Parameter: Tissue Value: Roots vs. Whole Plant
  misc_feature: MA Experiment ID: 20000453 Result: Up-regulated in Transcription
  misc_feature: MA Experiment 20000453 PARAMETER Experiment Name: At_100uM_ABA_P Parameter: Age (day) Value: 15
  misc_feature: MA Experiment 20000453 PARAMETER Experiment Name: At_100uM_ABA_P Parameter: Organism Value: A. thaliana
  misc_feature: MA Experiment 20000453 PARAMETER Experiment Name: At_100uM_ABA_P Parameter: Plant Line Value: WS
  misc_feature: MA Experiment 20000453 PARAMETER Experiment Name: At_100uM_ABA_P Parameter: Timepoint (hr) Value: 24
  misc_feature: MA Experiment 20000453 PARAMETER Experiment Name: At_100uM_ABA_P Parameter: Tissue Value: Aerial
  misc_feature: MA Experiment 20000453 PARAMETER Experiment Name: At_100uM_ABA_P Parameter: Treatment Value: 100uM ABA vs. No Treatment
  misc_feature: MA Experiment ID: 20000496 Result: Up-regulated in Transcription
  misc_feature: MA Experiment 20000496 PARAMETER Experiment Name: At_Guard_Cells_P Parameter: Harvest Date Value: 7/19/2002
  misc_feature: MA Experiment 20000496 PARAMETER Experiment Name: At_Guard_Cells_P Parameter: Organism Value: Canola
  misc_feature: MA Experiment 20000496 PARAMETER Experiment Name: At_Guard_Cells_P Parameter: Tissue Value: Guard Cells vs. Leaves
  misc_feature: MA Experiment ID: 20000794 Result: Up-regulated in Transcription
  misc_feature: MA Experiment 20000794 PARAMETER Experiment Name: At_Petals_P Parameter: Age (day) Value: 23-25 days
  misc_feature: MA Experiment 20000794 PARAMETER Experiment Name: At_Petals_P Parameter: Plant Line Value: WS
  misc_feature: MA Experiment 20000794 PARAMETER Experiment Name: At_Petals_P Parameter: Tissue Value: Petals vs. Whole plant
  misc_feature: MA Experiment ID: 20001557 Result: Down-regulated in Transcription
  misc_feature: MA Experiment 20001557 PARAMETER Experiment Name: At_Drought_Soil_Dry_P Parameter: Age (day) Value: 27
  misc_feature: MA Experiment 20001557 PARAMETER Experiment Name: At_Drought_Soil_Dry_P Parameter: Organism Value: A. thaliana
  misc_feature: MA Experiment 20001557 PARAMETER Experiment Name: At_Drought_Soil_Dry_P Parameter: Plant Line Value: WS
  misc_feature: MA Experiment 20001557 PARAMETER Experiment Name: At_Drought_Soil_Dry_P Parameter: Post Timepoint (hr) Value: 3
  misc_feature: MA Experiment 20001557 PARAMETER Experiment Name: At_Drought_Soil_Dry_P Parameter: Post-Treatment Value: Re-Water vs. No Drought
  misc_feature: MA Experiment 20001557 PARAMETER Experiment Name: At_Drought_Soil_Dry_P Parameter: Timepoint (day) Value: 13
  misc_feature: MA Experiment 20001557 PARAMETER Experiment Name: At_Drought_Soil_Dry_P Parameter: Treatment Value: Drought vs. No Drought
  misc_feature: MA Experiment ID: 20001558 Result: Down-regulated in Transcription
  misc_feature: MA Experiment 20001558 PARAMETER Experiment Name: At_Drought_Soil_Dry_P Parameter: Age (day) Value: 27
  misc_feature: MA Experiment 20001558 PARAMETER Experiment Name: At_Drought_Soil_Dry_P Parameter: Organism Value: A. thaliana
  misc_feature: MA Experiment 20001558 PARAMETER Experiment Name: At_Drought_Soil_Dry_P Parameter: Plant Line Value: WS
  misc_feature: MA Experiment 20001558 PARAMETER Experiment Name: At_Drought_Soil_Dry_P Parameter: Post Timepoint (hr) Value: 6
  misc_feature: MA Experiment 20001558 PARAMETER Experiment Name: At_Drought_Soil_Dry_P Parameter: Post-Treatment Value: Re-Water vs. No Drought
  misc_feature: MA Experiment 20001558 PARAMETER Experiment Name: At_Drought_Soil_Dry_P Parameter: Timepoint (day) Value: 13
  misc_feature: MA Experiment 20001558 PARAMETER Experiment Name: At_Drought_Soil_Dry_P Parameter: Treatment Value: Drought vs. No Drought
  misc_feature: MA Experiment ID: 20001560 Result: Down-regulated in Transcription
  misc_feature: MA Experiment 20001560 PARAMETER Experiment Name: At_Drought_Soil_Dry_P Parameter: Age (day) Value: 28
  misc_feature: MA Experiment 20001560 PARAMETER Experiment Name: At_Drought_Soil_Dry_P Parameter: Organism Value: A. thaliana
  misc_feature: MA Experiment 20001560 PARAMETER Experiment Name: At_Drought_Soil_Dry_P Parameter: Plant Line Value: WS
  misc_feature: MA Experiment 20001560 PARAMETER Experiment Name: At_Drought_Soil_Dry_P Parameter: Post Timepoint (hr) Value: None
  misc_feature: MA Experiment 20001560 PARAMETER Experiment Name: At_Drought_Soil_Dry_P Parameter: Post-Treatment Value: None
  misc_feature: MA Experiment 20001560 PARAMETER Experiment Name: At_Drought_Soil_Dry_P Parameter: Timepoint (day) Value: 14
  misc_feature: MA Experiment 20001560 PARAMETER Experiment Name: At_Drought_Soil_Dry_P Parameter: Treatment Value: Drought vs. No Drought
agaaaaatataaagcacaagtaagcaaaagcagcaaaaacatcttccttagtttttggagtttactctcttggaacttctgagagaagcaaattagatttaaacttacagttgcacagactttatgtattaccaaaaccagcaccaaggaaagaacatcctctcatcttcaagaatgcatataacttctgaaaggcatccattccttagagggaatagtccaggtgattctggacttatcctatcaaccgatgcaaagccacgcctaaaatggactccagatcttcatgagagattcattgaagcagtcaatcaactcggtggagcagataaagctactcctaagacaatcatgaaagtcatggggattccaggccttaccttataccatctcaaaagtcatcttcagaaatacaggctgagcaagaatctcaacggacaagctaacaacagcttcaacaaaataggtataatgaccatgatggaagaaaagactcctgatgcagacgaaattcaaagcgagaatttaagcattggaccacagccaaacaagaattcaccaataggtgaagcactgcaaatgcaaatagaggtccaaagaaggcttcatgagcaacttgagcttaggatagaggctcaagggaagtacctgcaatcggttttggagaaagcacaagagactcttggaagacagaacctcggtgcagctgggatcgaagctgccaaagttcaactctcggaactagtatctaaagtatcagcagagtacccaaactctagtttcctagaaccaaaagaacttcaaaacctatgctcacaacagatgcaaacaaactatccacctgattgctctcttgaaagttgcctgacctcaagcgagggaacgcagaaaaactcgaaaatgctagagaacaacagattaggactaagaacgtatattggtgattcaacatcggagcagaaagagattatggaagaaccattgttccaaagaatggagctcacatggacagaaggtctaagagggaatccatatctttcaacaatggtgagtgaagcagaacaaagaatctcatattcagaaagaagtccaggtagattatcaataggagtaggattgcacggacacaaaagccaacatcaacaaggcaacaatgaggatcataagcttgaaacacgaaaccggaaaggcatggattcaacaacagagctagatctcaacacacatgttgaaaactattgtacaacgcgtacgaaacagttcgacttgaatggtttcagctggaactgagaatagattaaccaaaaagttaaaagagagtttcaatc

SEQ ID NO: 91762 - protein, 388 aa, Arabidopsis thaliana
  peptide (1)..(388): Ceres Seq. ID no. 12729186
  misc_feature (47)..(98): Pfam Name: Myb-like DNA-binding domain Pfam Description: Myb-like DNA-binding domain
  misc_feature (1)..(388): Homolog of NCBI NO: 22330835 NR Description: transfactor-like; protein id: At3g04030.1, by cDNA: gi_18377832 [Arabidopsis thaliana] AT3g04030/T11I18_14 [Arabidopsis thaliana]
  misc_feature (1)..(388): Homolog of NCBI NO: 6223653 NR Description: transfactor-like [Arabidopsis thaliana]
  misc_feature (1)..(388): Homolog of NCBI NO: 30686726 NR Description: transfactor-related protein [Arabidopsis
  misc_feature (1)..(388): Homolog of NCBI NO: 15238770 NR Description: transfactor-like protein; protein id: supported by cDNA: gi_14596180 [Arabidopsis thaliana]
  misc_feature (1)..(388): Homolog of NCBI NO: 28059694 NR Description: transfactor-like protein [Arabidopsis thaliana]
  misc_feature (1)..(388): Homolog of NCBI NO: 14596181 NR Description: transfactor-like protein [Arabidopsis thaliana]
  misc_feature (1)..(252): Homolog of NCBI NO: 34394528 NR Description: transfactor-like protein [Oryza sativa (japonica
  misc_feature (19)..(273): Homolog of NCBI NO: 18404044 NR Description: transfactor, putative; protein id: At3g24120.1, by cDNA: 6626., supported by cDNA: gi_15215653, supported by gi_20334891 [Arabidopsis thaliana] >gi|15215654|gb|AAK91372.1|
  misc_feature (31)..(268): Homolog of NCBI NO: 18414049 NR Description: putative protein; protein id: At4g13640.1, by cDNA: 38327. [Arabidopsis thaliana]
  misc_feature (31)..(264): Homolog of NCBI NO: 15222366 NR Description: transfactor, putative; protein id: At1g69580.1
MYYQNQHQGKNILSSSRMHITSERHPFLRGNSPGDSGLILSTDAKPRLKWTPDLHERFIEAVNQLGGADKATPKTIMKVMGIPGLTLYHLKSHLQKYRLSKNLNGQANNSFNKIGIMTMMEEKTPDADEIQSENLSIGPQPNKNSPIGEALQMQIEVQRRLHEQLELRIEAQGKYLQSVLEKAQETLGRQNLGAAGIEAAKVQLSELVSKVSAEYPNSSFLEPKELQNLCSQQMQTNYPPDCSLESCLTSSEGTQKNSKMLENNRLGLRTYIGDSTSEQKEIMEEPLFQRMELTWTEGLRGNPYLSTMVSEAEQRISYSERSPGRLSIGVGLHGHKSQHQQGNNEDHKLETRNRKGMDSTTELDLNTHVENYCTTRTKQFDLNGFSWN

SEQ ID NO: 91763 - protein, 371 aa, Arabidopsis thaliana
  peptide (1)..(371): Ceres Seq. ID no. 12729187
  misc_feature (30)..(81): Pfam Name: Myb-like DNA-binding domain Pfam Description: Myb-like DNA-binding domain
  misc_feature (1)..(371): Homolog of NCBI NO: 22330835 NR Description: transfactor-like; protein id: At3g04030.1, by cDNA: gi_18377832 [Arabidopsis thaliana] AT3g04030/T11I18_14 [Arabidopsis thaliana]
  misc_feature (1)..(371): Homolog of NCBI NO: 6223653 NR Description: transfactor-like [Arabidopsis thaliana]
  misc_feature (1)..(371): Homolog of NCBI NO: 30686726 NR Description: transfactor-related protein [Arabidopsis
  misc_feature (1)..(371): Homolog of NCBI NO: 15238770 NR Description: transfactor-like protein; protein id: supported by cDNA: gi_14596180 [Arabidopsis thaliana]
  misc_feature (1)..(371): Homolog of NCBI NO: 28059694 NR Description: transfactor-like protein [Arabidopsis thaliana]
  misc_feature (1)..(371): Homolog of NCBI NO: 14596181 NR Description: transfactor-like protein [Arabidopsis thaliana]
  misc_feature (1)..(235): Homolog of NCBI NO: 34394528 NR Description: transfactor-like protein [Oryza sativa (japonica
  misc_feature (2)..(256): Homolog of NCBI NO: 18404044 NR Description: transfactor, putative; protein id: At3g24120.1, by cDNA: 6626., supported by cDNA: gi_15215653, supported by gi_20334891 [Arabidopsis thaliana] >gi|15215654|gb|AAK91372.1|
  misc_feature (14)..(251): Homolog of NCBI NO: 18414049 NR Description: putative protein; protein id: At4g13640.1, by cDNA: 38327. [Arabidopsis thaliana]
  misc_feature (14)..(247): Homolog of NCBI NO: 15222366 NR Description: transfactor, putative; protein id: At1g69580.1
MHITSERHPFLRGNSPGDSGLILSTDAKPRLKWTPDLHERFIEAVNQLGGADKATPKTIMKVMGIPGLTLYHLKSHLQKYRLSKNLNGQANNSFNKIGIMTMMEEKTPDADEIQSENLSIGPQPNKNSPIGEALQMQIEVQRRLHEQLELRIEAQGKYLQSVLEKAQETLGRQNLGAAGIEAAKVQLSELVSKVSAEYPNSSFLEPKELQNLCSQQMQTNYPPDCSLESCLTSSEGTQKNSKMLENNRLGLRTYIGDSTSEQKEIMEEPLFQRMELTWTEGLRGNPYLSTMVSEAEQRISYSERSPGRLSIGVGLHGHKSQHQQGNNEDHKLETRNRKGMDSTTELDLNTHVENYCTTRTKQFDLNGFSWN

SEQ ID NO: 91764 - protein, 312 aa, Arabidopsis thaliana
  peptide (1)..(312): Ceres Seq. ID no. 12729188
  misc_feature (1)..(312): Homolog of NCBI NO: 22330835 NR Description: transfactor-like; protein id: At3g04030.1, by cDNA: gi_18377832 [Arabidopsis thaliana] AT3g04030/T11I18_14 [Arabidopsis thaliana]
  misc_feature (1)..(312): Homolog of NCBI NO: 6223653 NR Description: transfactor-like [Arabidopsis thaliana]
  misc_feature (1)..(312): Homolog of NCBI NO: 30686726 NR Description: transfactor-related protein [Arabidopsis
  misc_feature (1)..(312): Homolog of NCBI NO: 15238770 NR Description: transfactor-like protein; protein id: supported by cDNA: gi_14596180 [Arabidopsis thaliana]
  misc_feature (1)..(312): Homolog of NCBI NO: 28059694 NR Description: transfactor-like protein [Arabidopsis thaliana]
  misc_feature (1)..(312): Homolog of NCBI NO: 14596181 NR Description: transfactor-like protein [Arabidopsis thaliana]
  misc_feature (1)..(176): Homolog of NCBI NO: 34394528 NR Description: transfactor-like protein [Oryza sativa (japonica
  misc_feature (1)..(197): Homolog of NCBI NO: 18404044 NR Description: transfactor, putative; protein id: At3g24120.1, by cDNA: 6626., supported by cDNA: gi_15215653, supported by gi_20334891 [Arabidopsis thaliana] >gi|15215654|gb|AAK91372.1|
  misc_feature (1)..(192): Homolog of NCBI NO: 18414049 NR Description: putative protein; protein id: At4g13640.1, by cDNA: 38327. [Arabidopsis thaliana]
  misc_feature (1)..(188): Homolog of NCBI NO: 15222366 NR Description: transfactor, putative; protein id: At1g69580.1
MKVMGIPGLTLYHLKSHLQKYRLSKNLNGQANNSFNKIGIMTMMEEKTPDADEIQSENLSIGPQPNKNSPIGEALQMQIEVQRRLHEQLELRIEAQGKYLQSVLEKAQETLGRQNLGAAGIEAAKVQLSELVSKVSAEYPNSSFLEPKELQNLCSQQMQTNYPPDCSLESCLTSSEGTQKNSKMLENNRLGLRTYIGDSTSEQKEIMEEPLFQRMELTWTEGLRGNPYLSTMVSEAEQRISYSERSPGRLSIGVGLHGHKSQHQQGNNEDHKLETRNRKGMDSTTELDLNTHVENYCTTRTKQFDLNGFSWN

SEQ ID NO: 91765 - DNA, 348 bp, Arabidopsis thaliana
  misc_feature (1)..(348): Ceres Seq. ID no. 12729337
  misc_feature: MA Experiment ID: 20000440 Result: Up-regulated in Transcription
  misc_feature: MA Experiment 20000440 PARAMETER Experiment Name: At_Closed-Flower__Sub_P Parameter: Tissue Value: Closed Flower vs. Whole Plant
atggcttccaaggctttagttctgtttggtctatttgcagttcttctcgtcgtcacagaagttgccgctgcatccggtacagtgaagtcagagagtggggaaaccgtgcaacctgatcaatataatggcggtcacggcggcaatggaggctacaacggaggaggaggttacaacggaggaggaggtcacaacggaggaggttacaacggaggaggaggatacaatggaggaggacacggaggaagacatggttactgtcgctatggctgttgctacagaggttaccatggctgttcaaggtgttgttcgtatgctggagaagctgttcagactcagcctggtcactaa

SEQ ID NO: 91766 - protein, 115 aa, Arabidopsis thaliana
  peptide (1)..(115): Ceres Seq. ID no. 12729338
  misc_feature (44)..(102): Pfam Name: Keratin Pfam Description: Keratin
  misc_feature (1)..(115): Homolog of NCBI NO: 15224559 NR Description: putative glycine-rich protein; protein id:
  misc_feature (1)..(115): Homolog of NCBI NO: 18266043 NR Description: glycine-rich protein [Brassica oleracea]
  misc_feature (1)..(115): Homolog of NCBI NO: 4206767 NR Description: glycine-rich protein 3 short isoform [Arabidopsis
  misc_feature (1)..(115): Homolog of NCBI NO: 18396043 NR Description: expressed protein; protein id: At2g05380.1, by cDNA: gi_15146251, supported by cDNA: gi_20466661, supported cDNA: gi_4206766 [Arabidopsis thaliana]
  misc_feature (1)..(115): Homolog of NCBI NO: 20466662 NR Description: unknown protein [Arabidopsis thaliana]
  misc_feature (1)..(113): Homolog of NCBI NO: 15224560 NR Description: putative glycine-rich protein; protein id: supported by cDNA: gi_15215617, supported by cDNA: gi_15529156, by cDNA: gi_20334893 [Arabidopsis thaliana]
  misc_feature (41)..(115): Homolog of NCBI NO: 81625 NR Description: glycine-rich protein 3 precursor - Arabidopsis
  misc_feature (41)..(115): Homolog of NCBI NO: 259447 NR Description: glycine-rich protein; atGRP [Arabidopsis thaliana]
  misc_feature (1)..(114): Homolog of NCBI NO: 15224540 NR Description: putative glycine-rich protein; protein id: supported by cDNA: 105261. [Arabidopsis thaliana]
  misc_feature (41)..(115): Homolog of NCBI NO: 15224548 NR Description: putative glycine-rich protein; protein id: supported by cDNA: gi_17473738, supported by cDNA: gi_20148476
MASKALVLFGLFAVLLVVTEVAAASGTVKSESGETVQPDQYNGGHGGNGGYNGGGGYNGGGGHNGGGYNGGGGYNGGGHGGRHGYCRYGCCYRGYHGCSRCCSYAGEAVQTQPGH

SEQ ID NO: 91767 - protein, 74 aa, Arabidopsis thaliana
  peptide (1)..(74): Ceres Seq. ID no. 12729339
  misc_feature (10)..(73): Homolog of NCBI NO: 25411166 NR Description: hypothetical protein At2g05380 [imported] -
MAVTAAMEATTEEEVTTEEEVTTEEVTTEEEDTMEEDTEEDMVTVAMAVATEVTMAVQGVVRMLEKLFRLSLVT

SEQ ID NO: 91768 - protein, 68 aa, Arabidopsis thaliana
  peptide (1)..(68): Ceres Seq. ID no. 12729340
  misc_feature (4)..(67): Homolog of NCBI NO: 25411166 NR Description: hypothetical protein At2g05380 [imported] -
MEATTEEEVTTEEEVTTEEVTTEEEDTMEEDTEEDMVTVAMAVATEVTMAVQGVVRMLEKLFRLSLVT

SEQ ID NO: 91769 - DNA, 1422 bp, Arabidopsis thaliana
  misc_feature (1)..(1422): Ceres Seq. ID no. 12729358
  misc_feature: MA Experiment ID: 108576 Result: Down-regulated in Transcription
  misc_feature: MA Experiment 108576 PARAMETER Experiment Name: At_42deg_Heat_cDNA_P Parameter: Temperature (deg C) Value: 42 vs. 22
  misc_feature: MA Experiment 108576 PARAMETER Experiment Name: At_42deg_Heat_cDNA_P Parameter: Timepoint (hr) Value: 1
  misc_feature: MA Experiment 108576 PARAMETER Experiment Name: At_42deg_Heat_cDNA_P Parameter: Tissue Value: Aerial
  misc_feature: MA Experiment ID: 108668 Result: Down-regulated in Transcription
  misc_feature: MA Experiment 108668 PARAMETER Experiment Name: At_2mM_SA_cDNA_P Parameter: Plant Line Value: WS
  misc_feature: MA Experiment 108668 PARAMETER Experiment Name: At_2mM_SA_cDNA_P Parameter: Timepoint (hr) Value: 6
  misc_feature: MA Experiment 108668 PARAMETER Experiment Name: At_2mM_SA_cDNA_P Parameter: Treatment Value: 2mM SA vs. No Treatment
atggatctcctcacaccactcatcttcctcctcctcctcctctcaccattttcactctcagatgctggttccatcggagtaaactacggccgaatctccgacgaactcccctccgcattcaaagtagtccaactactaaaatcccaaggaatcacgcgagtcaaaatcttcgacgcagacccatcagttctcaaagcattatccggatctggaatcaaagtcaccgtagatctccccaacgagttactcttctccgccgccaaaagaacttccttcgccgtctcatgggtcaaacgcaacgtagcagcttatcatccttcaacacagatcgaatcaatagctgttggtaacgaagtcttcgttgatacacacaacactacaagcttcttgatccctgcaatgagaaacattcacaaagctcttatgagtttcaatctccactccgacattaaaatctcttctcctcttgctttaagcgctcttcaaaactcttacccttcttcctccggttctttccgaccagaacttattgactctgttatcaaaccaatgcttgacttcttacgtgaaactggttcaagacttatgatcaatgtctatcctttctttgcttatgaaggaaactctgacgtcattcctttagattatgctttgcttagagagaatccaggaatggttgattctggtaatggtttgagatactttaatctcttcgacgctcaaatcgacgccgttttcgcagcaatgtcggctttaaagtacgatgatatcgaaatcattgtcacggaaactggttggccgtcgaaaggagatgagaatgaagtcggagctactctagctaacgcagcttcttacaacggaaacttaatccgtcggatcttgacacgtggaggtacaccgttacgtcctaaagcagatctaacggtctatcttttcgctctgttcaacgagaacaagaagttaggtccaacgtcggagagaaactatggtctcttcttccctgatgagaagaaagtctacgacattcctttcacaacagaggggttgaaacattaccgtgacggtggtcatactccggtcactggaggagatcaggttacaaagcctccgatgagtggaggcgtgtcgaagagtttgaatggttatacttggtgtgtagctaatggtgatgctggtgaagaaaggttacaaggtggtttagattatgcttgtggtgaaggtggtgctgattgtcgtcctattcaacctggtgctaactgttatagtcctgatacacttgaggctcacgcttcgtttgctttcaatagttattaccagaagaagggtcgtgccggtgggagttgttacttcggcggcgccgcttacgtcgttagccaaccaccgagtaagtataactttttttttgtgtgtggcgcatgttaa

SEQ ID NO: 91770 - protein, 473 aa, Arabidopsis thaliana
  peptide (1)..(473): Ceres Seq. ID no. 12729359
  misc_feature (25)..(344): Pfam Name: Glycosyl hydrolases family 17 Pfam Description: Glycosyl hydrolases family 17
  misc_feature (1)..(473): Homolog of NCBI NO: 25316444 NR Description: probable beta-1,3-glucanase [imported] -
  misc_feature (1)..(464): Homolog of NCBI NO: 30678225 NR Description: glycosyl hydrolase family 17 [Arabidopsis
  misc_feature (8)..(467): Homolog of NCBI NO: 9758115 NR Description: beta-1,3-glucanase-like protein [Arabidopsis
  misc_feature (8)..(464): Homolog of NCBI NO: 18423719 NR Description: glycosyl hydrolase family 17; protein id: supported by cDNA: 7119., supported by cDNA: gi_18700154
  misc_feature (8)..(464): Homolog of NCBI NO: 18700155 NR Description: AT5g55180/MCO15_13 [Arabidopsis thaliana]
  misc_feature (8)..(464): Homolog of NCBI NO: 21594590 NR Description: beta-1,3-glucanase-like protein [Arabidopsis
  misc_feature (10)..(464): Homolog of NCBI NO: 11071974 NR Description: elicitor inducible beta-1,3-glucanase Nt-SubE76
  misc_feature (12)..(461): Homolog of NCBI NO: 15236882 NR Description: glycosyl hydrolase family 17; protein id:
  misc_feature (7)..(351): Homolog of NCBI NO: 27529826 NR Description: beta-1,3-glucanase-like protein [Nicotiana
  misc_feature (6)..(348): Homolog of NCBI NO: 11279331 NR Description: beta-1,3-glucanase (EC 3.2.1.-) precursor
MDLLTPLIFLLLLLSPFSLSDAGSIGVNYGRISDELPSAFKVVQLLKSQGITRVKIFDADPSVLKALSGSGIKVTVDLPNELLFSAAKRTSFAVSWVKRNVAAYHPSTQIESIAVGNEVFVDTHNTTSFLIPAMRNIHKALMSFNLHSDIKISSPLALSALQNSYPSSSGSFRPELIDSVIKPMLDFLRETGSRLMINVYPFFAYEGNSDVIPLDYALLRENPGMVDSGNGLRYFNLFDAQIDAVFAAMSALKYDDIEIIVTETGWPSKGDENEVGATLANAASYNGNLIRRILTRGGTPLRPKADLTVYLFALFNENKKLGPTSERNYGLFFPDEKKVYDIPFTTEGLKHYRDGGHTPVTGGDQVTKPPMSGGVSKSLNGYTWCVANGDAGEERLQGGLDYACGEGGADCRPIQPGANCYSPDTLEAHASFAFNSYYQKKGRAGGSCYFGGAAYVVSQPPSKYNFFFVCGAC

SEQ ID NO: 91771 - protein, 340 aa, Arabidopsis thaliana
  peptide (1)..(340): Ceres Seq. ID no. 12729360
  misc_feature (1)..(211): Pfam Name: Glycosyl hydrolases family 17 Pfam Description: Glycosyl hydrolases family 17
  misc_feature (1)..(340): Homolog of NCBI NO: 25316444 NR Description: probable beta-1,3-glucanase [imported] -
  misc_feature (1)..(331): Homolog of NCBI NO: 30678225 NR Description: glycosyl hydrolase family 17 [Arabidopsis
  misc_feature (1)..(334): Homolog of NCBI NO: 9758115 NR Description: beta-1,3-glucanase-like protein [Arabidopsis
  misc_feature (1)..(331): Homolog of NCBI NO: 18423719 NR Description: glycosyl hydrolase family 17; protein id: supported by cDNA: 7119., supported by cDNA: gi_18700154
  misc_feature (1)..(331): Homolog of NCBI NO: 18700155 NR Description: AT5g55180/MCO15_13 [Arabidopsis thaliana]
  misc_feature (1)..(331): Homolog of NCBI NO: 21594590 NR Description: beta-1,3-glucanase-like protein [Arabidopsis
  misc_feature (1)..(331): Homolog of NCBI NO: 11071974 NR Description: elicitor inducible beta-1,3-glucanase Nt-SubE76
  misc_feature (1)..(328): Homolog of NCBI NO: 15236882 NR Description: glycosyl hydrolase family 17; protein id:
  misc_feature (1)..(218): Homolog of NCBI NO: 27529826 NR Description: beta-1,3-glucanase-like protein [Nicotiana
  misc_feature (1)..(215): Homolog of NCBI NO: 11279331 NR Description: beta-1,3-glucanase (EC 3.2.1.-) precursor
MRNIHKALMSFNLHSDIKISSPLALSALQNSYPSSSGSFRPELIDSVIKPMLDFLRETGSRLMINVYPFFAYEGNSDVIPLDYALLRENPGMVDSGNGLRYFNLFDAQIDAVFAAMSALKYDDIEIIVTETGWPSKGDENEVGATLANAASYNGNLIRRILTRGGTPLRPKADLTVYLFALFNENKKLGPTSERNYGLFFPDEKKVYDIPFTTEGLKHYRDGGHTPVTGGDQVTKPPMSGGVSKSLNGYTWCVANGDAGEERLQGGLDYACGEGGADCRPIQPGANCYSPDTLEAHASFAFNSYYQKKGRAGGSCYFGGAAYVVSQPPSKYNFFFVCGAC

SEQ ID NO: 91772 - protein, 332 aa, Arabidopsis thaliana
  peptide (1)..(332): Ceres Seq. ID no. 12729361
  misc_feature (1)..(203): Pfam Name: Glycosyl hydrolases family 17 Pfam Description: Glycosyl hydrolases family 17
  misc_feature (1)..(332): Homolog of NCBI NO: 25316444 NR Description: probable beta-1,3-glucanase [imported] -
  misc_feature (1)..(323): Homolog of NCBI NO: 30678225 NR Description: glycosyl hydrolase family 17 [Arabidopsis
  misc_feature (1)..(326): Homolog of NCBI NO: 9758115 NR Description: beta-1,3-glucanase-like protein [Arabidopsis
  misc_feature (1)..(323): Homolog of NCBI NO: 18423719 NR Description: glycosyl hydrolase family 17; protein id: supported by cDNA: 7119., supported by cDNA: gi_18700154
  misc_feature (1)..(323): Homolog of NCBI NO: 18700155 NR Description: AT5g55180/MCO15_13 [Arabidopsis thaliana]
  misc_feature (1)..(323): Homolog of NCBI NO: 21594590 NR Description: beta-1,3-glucanase-like protein [Arabidopsis
  misc_feature (1)..(323): Homolog of NCBI NO: 11071974 NR Description: elicitor inducible beta-1,3-glucanase Nt-SubE76
  misc_feature (1)..(320): Homolog of NCBI NO: 15236882 NR Description: glycosyl hydrolase family 17; protein id:
  misc_feature (1)..(210): Homolog of NCBI NO: 27529826 NR Description: beta-1,3-glucanase-like protein [Nicotiana
  misc_feature (1)..(207): Homolog of NCBI NO: 11279331 NR Description: beta-1,3-glucanase (EC 3.2.1.-) precursor
MSFNLHSDIKISSPLALSALQNSYPSSSGSFRPELIDSVIKPMLDFLRETGSRLMINVYPFFAYEGNSDVIPLDYALLRENPGMVDSGNGLRYFNLFDAQIDAVFAAMSALKYDDIEIIVTETGWPSKGDENEVGATLANAASYNGNLIRRILTRGGTPLRPKADLTVYLFALFNENKKLGPTSERNYGLFFPDEKKVYDIPFTTEGLKHYRDGGHTPVTGGDQVTKPPMSGGVSKSLNGYTWCVANGDAGEERLQGGLDYACGEGGADCRPIQPGANCYSPDTLEAHASFAFNSYYQKKGRAGGSCYFGGAAYVVSQPPSKYNFFFVCGAC

SEQ ID NO: 91773 - DNA, 1583 bp, Arabidopsis thaliana
  misc_feature (1)..(1583): Ceres Seq. ID no. 12729365
  misc_feature: MA Experiment ID: 20000355 Result: Up-regulated in Transcription
  misc_feature: MA Experiment 20000355 PARAMETER Experiment Name: At_Siliques_Sub_P Parameter: Age (day) Value: 21
  misc_feature: MA Experiment 20000355 PARAMETER Experiment Name: At_Siliques_Sub_P Parameter: Organism Value: A. thaliana
  misc_feature: MA Experiment 20000355 PARAMETER Experiment Name: At_Siliques_Sub_P Parameter: Plant Line Value: WS
  misc_feature: MA Experiment 20000355 PARAMETER Experiment Name: At_Siliques_Sub_P Parameter: Tissue Value: Less Than 5mm Siliques vs. Whole Plant
atctctctcgtactcagaaataatagaatgggaaaacaacaagattggtccgtgaccgcttgtattttcctatcgttgtctctagcatcacaaatccattgtagtagccaaacacattttccaagccacaagggaggagctggtttgtcaggtgacacaagccacttcaattctgttagtcgcgaaaatgtgctttcgcttaaggagaaagatctaatcgagaagctccccggacaaccttccggcattagtttcagacagtacggtggttatgtggccgtaaacgaaccagccactcggtttttgtactattattttgtggaagccatcaaacctagtaaatctactcctcttgtgctctggttcaacggaggaccggggtgctcatctgtaggatttggggcatttgaagagcttggtccatttcgcgtacatagcgatggcaaaacgctttaccgcaatccttattcatggaacaacgaggcgaacatgttgttcttcgaagggccaataagtgtaggattctcgtactcgagtactccttttgattgggagatatttggggaacaagcggataagctaacagcagaggataactacatgttcttggtgaattggcttgaaaggtttccggaatataaaggacgagacgtttacatctccggtcagagttacgctggccactatattccccaactggcccagatcatccttcaccgtaacaaccaaaccttcatcaatctacgaggcatttcgatcggtaatccaggtctcgatttacttatcgaggctgataatgagaataaatttattttaagtcatggtttggtttcccaaaaagattttgaagagtacagtaaagtctgcgattttgccaactatgatatggacgaatgcccaaagataatgcctaaatttagtattgaacataacaaacacttggacgtttacaacatatacgctcccgtgtgcctaaactccacgttaagcagcgaacccaagaaatgcaccacaataatggaggttgatccgtgccgttccaactacgtgaaggcttatcttaacagcgaaaatgttcaagaagcgatgcatgccaacaccacaaaattaccgtacgagtggaaggcttgcaatcactacttgaattccgtatggatcgacgctgataaagatgcctcaatggttcctatccttcacgacctgatgggtgagggtgtccgagtattggtgtatagtggggacgtggatgcggctattccgtttacagctacaatggccgtgctgaagacgatgaatctaacggttgtaaacgaatggcgtccgtggtttaccggaggacaactgggagggttcacagaggattacgaacggaacttaacgtatgcaactgtgaaaggatcaggtcattctgttcctttggaccaacctgtacatgctcttaatctatttaccagtttcatccgtaacactcctctccctcaaacaccctgatttgtaacatgtaccacctctattgactgatcaagatactttggtttatagatggatttgatgtttcgtgtaactaaagtcaatattctact

SEQ ID NO: 91774 - protein, 496 aa, Arabidopsis thaliana
  peptide (1)..(496): Ceres Seq. ID no. 12729366
  misc_feature (77)..(489): Pfam Name: Serine carboxypeptidase Pfam Description: Serine carboxypeptidase
  misc_feature (10)..(496): Homolog of NCBI NO: 15224995 NR Description: putative serine carboxypeptidase II; protein id:
  misc_feature (10)..(495): Homolog of NCBI NO: 15231099 NR Description: serine-type carboxypeptidase like protein;
  misc_feature (10)..(495): Homolog of NCBI NO: 15231101 NR Description: serine-type carboxypeptidase-like protein;
  misc_feature (46)..(495): Homolog of NCBI NO: 28393031 NR Description: putative serine-type carboxypeptidase
  misc_feature (10)..(496): Homolog of NCBI NO: 15231103 NR Description: serine-type carboxypeptidase-like protein;
  misc_feature (9)..(495): Homolog of NCBI NO: 15229439 NR Description: serin carboxypeptidase - like protein; protein
  misc_feature (67)..(493): Homolog of NCBI NO: 11967861 NR Description: putative serine carboxypeptidase [Pisum sativum]
  misc_feature (67)..(487): Homolog of NCBI NO: 34329345 NR Description: putative serine carboxypeptidase [Medicago
  misc_feature (68)..(493): Homolog of NCBI NO: 1706082 NR Description: Serine carboxypeptidase II-3 precursor (CP-MII.3)
  misc_feature (68)..(493): Homolog of NCBI NO: 34899032 NR Description: putative serine carboxypeptidase II-3 precursor
ISLVLRNNRMGKQQDWSVTACIFLSLSLASQIHCSSQTHFPSHKGGAGLSGDTSHFNSVSRENVLSLKEKDLIEKLPGQPSGISFRQYGGYVAVNEPATRFLYYYFVEAIKPSKSTPLVLWFNGGPGCSSVGFGAFEELGPFRVHSDGKTLYRNPYSWNNEANMLFFEGPISVGFSYSSTPFDWEIFGEQADKLTAEDNYMFLVNWLERFPEYKGRDVYISGQSYAGHYIPQLAQIILHRNNQTFINLRGISIGNPGLDLLIEADNENKFILSHGLVSQKDFEEYSKVCDFANYDMDECPKIMPKFSIEHNKHLDVYNIYAPVCLNSTLSSEPKKCTTIMEVDPCRSNYVKAYLNSENVQEAMHANTTKLPYEWKACNHYLNSVWIDADKDASMVPILHDLMGEGVRVLVYSGDVDAAIPFTATMAVLKTMNLTVVNEWRPWFTGGQLGGFTEDYERNLTYATVKGSGHSVPLDQPVHALNLFTSFIRNTPLPQTP

SEQ ID NO: 91775 - protein, 487 aa, Arabidopsis thaliana
  peptide (1)..(487): Ceres Seq. ID no. 12729367
  misc_feature (68)..(480): Pfam Name: Serine carboxypeptidase Pfam Description: Serine carboxypeptidase
  misc_feature (1)..(487): Homolog of NCBI NO: 15224995 NR Description: putative serine carboxypeptidase II; protein id:
  misc_feature (1)..(486): Homolog of NCBI NO: 15231099 NR Description: serine-type carboxypeptidase like protein;
  misc_feature (1)..(486): Homolog of NCBI NO: 15231101 NR Description: serine-type carboxypeptidase-like protein;
  misc_feature (37)..(486): Homolog of NCBI NO: 28393031 NR Description: putative serine-type carboxypeptidase
  misc_feature (1)..(487): Homolog of NCBI NO: 15231103 NR Description: serine-type carboxypeptidase-like protein;
  misc_feature (1)..(486): Homolog of NCBI NO: 15229439 NR Description: serin carboxypeptidase - like protein; protein
  misc_feature (58)..(484): Homolog of NCBI NO: 11967861 NR Description: putative serine carboxypeptidase [Pisum sativum]
  misc_feature (58)..(478): Homolog of NCBI NO: 34329345 NR Description: putative serine carboxypeptidase [Medicago
  misc_feature (59)..(484): Homolog of NCBI NO: 1706082 NR Description: Serine carboxypeptidase II-3 precursor (CP-MII.3)
  misc_feature (59)..(484): Homolog of NCBI NO: 34899032 NR Description: putative serine carboxypeptidase II-3 precursor
MGKQQDWSVTACIFLSLSLASQIHCSSQTHFPSHKGGAGLSGDTSHFNSVSRENVLSLKEKDLIEKLPGQPSGISFRQYGGYVAVNEPATRFLYYYFVEAIKPSKSTPLVLWFNGGPGCSSVGFGAFEELGPFRVHSDGKTLYRNPYSWNNEANMLFFEGPISVGFSYSSTPFDWEIFGEQADKLTAEDNYMFLVNWLERFPEYKGRDVYISGQSYAGHYIPQLAQIILHRNNQTFINLRGISIGNPGLDLLIEADNENKFILSHGLVSQKDFEEYSKVCDFANYDMDECPKIMPKFSIEHNKHLDVYNIYAPVCLNSTLSSEPKKCTTIMEVDPCRSNYVKAYLNSENVQEAMHANTTKLPYEWKACNHYLNSVWIDADKDASMVPILHDLMGEGVRVLVYSGDVDAAIPFTATMAVLKTMNLTVVNEWRPWFTGGQLGGFTEDYERNLTYATVKGSGHSVPLDQPVHALNLFTSFIRNTPLPQTP

SEQ ID NO: 91776 - protein, 333 aa, Arabidopsis thaliana
  peptide (1)..(333): Ceres Seq. ID no. 12729368
  misc_feature (1)..(326): Pfam Name: Serine carboxypeptidase Pfam Description: Serine carboxypeptidase
  misc_feature (1)..(333): Homolog of NCBI NO: 15224995 NR Description: putative serine carboxypeptidase II; protein id:
  misc_feature (1)..(332): Homolog of NCBI NO: 15231099 NR Description: serine-type carboxypeptidase like protein;
  misc_feature (1)..(332): Homolog of NCBI NO: 15231101 NR Description: serine-type carboxypeptidase-like protein;
  misc_feature (1)..(332): Homolog of NCBI NO: 28393031 NR Description: putative serine-type carboxypeptidase
  misc_feature (1)..(333): Homolog of NCBI NO: 15231103 NR Description: serine-type carboxypeptidase-like protein;
  misc_feature (1)..(332): Homolog of NCBI NO: 15229439 NR Description: serin carboxypeptidase - like protein; protein
  misc_feature (1)..(330): Homolog of NCBI NO: 11967861 NR Description: putative serine carboxypeptidase [Pisum sativum]
  misc_feature (1)..(324): Homolog of NCBI NO: 34329345 NR Description: putative serine carboxypeptidase [Medicago
  misc_feature (1)..(330): Homolog of NCBI NO: 1706082 NR Description: Serine carboxypeptidase II-3 precursor (CP-MII.3)
  misc_feature (1)..(330): Homolog of NCBI NO: 34899032 NR Description: putative serine carboxypeptidase II-3 precursor
MLFFEGPISVGFSYSSTPFDWEIFGEQADKLTAEDNYMFLVNWLERFPEYKGRDVYISGQSYAGHYIPQLAQIILHRNNQTFINLRGISIGNPGLDLLIEADNENKFILSHGLVSQKDFEEYSKVCDFANYDMDECPKIMPKFSIEHNKHLDVYNIYAPVCLNSTLSSEPKKCTTIMEVDPCRSNYVKAYLNSENVQEAMHANTTKLPYEWKACNHYLNSVWIDADKDASMVPILHDLMGEGVRVLVYSGDVDAAIPFTATMAVLKTMNLTVVNEWRPWFTGGQLGGFTEDYERNLTYATVKGSGHSVPLDQPVHALNLFTSFIRNTPLPQTP

SEQ ID NO: 91777 - DNA, 1407 bp, Arabidopsis thaliana
  misc_feature (1)..(1407): Ceres Seq. ID no. 12729409
  misc_feature: MA Experiment ID: 20000314 Result: Up-regulated in Transcription
  misc_feature: MA Experiment 20000314 PARAMETER Experiment Name: At_14day_Shoots-Roots_Sub_P Parameter: Age (day) Value: 14
  misc_feature: MA Experiment 20000314 PARAMETER Experiment Name: At_14day_Shoots-Roots_Sub_P Parameter: Organism Value: A. thaliana
  misc_feature: MA Experiment 20000314 PARAMETER Experiment Name: At_14day_Shoots-Roots_Sub_P Parameter: Plant Line Value: WS
  misc_feature: MA Experiment 20000314 PARAMETER Experiment Name: At_14day_Shoots-Roots_Sub_P Parameter: Tissue Value: Roots vs. Whole Plant
  misc_feature: MA Experiment ID: 20000440 Result: Down-regulated in Transcription
  misc_feature: MA Experiment 20000440 PARAMETER Experiment Name: At_Closed-Flower__Sub_P Parameter: Tissue Value: Closed Flower vs. Whole Plant
atggtatcgtctcgggccgttgtgatggccattatggtattggtcacagtgcagtggttggtttttgctgaaggttatccggaagaagacttggtggccaggctacctggtcaaccaaacgtcgggttcagacaatttgctggatatgtcgatgtggactcggaaaatggtcgtagtcttttttactactacgtggaggctgtaaaagaacctgacactaagcccttaaccctttggctcaatggaggtccaggttgttcttcagttggtggaggagctttcactgagttaggtccattttatcctacgggcgatggccgtggccttcgcttgaactccatgtcttggaacaaagcttcgaacttgttatttgtggagtcaccagccggagtaggatggtcatactctaacagaagttcggattacaacactggggacaagtctactgtcaatgatatgcttgtgttcttgttgagatggttcaacaagttcccagagttgaagtctcgcgacctctttctcactggcgaaagctacgcagggcattacatacctcaactggctgatgtgatactcagctacaattcacgctcaagtgggttcaaatttaacgtcaaaggcattgcaattgggaatccacttctgaagcttgacagggactttgcagctgcatacgagtacttctggtcacatgggatgatctctgatgaagtaagactcacaatcatgaaccaatgtgactttgccaatccaaagaacatgagcaatgcttgtatatatgcaatcgttgaatccagcgtcctcactgagtatatcaacagctatcacattctcctcgatgtatgttacccttctattgttcagcaagagctaaggctcaagaaaatggttaccaagattagcatggtagttgatgtttgtataacatatgaaagaagtttctatttcaatctccccaaggtacagaatgcgcttcacgctaaccgcactcgcctaccttatgaatggactatgtgcagcaaccggttaaactacagtggcatagacgggtacattgacatgcttccgagtcttaagagaattattcagaaccaaactcctgtttggatcttcagtggagatcaagattctgtaattccacttcaaagttcaagaacactcgtacgagaacttgctgaggatctcaacttcaagaccactattccctatggagcttggttccacaaagaacaggttggtggctgggtcacagagtatgggaatctactgacctttgcaacggtgagaggagcggctcatatggtgccgtatgcggagccctcacgagctctgcacatgttcagtagctttatgaatggccggagattgcccaacaaaccagatttaaagtcttctactgatgattga

SEQ ID NO: 91778 - protein, 468 aa, Arabidopsis thaliana
  peptide (1)..(468): Ceres Seq. ID no. 12729410
  misc_feature (36)..(453): Pfam Name: Serine carboxypeptidase Pfam Description: Serine carboxypeptidase
  misc_feature (1)..(468): Homolog of NCBI NO: 15224454 NR Description: putative serine carboxypeptidase II; protein id: [Arabidopsis thaliana] >gi|25289797|pir||D84503 probable serine
  misc_feature (1)..(296): Homolog of NCBI NO: 28393789 NR Description: putative serine carboxypeptidase II [Arabidopsis
  misc_feature (280)..(468): Homolog of NCBI NO: 28393789 NR Description: putative serine carboxypeptidase II [Arabidopsis
  misc_feature (2)..(468): Homolog of NCBI NO: 15238328 NR Description: serine carboxypeptidase II-like; protein id:
  misc_feature (1)..(462): Homolog of NCBI NO: 15238327 NR Description: serine carboxypeptidase-II like; protein id:
  misc_feature (5)..(459): Homolog of NCBI NO: 15218514 NR Description: serine carboxypeptidase II, putative; protein id:
  misc_feature (10)..(459): Homolog of NCBI NO: 30685740 NR Description: serine carboxypeptidase -related [Arabidopsis >gi|18377727|gb|AAL67013.1| putative serine carboxypeptidase II
  misc_feature (10)..(459): Homolog of NCBI NO: 25289793 NR Description: probable serine carboxypeptidase II [imported] - thaliana >gi|2459435|gb|AAB80670.1| putative serine
  misc_feature (30)..(459): Homolog of NCBI NO: 18396647 NR Description: serine carboxypeptidase II, putative; protein id: supported by cDNA: gi_16648968 [Arabidopsis thaliana]
  misc_feature (30)..(459): Homolog of NCBI NO: 25289785 NR Description: probable serine carboxypeptidase II [imported] - thaliana >gi|12322985|gb|AAG51475.1|AC069471_6 serine
MVSSRAVVMAIMVLVTVQWLVFAEGYPEEDLVARLPGQPNVGFRQFAGYVDVDSENGRSLFYYYVEAVKEPDTKPLTLWLNGGPGCSSVGGGAFTELGPFYPTGDGRGLRLNSMSWNKASNLLFVESPAGVGWSYSNRSSDYNTGDKSTVNDMLVFLLRWFNKFPELKSRDLFLTGESYAGHYIPQLADVILSYNSRSSGFKFNVKGIAIGNPLLKLDRDFAAAYEYFWSHGMISDEVRLTIMNQCDFANPKNMSNACIYAIVESSVLTEYINSYHILLDVCYPSIVQQELRLKKMVTKISMVVDVCITYERSFYFNLPKVQNALHANRTRLPYEWTMCSNRLNYSGIDGYIDMLPSLKRIIQNQTPVWIFSGDQDSVIPLQSSRTLVRELAEDLNFKTTIPYGAWFHKEQVGGWVTEYGNLLTFATVRGAAHMVPYAEPSRALHMFSSFMNGRRLPNKPDLKSSTDD

SEQ ID NO: 91779 - protein, 460 aa, Arabidopsis thaliana
  peptide (1)..(460): Ceres Seq. ID no. 12729411
  misc_feature (28)..(445): Pfam Name: Serine carboxypeptidase Pfam Description: Serine carboxypeptidase
  misc_feature (1)..(460): Homolog of NCBI NO: 15224454 NR Description: putative serine carboxypeptidase II; protein id: [Arabidopsis thaliana] >gi|25289797|pir||D84503 probable serine
  misc_feature (1)..(288): Homolog of NCBI NO: 28393789 NR Description: putative serine carboxypeptidase II [Arabidopsis
  misc_feature (272)..(460): Homolog of NCBI NO: 28393789 NR Description: putative serine carboxypeptidase II [Arabidopsis
  misc_feature (1)..(460): Homolog of NCBI NO: 15238328 NR Description: serine carboxypeptidase II-like; protein id:
  misc_feature (1)..(454): Homolog of NCBI NO: 15238327 NR Description: serine carboxypeptidase-II like; protein id:
  misc_feature (1)..(451): Homolog of NCBI NO: 15218514 NR Description: serine carboxypeptidase II, putative; protein id:
  misc_feature (2)..(451): Homolog of NCBI NO: 30685740 NR Description: serine carboxypeptidase -related [Arabidopsis >gi|18377727|gb|AAL67013.1| putative serine carboxypeptidase II
  misc_feature (2)..(451): Homolog of NCBI NO: 25289793 NR Description: probable serine carboxypeptidase II [imported] - thaliana >gi|2459435|gb|AAB80670.1| putative serine
  misc_feature (22)..(451): Homolog of NCBI NO: 18396647 NR Description: serine carboxypeptidase II, putative; protein id: supported by cDNA: gi_16648968 [Arabidopsis thaliana]
  misc_feature (22)..(451): Homolog of NCBI NO: 25289785 NR Description: probable serine carboxypeptidase II [imported] - thaliana >gi|12322985|gb|AAG51475.1|AC069471_6 serine
MAIMVLVTVQWLVFAEGYPEEDLVARLPGQPNVGFRQFAGYVDVDSENGRSLFYYYVEAVKEPDTKPLTLWLNGGPGCSSVGGGAFTELGPFYPTGDGRGLRLNSMSWNKASNLLFVESPAGVGWSYSNRSSDYNTGDKSTVNDMLVFLLRWFNKFPELKSRDLFLTGESYAGHYIPQLADVILSYNSRSSGFKFNVKGIAIGNPLLKLDRDFAAAYEYFWSHGMISDEVRLTIMNQCDFANPKNMSNACIYAIVESSVLTEYINSYHILLDVCYPSIVQQELRLKKMVTKISMVVDVCITYERSFYFNLPKVQNALHANRTRLPYEWTMCSNRLNYSGIDGYIDMLPSLKRIIQNQTPVWIFSGDQDSVIPLQSSRTLVRELAEDLNFKTTIPYGAWFHKEQVGGWVTEYGNLLTFATVRGAAHMVPYAEPSRALHMFSSFMNGRRLPNKPDLKSSTDD

SEQ ID NO: 91780 - protein, 457 aa, Arabidopsis thaliana
  peptide (1)..(457): Ceres Seq. ID no. 12729412
  misc_feature (25)..(442): Pfam Name: Serine carboxypeptidase Pfam Description: Serine carboxypeptidase
  misc_feature (1)..(457): Homolog of NCBI NO: 15224454 NR Description: putative serine carboxypeptidase II; protein id: [Arabidopsis thaliana] >gi|25289797|pir||D84503 probable serine
  misc_feature (1)..(285): Homolog of NCBI NO: 28393789 NR Description: putative serine carboxypeptidase II [Arabidopsis
  misc_feature (269)..(457): Homolog of NCBI NO: 28393789 NR Description: putative serine carboxypeptidase II [Arabidopsis
  misc_feature (1)..(457): Homolog of NCBI NO: 15238328 NR Description: serine carboxypeptidase II-like; protein id:
  misc_feature (1)..(451): Homolog of NCBI NO: 15238327 NR Description: serine carboxypeptidase-II like; protein id:
  misc_feature (1)..(448): Homolog of NCBI NO: 15218514 NR Description: serine carboxypeptidase II, putative; protein id:
  misc_feature (1)..(448): Homolog of NCBI NO: 30685740 NR Description: serine carboxypeptidase -related [Arabidopsis >gi|18377727|gb|AAL67013.1| putative serine carboxypeptidase II
  misc_feature (1)..(448): Homolog of NCBI NO: 25289793 NR Description: probable serine carboxypeptidase II [imported] - thaliana >gi|2459435|gb|AAB80670.1| putative serine
  misc_feature (19)..(448): Homolog of NCBI NO: 18396647 NR Description: serine carboxypeptidase II, putative; protein id: supported by cDNA: gi_16648968 [Arabidopsis thaliana]
  misc_feature (19)..(448): Homolog of NCBI NO: 25289785 NR Description: probable serine carboxypeptidase II [imported] - thaliana >gi|12322985|gb|AAG51475.1|AC069471_6 serine
MVLVTVQWLVFAEGYPEEDLVARLPGQPNVGFRQFAGYVDVDSENGRSLFYYYVEAVKEPDTKPLTLWLNGGPGCSSVGGGAFTELGPFYPTGDGRGLRLNSMSWNKASNLLFVESPAGVGWSYSNRSSDYNTGDKSTVNDMLVFLLRWFNKFPELKSRDLFLTGESYAGHYIPQLADVILSYNSRSSGFKFNVKGIAIGNPLLKLDRDFAAAYEYFWSHGMISDEVRLTIMNQCDFANPKNMSNACIYAIVESSVLTEYINSYHILLDVCYPSIVQQELRLKKMVTKISMVVDVCITYERSFYFNLPKVQNALHANRTRLPYEWTMCSNRLNYSGIDGYIDMLPSLKRIIQNQTPVWIFSGDQDSVIPLQSSRTLVRELAEDLNFKTTIPYGAWFHKEQVGGWVTEYGNLLTFATVRGAAHMVPYAEPSRALHMFSSFMNGRRLPNKPDLKSSTDD

SEQ ID NO: 91781 - DNA, 1455 bp, Arabidopsis thaliana
  misc_feature (1)..(1455): Ceres Seq. ID no. 12729515
  misc_feature: MA Experiment ID: 20000328 Result: Down-regulated in Transcription
  misc_feature: MA Experiment 20000328 PARAMETER Experiment Name: At_42deg_Heat_Sub_P Parameter: Age (day) Value: 14
  misc_feature: MA Experiment 20000328 PARAMETER Experiment Name: At_42deg_Heat_Sub_P Parameter: Organism Value: A. thaliana
  misc_feature: MA Experiment 20000328 PARAMETER Experiment Name: At_42deg_Heat_Sub_P Parameter: Plant Line Value: WS
  misc_feature: MA Experiment 20000328 PARAMETER Experiment Name: At_42deg_Heat_Sub_P Parameter: Temperature (deg C) Value: 42 vs. 22
  misc_feature: MA Experiment 20000328 PARAMETER Experiment Name: At_42deg_Heat_Sub_P Parameter: Timepoint (hr) Value: 6
  misc_feature: MA Experiment 20000328 PARAMETER Experiment Name: At_42deg_Heat_Sub_P Parameter: Tissue Value: Aerial
  misc_feature: MA Experiment ID: 20000346 Result: Up-regulated in Transcription
  misc_feature: MA Experiment 20000346 PARAMETER Experiment Name: At_2mM_SA_Sub_P Parameter: Age (day) Value: 14
  misc_feature: MA Experiment 20000346 PARAMETER Experiment Name: At_2mM_SA_Sub_P Parameter: Organism Value: A. thaliana
  misc_feature: MA Experiment 20000346 PARAMETER Experiment Name: At_2mM_SA_Sub_P Parameter: Plant Line Value: WS
  misc_feature: MA Experiment 20000346 PARAMETER Experiment Name: At_2mM_SA_Sub_P Parameter: Timepoint (hr) Value: 1
  misc_feature: MA Experiment 20000346 PARAMETER Experiment Name: At_2mM_SA_Sub_P Parameter: Tissue Value: Aerial
  misc_feature: MA Experiment 20000346 PARAMETER Experiment Name: At_2mM_SA_Sub_P Parameter: Treatment Value: 2mM SA vs. No Treatment
  misc_feature: MA Experiment ID: 20000347 Result: Up-regulated in Transcription
  misc_feature: MA Experiment 20000347 PARAMETER Experiment Name: At_2mM_SA_Sub_P Parameter: Age (day) Value: 14
  misc_feature: MA Experiment 20000347 PARAMETER Experiment Name: At_2mM_SA_Sub_P Parameter: Organism Value: A. thaliana
  misc_feature: MA Experiment 20000347 PARAMETER Experiment Name: At_2mM_SA_Sub_P Parameter: Plant Line Value: WS
  misc_feature: MA Experiment 20000347 PARAMETER Experiment Name: At_2mM_SA_Sub_P Parameter: Timepoint (hr) Value: 6
  misc_feature: MA Experiment 20000347 PARAMETER Experiment Name: At_2mM_SA_Sub_P Parameter: Tissue Value: Aerial
  misc_feature: MA Experiment 20000347 PARAMETER Experiment Name: At_2mM_SA_Sub_P Parameter: Treatment Value: 2mM SA vs. No Treatment
  misc_feature: MA Experiment ID: 20000355 Result: Down-regulated in Transcription
  misc_feature: MA Experiment 20000355 PARAMETER Experiment Name: At_Siliques_Sub_P Parameter: Age (day) Value: 21
  misc_feature: MA Experiment 20000355 PARAMETER Experiment Name: At_Siliques_Sub_P Parameter: Organism Value: A. thaliana
  misc_feature: MA Experiment 20000355 PARAMETER Experiment Name: At_Siliques_Sub_P Parameter: Plant Line Value: WS
  misc_feature: MA Experiment 20000355 PARAMETER Experiment Name: At_Siliques_Sub_P Parameter: Tissue Value: Less Than 5mm Siliques vs. Whole Plant
  misc_feature: MA Experiment ID: 20000440 Result: Down-regulated in Transcription
  misc_feature: MA Experiment 20000440 PARAMETER Experiment Name: At_Closed-Flower__Sub_P Parameter: Tissue Value: Closed Flower vs. Whole Plant
atggaactagtaagcttggacctttttgcaaacaacataagcggtcccatcccttcctctcttggcaaactaggaaaactccgcttcttgcgtctttataacaacagcttatctggagaaattccaaggtctttgactgctctgccgctggatgttcttgatatctcaaacaatcggctcagtggagatattcctgttaatggttccttttcgcagttcacttctatgagttttgccaataataaattaaggccgcgacctgcatctccttcaccatcaccttcaggaacgtctgcagcaatagtagtgggagttgctgcgggtgcagcacttctatttgcgcttgcttggtggctgagaagaaaactgcagggtcactttcttgatgtacctgctgaagaagacccagaggtttatttaggacaatttaaaaggttctccttgcgtgaactgctagttgctacagagaaatttagcaaaagaaatgtattgggcaaaggacgttttggtatattgtataaaggacgtttagctgatgacactctagtggctgtgaaacggctaaatgaagaacgtaccaagggtggggaactgcagtttcaaaccgaagttgagatgatcagtatggccgttcataggaacttgcttcggcttcgtggcttttgcatgactccaactgaaagattacttgtttatccctacatggctaatggaagtgttgcttcttgtttaagagagcgtcctgaaggcaatccagcccttgactggccaaaaagaaagcatattgctctgggatcagcaagggggctcgcatatttacacgatcattgcgaccaaaagatcattcacctggatgtgaaagctgcaaatatactgttagatgaagagtttgaagctgttgttggagattttgggctagcaaaattaatgaattataacgactcccatgtgacaactgctgtacggggtacgattggccatatagcgcccgagtacctctcgacaggaaaatcttctgagaagactgatgtttttgggtacggggtcatgcttctcgagctcatcactggacaaaaggctttcgatcttgctcggcttgcaaatgatgatgatatcatgttactcgactgggtgaaagaggttttgaaagagaagaagttggaaagccttgtggatgcagaactcgaaggaaagtacgtggaaacagaagtggagcagctgatacaaatggctctgctctgcactcaaagttctgcaatggaacgtccaaagatgtcagaagtagtgagaatgctggaaggagatggtttagctgagagatgggaagaatggcaaaaggaggagatgccaatacatgattttaactatcaagcctatcctcatgctggcactgactggctcatcccctattccaattcccttatcgaaaacgattacccctcggggccaagataa

SEQ ID NO: 91782 - protein, 484 aa, Arabidopsis thaliana
  peptide (1)..(484): Ceres Seq. ID no. 12729516
  misc_feature (1)..(484): Homolog of NCBI NO: 22325667 NR Description: putative receptor-like protein kinase; protein At2g13800.1, supported by cDNA: gi_20453087 [Arabidopsis >gi|20453088|gb|AAM19787.1| At2g13800/F13J11.15 [Arabidopsis
  misc_feature (1)..(484): Homolog of NCBI NO: 30678986 NR Description: leucine-rich repeat protein kinase family thaliana] >gi|15810409|gb|AAL07092.1| unknown protein
  misc_feature (1)..(484): Homolog of NCBI NO: 25411516 NR Description: probable receptor-like protein kinase [imported] -
  misc_feature (2)..(484): Homolog of NCBI NO: 14573459 NR Description: somatic embryogenesis receptor-like kinase 3
  misc_feature (2)..(484): Homolog of NCBI NO: 18418211 NR Description: somatic embryogenesis receptor-like kinase -like protein id: At4g33430.1, supported by cDNA: gi_14573458
  misc_feature (30)..(484): Homolog of NCBI NO: 25411517 NR Description: probable receptor-like protein kinase [imported] -
  misc_feature (30)..(484): Homolog of NCBI NO: 7488244 NR Description: protein kinase homolog F17M5.190 - Arabidopsis
  misc_feature (3)..(484): Homolog of NCBI NO: 25406123 NR Description: hypothetical protein F14O23.21 [imported] - thaliana >gi|7239510|gb|AAF43236.1|AC012654_20 Contains
  misc_feature (6)..(484): Homolog of NCBI NO: 24935324 NR Description: somatic embryogenesis receptor kinase 1 [Medicago >gi|24935326|gb|AAN64294.1| somatic embryogenesis receptor kinase
  misc_feature (6)..(484): Homolog of NCBI NO: 7488932 NR Description: probable somatic embryogenesis receptor-like
MELVSLDLFANNISGPIPSSLGKLGKLRFLRLYNNSLSGEIPRSLTALPLDVLDISNNRLSGDIPVNGSFSQFTSMSFANNKLRPRPASPSPSPSGTSAAIVVGVAAGAALLFALAWWLRRKLQGHFLDVPAEEDPEVYLGQFKRFSLRELLVATEKFSKRNVLGKGRFGILYKGRLADDTLVAVKRLNEERTKGGELQFQTEVEMISMAVHRNLLRLRGFCMTPTERLLVYPYMANGSVASCLRERPEGNPALDWPKRKHIALGSARGLAYLHDHCDQKIIHLDVKAANILLDEEFEAVVGDFGLAKLMNYNDSHVTTAVRGTIGHIAPEYLSTGKSSEKTDVFGYGVMLLELITGQKAFDLARLANDDDIMLLDWVKEVLKEKKLESLVDAELEGKYVETEVEQLIQMALLCTQSSAMERPKMSEVVRMLEGDGLAERWEEWQKEEMPIHDFNYQAYPHAGTDWLIPYSNSLIENDYPSGPR

SEQ ID NO: 91783 - protein, 409 aa, Arabidopsis thaliana
  peptide (1)..(409): Ceres Seq. ID no. 12729517
  misc_feature (1)..(409): Homolog of NCBI NO: 22325667 NR Description: putative receptor-like protein kinase; protein At2g13800.1, supported by cDNA: gi_20453087 [Arabidopsis >gi|20453088|gb|AAM19787.1| At2g13800/F13J11.15 [Arabidopsis
  misc_feature (1)..(409): Homolog of NCBI NO: 30678986 NR Description: leucine-rich repeat protein kinase family thaliana] >gi|15810409|gb|AAL07092.1| unknown protein
  misc_feature (1)..(409): Homolog of NCBI NO: 25411516 NR Description: probable receptor-like protein kinase [imported] -
  misc_feature (1)..(409): Homolog of NCBI NO: 14573459 NR Description: somatic embryogenesis receptor-like kinase 3
  misc_feature (1)..(409): Homolog of NCBI NO: 18418211 NR Description: somatic embryogenesis receptor-like kinase -like protein id: At4g33430.1, supported by cDNA: gi_14573458
  misc_feature (1)..(409): Homolog of NCBI NO: 25411517 NR Description: probable receptor-like protein kinase [imported] -
  misc_feature (1)..(409): Homolog of NCBI NO: 7488244 NR Description: protein kinase homolog F17M5.190 - Arabidopsis
  misc_feature (1)..(409): Homolog of NCBI NO: 25406123 NR Description: hypothetical protein F14O23.21 [imported] - thaliana >gi|7239510|gb|AAF43236.1|AC012654_20 Contains
  misc_feature (1)..(409): Homolog of NCBI NO: 24935324 NR Description: somatic embryogenesis receptor kinase 1 [Medicago >gi|24935326|gb|AAN64294.1| somatic embryogenesis receptor kinase
  misc_feature (1)..(409): Homolog of NCBI NO: 7488932 NR Description: probable somatic embryogenesis receptor-like
MSFANNKLRPRPASPSPSPSGTSAAIVVGVAAGAALLFALAWWLRRKLQGHFLDVPAEEDPEVYLGQFKRFSLRELLVATEKFSKRNVLGKGRFGILYKGRLADDTLVAVKRLNEERTKGGELQFQTEVEMISMAVHRNLLRLRGFCMTPTERLLVYPYMANGSVASCLRERPEGNPALDWPKRKHIALGSARGLAYLHDHCDQKIIHLDVKAANILLDEEFEAVVGDFGLAKLMNYNDSHVTTAVRGTIGHIAPEYLSTGKSSEKTDVFGYGVMLLELITGQKAFDLARLANDDDIMLLDWVKEVLKEKKLESLVDAELEGKYVETEVEQLIQMALLCTQSSAMERPKMSEVVRMLEGDGLAERWEEWQKEEMPIHDFNYQAYPHAGTDWLIPYSNSLIENDYPSGPR

SEQ ID NO: 91784 - protein, 279 aa, Arabidopsis thaliana
  peptide (1)..(279): Ceres Seq. ID no. 12729518
  misc_feature (1)..(279): Homolog of NCBI NO: 22325667 NR Description: putative receptor-like protein kinase; protein At2g13800.1, supported by cDNA: gi_20453087 [Arabidopsis >gi|20453088|gb|AAM19787.1| At2g13800/F13J11.15 [Arabidopsis
  misc_feature (1)..(279): Homolog of NCBI NO: 30678986 NR Description: leucine-rich repeat protein kinase family thaliana] >gi|15810409|gb|AAL07092.1| unknown protein
  misc_feature (1)..(279): Homolog of NCBI NO: 25411516 NR Description: probable receptor-like protein kinase [imported] -
  misc_feature (1)..(279): Homolog of NCBI NO: 14573459 NR Description: somatic embryogenesis receptor-like kinase 3
  misc_feature (1)..(279): Homolog of NCBI NO: 18418211 NR Description: somatic embryogenesis receptor-like kinase -like protein id: At4g33430.1, supported by cDNA: gi_14573458
  misc_feature (1)..(279): Homolog of NCBI NO: 25411517 NR Description: probable receptor-like protein kinase [imported] -
  misc_feature (1)..(279): Homolog of NCBI NO: 7488244 NR Description: protein kinase homolog F17M5.190 - Arabidopsis
  misc_feature (1)..(279): Homolog of NCBI NO: 25406123 NR Description: hypothetical protein F14O23.21 [imported] - thaliana >gi|7239510|gb|AAF43236.1|AC012654_20 Contains
  misc_feature (1)..(279): Homolog of NCBI NO: 24935324 NR Description: somatic embryogenesis receptor kinase 1 [Medicago >gi|24935326|gb|AAN64294.1| somatic embryogenesis receptor kinase
  misc_feature (1)..(279): Homolog of NCBI NO: 7488932 NR Description: probable somatic embryogenesis receptor-like
MISMAVHRNLLRLRGFCMTPTERLLVYPYMANGSVASCLRERPEGNPALDWPKRKHIALGSARGLAYLHDHCDQKIIHLDVKAANILLDEEFEAVVGDFGLAKLMNYNDSHVTTAVRGTIGHIAPEYLSTGKSSEKTDVFGYGVMLLELITGQKAFDLARLANDDDIMLLDWVKEVLKEKKLESLVDAELEGKYVETEVEQLIQMALLCTQSSAMERPKMSEVVRMLEGDGLAERWEEWQKEEMPIHDFNYQAYPHAGTDWLIPYSNSLIENDYPSGPR

SEQ ID NO: 91785 - DNA, 1080 bp, Arabidopsis thaliana
  misc_feature (1)..(1080): Ceres Seq. ID no. 12729529
  misc_feature: MA Experiment ID: 20000437 Result: Up-regulated in Transcription
  misc_feature: MA Experiment 20000437 PARAMETER Experiment Name: At_Drought_P Parameter: Age (day) Value: 8
  misc_feature: MA Experiment 20000437 PARAMETER Experiment Name: At_Drought_P Parameter: Organism Value: A. thaliana
  misc_feature: MA Experiment 20000437 PARAMETER Experiment Name: At_Drought_P Parameter: Plant Line Value: WS
  misc_feature: MA Experiment 20000437 PARAMETER Experiment Name: At_Drought_P Parameter: Timepoint (hr) Value: 24
  misc_feature: MA Experiment 20000437 PARAMETER Experiment Name: At_Drought_P Parameter: Tissue Value: Whole Plant
  misc_feature: MA Experiment 20000437 PARAMETER Experiment Name: At_Drought_P Parameter: Treatment Value: Drought vs. No Drought
atgaaaggaggaacaggagaccatagttatgctactaattcacattatcagagaagtgttttctatgagatacaacctttggtcatagagaacgtaagagaaatgctactgaaaaatgggtttcctggttgcatcaaagtggcagacttgggttgttctactggacaaaacacggtgttggccatgtccgcaatcgcctacacgatcatggagtcataccaacaaatgagtaaaaacccaccagaaatcgattgttatttgaacgaccttccagagaacgatttcaataccaccttcaagttgtttcattctttccaagagaagctgaaaccggaggttaaaggaaagtggtttgtctcgggagtcccgggttctttttactcaaggctattcccaagaaagtctctccattttgttcattcagcttttagtatccattggctttctagaattccagatggccttgagagcaacactaaaagcattcatattaaatatccatacccttcaaatgtctacaagagttatttaaatcagttcaagatagatttttcgttgttcttaaaaatgcgttcagaagaagtagtgcataatggacatatggttctaacgttcgtgggaagaaaggtttccgacactttatccaaagattgtttccaagtttggtcgttgttatccgattgcctcctcgatctagcctccgaggggtttgtgaacgattcaatggtaaaatcatttaacatgccattctacaatccaaacgaagaagaggtaagagaatttatcttaaaggaaggttccttcgagatcaccaagatcgagaaattcgaccatgttgtcccatacaaaattgaccgtgaggaagaagatgaggagcaatcacttcagttggaagctggtataaagcatgcaagctgggcaagatgcatcaccgaaccattgctcgttgctcatttcggagatgcaattatagaaccggtgttcaacaagtatgcacactatatggccaagtatctaagtgtctcaaaccatcgccgtaatatgacactcgtcatcgtagtttcgttgactaggaaataa

SEQ ID NO: 91786 - protein, 359 aa, Arabidopsis thaliana; identical to SEQ ID NO: 88264
  peptide (1)..(359): Ceres Seq. ID no. 12729530
  misc_feature (28)..(359): Pfam Name: SAM dependent carboxyl methyltransferase Pfam Description: SAM dependent carboxyl methyltransferase
  misc_feature (1)..(359): Homolog of NCBI NO: 15225569 NR Description: S-adenosyl-L-methionine:carboxyl family; protein id: At2g14060.1 [Arabidopsis thaliana]
  misc_feature (1)..(359): Homolog of NCBI NO: 8885604 NR Description: S-adenosyl-L-methionine:salicylic acid carboxyl
  misc_feature (1)..(359): Homolog of NCBI NO: 15240823 NR Description: S-adenosyl-L-methionine:carboxyl
  misc_feature (1)..(359): Homolog of NCBI NO: 9279749 NR Description: S-adenosyl-L-methionine:salicylic acid carboxyl
  misc_feature (29)..(359): Homolog of NCBI NO: 15233213 NR Description: S-adenosyl-L-methionine:carboxyl
  misc_feature (1)..(359): Homolog of NCBI NO: 15237695 NR Description: S-adenosyl-L-methionine:carboxyl
  misc_feature (1)..(359): Homolog of NCBI NO: 15237696 NR Description: S-adenosyl-L-methionine:carboxyl
  misc_feature (1)..(359): Homolog of NCBI NO: 15239970 NR Description: S-adenosyl-L-methionine:carboxyl
  misc_feature (1)..(359): Homolog of NCBI NO: 37904506 NR Description: methyl transferase [Arabidopsis lyrata subsp.
  misc_feature (1)..(359): Homolog of NCBI NO: 22330992 NR Description: S-adenosyl-L-methionine:carboxyl

SEQ ID NO: 91787 - protein, 325 aa, Arabidopsis thaliana; identical to SEQ ID NO: 88265
  peptide (1)..(325): Ceres Seq. ID no. 12729531
  misc_feature (1)..(325): Pfam Name: SAM dependent carboxyl methyltransferase Pfam Description: SAM dependent carboxyl methyltransferase
  misc_feature (1)..(325): Homolog of NCBI NO: 15225569 NR Description: S-adenosyl-L-methionine:carboxyl family; protein id: At2g14060.1 [Arabidopsis thaliana]
  misc_feature (1)..(325): Homolog of NCBI NO: 8885604 NR Description: S-adenosyl-L-methionine:salicylic acid carboxyl
  misc_feature (1)..(325): Homolog of NCBI NO: 15240823 NR Description: S-adenosyl-L-methionine:carboxyl
  misc_feature (1)..(325): Homolog of NCBI NO: 9279749 NR Description: S-adenosyl-L-methionine:salicylic acid carboxyl
  misc_feature (1)..(325): Homolog of NCBI NO: 15233213 NR Description: S-adenosyl-L-methionine:carboxyl
  misc_feature (1)..(325): Homolog of NCBI NO: 15237695 NR Description: S-adenosyl-L-methionine:carboxyl
  misc_feature (1)..(325): Homolog of NCBI NO: 15237696 NR Description: S-adenosyl-L-methionine:carboxyl
  misc_feature (1)..(325): Homolog of NCBI NO: 15239970 NR Description: S-adenosyl-L-methionine:carboxyl
  misc_feature (1)..(325): Homolog of NCBI NO: 37904506 NR Description: methyl transferase [Arabidopsis lyrata subsp.
  misc_feature (1)..(325): Homolog of NCBI NO: 22330992 NR Description: S-adenosyl-L-methionine:carboxyl

SEQ ID NO: 91788 - protein, 298 aa, Arabidopsis thaliana
  peptide (1)..(298): Ceres Seq. ID no. 12729532
  misc_feature (1)..(298): Pfam Name: SAM dependent carboxyl methyltransferase Pfam Description: SAM dependent carboxyl methyltransferase
  misc_feature (1)..(298): Homolog of NCBI NO: 15225569 NR Description: S-adenosyl-L-methionine:carboxyl family; protein id: At2g14060.1 [Arabidopsis thaliana]
  misc_feature (1)..(298): Homolog of NCBI NO: 8885604 NR Description: S-adenosyl-L-methionine:salicylic acid carboxyl
  misc_feature (1)..(298): Homolog of NCBI NO: 15240823 NR Description: S-adenosyl-L-methionine:carboxyl
  misc_feature (1)..(298): Homolog of NCBI NO: 9279749 NR Description: S-adenosyl-L-methionine:salicylic acid carboxyl
  misc_feature (1)..(298): Homolog of NCBI NO: 15233213 NR Description: S-adenosyl-L-methionine:carboxyl
  misc_feature (1)..(298): Homolog of NCBI NO: 15237695 NR Description: S-adenosyl-L-methionine:carboxyl
  misc_feature (1)..(298): Homolog of NCBI NO: 15237696 NR Description: S-adenosyl-L-methionine:carboxyl
  misc_feature (1)..(298): Homolog of NCBI NO: 15239970 NR Description: S-adenosyl-L-methionine:carboxyl
  misc_feature (1)..(298): Homolog of NCBI NO: 37904506 NR Description: methyl transferase [Arabidopsis lyrata subsp.
  misc_feature (1)..(298): Homolog of NCBI NO: 22330992 NR Description: S-adenosyl-L-methionine:carboxyl
MSAIAYTIMESYQQMSKNPPEIDCYLNDLPENDFNTTFKLFHSFQEKLKPEVKGKWFVSGVPGSFYSRLFPRKSLHFVHSAFSIHWLSRIPDGLESNTKSIHIKYPYPSNVYKSYLNQFKIDFSLFLKMRSEEVVHNGHMVLTFVGRKVSDTLSKDCFQVWSLLSDCLLDLASEGFVNDSMVKSFNMPFYNPNEEEVREFILKEGSFEITKIEKFDHVVPYKIDREEEDEEQSLQLEAGIKHASWARCITEPLLVAHFGDAIIEPVFNKYAHYMAKYLSVSNHRRNMTLVIVVSLTRK

SEQ ID NO: 91789 - DNA, 1557 bp, Arabidopsis thaliana
  misc_feature (1)..(1557): Ceres Seq. ID no. 12729533
  misc_feature: MA Experiment ID: 20000180 Result: Up-regulated in Transcription
  misc_feature: MA Experiment 20000180 PARAMETER Experiment Name: At_Germinating_Seeds_P Parameter: Age (hr) Value: 24 vs. 0
  misc_feature: MA Experiment 20000180 PARAMETER Experiment Name: At_Germinating_Seeds_P Parameter: Tissue Value: Germinating Seeds
  misc_feature: MA Experiment ID: 20000185 Result: Up-regulated in Transcription
  misc_feature: MA Experiment 20000185 PARAMETER Experiment Name: At_Roots__P Parameter: Age (day) Value: 7 vs. 21
  misc_feature: MA Experiment 20000185 PARAMETER Experiment Name: At_Roots__P Parameter: Organism Value: A. thaliana
  misc_feature: MA Experiment 20000185 PARAMETER Experiment Name: At_Roots__P Parameter: Tissue Value: Roots vs. Whole Plant
  misc_feature: MA Experiment ID: 20000451 Result: Down-regulated in Transcription
  misc_feature: MA Experiment 20000451 PARAMETER Experiment Name: At_CS6879_Shoots-Roots_P Parameter: Age (day) Value: 14
  misc_feature: MA Experiment 20000451 PARAMETER Experiment Name: At_CS6879_Shoots-Roots_P Parameter: Organism Value: A. thaliana
  misc_feature: MA Experiment 20000451 PARAMETER Experiment Name: At_CS6879_Shoots-Roots_P Parameter: Plant Line Value: CS6879 vs. WS
  misc_feature: MA Experiment 20000451 PARAMETER Experiment Name: At_CS6879_Shoots-Roots_P Parameter: Tissue Value: Roots
atggcaacaatcgtcgttgactttcaaaaaattcattttcatcctcagatcctcttatccatattcacagtcatttgcatctttgtattcttcttcaagaagccaaagggctcacgaggctgtgatctgcctccgagccctccttctcttccgataatcggacatcttcaccttttactctttgatctacctcacaaagcctttcagaaactctcctctaagtatggacctcttctctgtctccgcatcttcaatgtccccatagtcctggtctcctctgcctctgtggcctacgagatcttcaagacgcatgacgtgaacatctcatcccacggccaccctccgattgacgagtgtctcttttttgggtcttcaagctttgtaatggctccttatggagattactggaagttcatgaagaagctcatggtcacaaagctgttcggacctcaggcactcgagcagtcacgaggcgcccgtgcagatgaactagaacggtttcacgcaaacctgcttagtaaggaaatgaaaagcgagactgtcgagattgctaaggaagcaataaagctgactaacaatagcatctgcaagatgattatgggtaggggttgtttagaggagaacggtgaggcagagagagttaggggattggtcaccgagacatttgccttgtttaagaaacttttcttgacacaagtgttacgcaggctgtttgagatactcagaatctcaccgttcaaaaaagagacactggatgtttcccgcaaattcgacgagcttcttgaaaggattattgtggaacacgaagagaaaacggactatgatcatggtatggacctgatggatgtgctgttggctgtttatcgagatggaaaggcagagtataagatcactagggaccacctcaagtccttgttcgtggagcttatccttggaggcactgacacctcagcgcaaacaatcgagtggacaatggcaaagatcattaagaagcctaacattcttgagagattgagaaaagaaatcgattctgttgtaggcaaaacaaggttgattcaagagaaggatctaccgaacctcccttatttgcaagcggtcatcaaggaagggctaagattacacccaccagcacctctcttgggaaggaaagtcacagatggatgtacgattggaggctgttacgtaccaaagaacacaacacttgttgttaatgcttatgccgtgatgagagatcccgattcttgggaagatcctgatgagtttaagccagagaggtttctagcttcttcaagaggaaaagaagaggagagagagcaagaacttaagtacattccttttggcagcggaagaagaggatgtcctggagtaaatctaggttatatatttgtaggaaccgcaataggaatgatggtgcattgctttgactggagaaccaatggagataaggtcaacatggaagagactgttgctggaattaccttaaacatggctcatcctcttaggtgtactcctgtttctcgaatgcaactgcagaaatcgcagttcgtgagttcatga

SEQ ID NO: 91790 - protein, 518 aa, Arabidopsis thaliana
  peptide (1)..(518): Ceres Seq. ID no. 12729534
  misc_feature (1)..(518): Homolog of NCBI NO: 15225585 NR Description: cytochrome p450 family; protein id: At2g14100.1
  misc_feature (1)..(509): Homolog of NCBI NO: 15231047 NR Description: cytochrome P450, putative; protein id: At3g20090.1
  misc_feature (17)..(507): Homolog of NCBI NO: 15231049 NR Description: cytochrome p450 family; protein id: At3g20100.1, by cDNA: 149380., supported by cDNA: gi_15215771 [Arabidopsis
  misc_feature (2)..(510): Homolog of NCBI NO: 15231053 NR Description: cytochrome p450 family; protein id: At3g20140.1
  misc_feature (2)..(507): Homolog of NCBI NO: 9294003 NR Description: cytochrome P450-like protein [Arabidopsis
  misc_feature (17)..(507): Homolog of NCBI NO: 21553521 NR Description: cytochrome P450, putative [Arabidopsis thaliana]
  misc_feature (2)..(507): Homolog of NCBI NO: 15231052 NR Description: cytochrome p450 family; protein id: At3g20130.1
  misc_feature (17)..(507): Homolog of NCBI NO: 15233774 NR Description: cytochrome p450 family; protein id: At4g15350.1
  misc_feature (17)..(507): Homolog of NCBI NO: 9293969 NR Description: cytochrome P450-like protein [Arabidopsis
  misc_feature (1)..(514): Homolog of NCBI NO: 18402480 NR Description: cytochrome P450, putative; protein id: supported by cDNA: 147792. [Arabidopsis thaliana]
MATIVVDFQKIHFHPQILLSIFTVICIFVFFFKKPKGSRGCDLPPSPPSLPIIGHLHLLLFDLPHKAFQKLSSKYGPLLCLRIFNVPIVLVSSASVAYEIFKTHDVNISSHGHPPIDECLFFGSSSFVMAPYGDYWKFMKKLMVTKLFGPQALEQSRGARADELERFHANLLSKEMKSETVEIAKEAIKLTNNSICKMIMGRGCLEENGEAERVRGLVTETFALFKKLFLTQVLRRLFEILRISPFKKETLDVSRKFDELLERIIVEHEEKTDYDHGMDLMDVLLAVYRDGKAEYKITRDHLKSLFVELILGGTDTSAQTIEWTMAKIIKKPNILERLRKEIDSVVGKTRLIQEKDLPNLPYLQAVIKEGLRLHPPAPLLGRKVTDGCTIGGCYVPKNTTLVVNAYAVMRDPDSWEDPDEFKPERFLASSRGKEEEREQELKYIPFGSGRRGCPGVNLGYIFVGTAIGMMVHCFDWRTNGDKVNMEETVAGITLNMAHPLRCTPVSRMQLQKSQFVSS

SEQ ID NO: 91791 - protein, 390 aa, Arabidopsis thaliana
  peptide (1)..(390): Ceres Seq. ID no. 12729535
  misc_feature (1)..(390): Homolog of NCBI NO: 15225585 NR Description: cytochrome p450 family; protein id: At2g14100.1
  misc_feature (1)..(381): Homolog of NCBI NO: 15231047 NR Description: cytochrome P450, putative; protein id: At3g20090.1
  misc_feature (1)..(379): Homolog of NCBI NO: 15231049 NR Description: cytochrome p450 family; protein id: At3g20100.1, by cDNA: 149380., supported by cDNA: gi_15215771 [Arabidopsis
  misc_feature (1)..(382): Homolog of NCBI NO: 15231053 NR Description: cytochrome p450 family; protein id: At3g20140.1
  misc_feature (1)..(379): Homolog of NCBI NO: 9294003 NR Description: cytochrome P450-like protein [Arabidopsis
  misc_feature (1)..(379): Homolog of NCBI NO: 21553521 NR Description: cytochrome P450, putative [Arabidopsis thaliana]
  misc_feature (1)..(379): Homolog of NCBI NO: 15231052 NR Description: cytochrome p450 family; protein id: At3g20130.1
  misc_feature (1)..(379): Homolog of NCBI NO: 15233774 NR Description: cytochrome p450 family; protein id: At4g15350.1
  misc_feature (1)..(379): Homolog of NCBI NO: 9293969 NR Description: cytochrome P450-like protein [Arabidopsis
  misc_feature (1)..(386): Homolog of NCBI NO: 18402480 NR Description: cytochrome P450, putative; protein id: supported by cDNA: 147792. [Arabidopsis thaliana]
MAPYGDYWKFMKKLMVTKLFGPQALEQSRGARADELERFHANLLSKEMKSETVEIAKEAIKLTNNSICKMIMGRGCLEENGEAERVRGLVTETFALFKKLFLTQVLRRLFEILRISPFKKETLDVSRKFDELLERIIVEHEEKTDYDHGMDLMDVLLAVYRDGKAEYKITRDHLKSLFVELILGGTDTSAQTIEWTMAKIIKKPNILERLRKEIDSVVGKTRLIQEKDLPNLPYLQAVIKEGLRLHPPAPLLGRKVTDGCTIGGCYVPKNTTLVVNAYAVMRDPDSWEDPDEFKPERFLASSRGKEEEREQELKYIPFGSGRRGCPGVNLGYIFVGTAIGMMVHCFDWRTNGDKVNMEETVAGITLNMAHPLRCTPVSRMQLQKSQFVSS

SEQ ID NO: 91792 - protein, 380 aa, Arabidopsis thaliana
  peptide (1)..(380): Ceres Seq. ID no. 12729536
  misc_feature (1)..(380): Homolog of NCBI NO: 15225585 NR Description: cytochrome p450 family; protein id: At2g14100.1
  misc_feature (1)..(371): Homolog of NCBI NO: 15231047 NR Description: cytochrome P450, putative; protein id: At3g20090.1
  misc_feature (1)..(369): Homolog of NCBI NO: 15231049 NR Description: cytochrome p450 family; protein id: At3g20100.1, by cDNA: 149380., supported by cDNA: gi_15215771 [Arabidopsis
  misc_feature (1)..(372): Homolog of NCBI NO: 15231053 NR Description: cytochrome p450 family; protein id: At3g20140.1
  misc_feature (1)..(369): Homolog of NCBI NO: 9294003 NR Description: cytochrome P450-like protein [Arabidopsis
  misc_feature (1)..(369): Homolog of NCBI NO: 21553521 NR Description: cytochrome P450, putative [Arabidopsis thaliana]
  misc_feature (1)..(369): Homolog of NCBI NO: 15231052 NR Description: cytochrome p450 family; protein id: At3g20130.1
  misc_feature (1)..(369): Homolog of NCBI NO: 15233774 NR Description: cytochrome p450 family; protein id: At4g15350.1
  misc_feature (1)..(369): Homolog of NCBI NO: 9293969 NR Description: cytochrome P450-like protein [Arabidopsis
  misc_feature (1)..(376): Homolog of NCBI NO: 18402480 NR Description: cytochrome P450, putative; protein id: supported by cDNA: 147792. [Arabidopsis thaliana]
MKKLMVTKLFGPQALEQSRGARADELERFHANLLSKEMKSETVEIAKEAIKLTNNSICKMIMGRGCLEENGEAERVRGLVTETFALFKKLFLTQVLRRLFEILRISPFKKETLDVSRKFDELLERIIVEHEEKTDYDHGMDLMDVLLAVYRDGKAEYKITRDHLKSLFVELILGGTDTSAQTIEWTMAKIIKKPNILERLRKEIDSVVGKTRLIQEKDLPNLPYLQAVIKEGLRLHPPAPLLGRKVTDGCTIGGCYVPKNTTLVVNAYAVMRDPDSWEDPDEFKPERFLASSRGKEEEREQELKYIPFGSGRRGCPGVNLGYIFVGTAIGMMVHCFDWRTNGDKVNMEETVAGITLNMAHPLRCTPVSRMQLQKSQFVSS

SEQ ID NO: 91793 - DNA, 1075 bp, Arabidopsis thaliana
  misc_feature (1)..(1075): Ceres Seq. ID no. 12729537
  misc_feature: MA Experiment ID: 20000451 Result: Down-regulated in Transcription
  misc_feature: MA Experiment 20000451 PARAMETER Experiment Name: At_CS6879_Shoots-Roots_P Parameter: Age (day) Value: 14
  misc_feature: MA Experiment 20000451 PARAMETER Experiment Name: At_CS6879_Shoots-Roots_P Parameter: Organism Value: A. thaliana
  misc_feature: MA Experiment 20000451 PARAMETER Experiment Name: At_CS6879_Shoots-Roots_P Parameter: Plant Line Value: CS6879 vs. WS
  misc_feature: MA Experiment 20000451 PARAMETER Experiment Name: At_CS6879_Shoots-Roots_P Parameter: Tissue Value: Roots
  misc_feature: MA Experiment ID: 20001757 Result: Down-regulated in Transcription
  misc_feature: MA Experiment 20001757 PARAMETER Experiment Name: At_50mM_NH4NO3_L-to-H_P Parameter: Timepoint (hr) Value: 6
  misc_feature: MA Experiment 20001757 PARAMETER Experiment Name: At_50mM_NH4NO3_L-to-H_P Parameter: Tissue Value: Leaf
  misc_feature: MA Experiment 20001757 PARAMETER Experiment Name: At_50mM_NH4NO3_L-to-H_P Parameter: Treatment Value: 50mM NH4NO3 vs 100mM Mannitol
aaaaaaaagaagcttctcctcttcctctgccttcttctttccatttattgcaaaccctgatcaattggttttggtgttagtcttttggggagagagatggggagagggaagatagttatacgaaggatcgataactctacaagtagacaagtgactttctccaagagaaggagtggtttgcttaagaaagctaaagagttatcgatcctttgtgatgcagaagttggtgttatcatattctctagcaccggaaagctctacgactacgcaagcaattcaagtatgaaaacaatcattgagcggtacaacagagtaaaagaggagcagcatcaacttctgaatcatgcctcagagataaagttttggcaaagagaggttgcaagtttgcagcagcagctccaatatctacaagaatgccacaggaaactagtgggagaggaactttctggaatgaatgctaacgacctacaaaaccttgaagaccagctagtaacaagtctaaaaggtgttcgtctcaaaaaggatcaacttatgacaaatgaaatcagagaacttaatcgtaagggacaaatcatccaaaaagagaatcacgagctacaaaatattgtagatataatgcgtaaggaaaatattaaattgcaaaagaaggttcatggaagaacaaatgcgattgaaggcaattcaagtgtagatccaataagcaatggaaccacaacatatgcaccaccgcaacttcaactcatacaactacaaccagctcctagagaaaaatcaatcagactagggctacaactttcctagcaaaacatgtgggacatcgaacaatatacgaaaagagtttgtatgtcatcttcagtaacaaccaagctggatcatttcattcttggttatgtaattctgtttactactttggagtttaatatgtatatgacaagtttctctttgtcaagttacttgtgtatgtacatcataaaataatgatgtgatgtgagtgccgaacatactagacatcattttaccgtgtgtttttttcgggtacattaaatctacaaaatccagtctaattggcattttt

SEQ ID NO: 91794 - protein, 234 aa, Arabidopsis thaliana
  peptide (1)..(234): Ceres Seq. ID no. 12729538
  misc_feature (75)..(173): Pfam Name: K-box region Pfam Description: K-box region
  misc_feature (1)..(234): Homolog of NCBI NO: 15225607 NR Description: MADS-box protein ANR1; protein id: At2g14210.1
  misc_feature (1)..(234): Homolog of NCBI NO: 25307925 NR Description: MADS-box transcription factor ANR1 [validated] -
  misc_feature (1)..(226): Homolog of NCBI NO: 7489303 NR Description: MADS-box transcription factor DEFH125 - garden
  misc_feature (1)..(233): Homolog of NCBI NO: 34452085 NR Description: MADS-box protein 14 [Petunia x hybrida]
  misc_feature (1)..(234): Homolog of NCBI NO: 30313677 NR Description: transcription factor MADS27 [Oryza sativa
  misc_feature (1)..(233): Homolog of NCBI NO: 29611976 NR Description: MADS-box transcription factor MADS2 [Zea mays]
  misc_feature (1)..(233): Homolog of NCBI NO: 9964296 NR Description: MADS box protein 2 [Zea mays]
  misc_feature (1)..(215): Homolog of NCBI NO: 38344968 NR Description: OSJNBa0072F16.13 [Oryza sativa (japonica
  misc_feature (1)..(190): Homolog of NCBI NO: 15235748 NR Description: MADS-box protein; protein id: At4g37940.1, by cDNA: gi_18478602 [Arabidopsis thaliana]
  misc_feature (1)..(217): Homolog of NCBI NO: 15227254 NR Description: MADS-box protein AGL17; protein id: At2g22630.1
MGRGKIVIRRIDNSTSRQVTFSKRRSGLLKKAKELSILCDAEVGVIIFSSTGKLYDYASNSSMKTIIERYNRVKEEQHQLLNHASEIKFWQREVASLQQQLQYLQECHRKLVGEELSGMNANDLQNLEDQLVTSLKGVRLKKDQLMTNEIRELNRKGQIIQKENHELQNIVDIMRKENIKLQKKVHGRTNAIEGNSSVDPISNGTTTYAPPQLQLIQLQPAPREKSIRLGLQLS

SEQ ID NO: 91795 - protein, 172 aa, Arabidopsis thaliana
  peptide (1)..(172): Ceres Seq. ID no. 12729539
  misc_feature (13)..(111): Pfam Name: K-box region Pfam Description: K-box region
  misc_feature (1)..(172): Homolog of NCBI NO: 15225607 NR Description: MADS-box protein ANR1; protein id: At2g14210.1
  misc_feature (1)..(172): Homolog of NCBI NO: 25307925 NR Description: MADS-box transcription factor ANR1 [validated] -
  misc_feature (1)..(164): Homolog of NCBI NO: 7489303 NR Description: MADS-box transcription factor DEFH125 - garden
  misc_feature (1)..(171): Homolog of NCBI NO: 34452085 NR Description: MADS-box protein 14 [Petunia x hybrida]
  misc_feature (1)..(172): Homolog of NCBI NO: 30313677 NR Description: transcription factor MADS27 [Oryza sativa
  misc_feature (1)..(171): Homolog of NCBI NO: 29611976 NR Description: MADS-box transcription factor MADS2 [Zea mays]
  misc_feature (1)..(171): Homolog of NCBI NO: 9964296 NR Description: MADS box protein 2 [Zea mays]
  misc_feature (1)..(153): Homolog of NCBI NO: 38344968 NR Description: OSJNBa0072F16.13 [Oryza sativa (japonica
  misc_feature (1)..(128): Homolog of NCBI NO: 15235748 NR Description: MADS-box protein; protein id: At4g37940.1, by cDNA: gi_18478602 [Arabidopsis thaliana]
  misc_feature (1)..(155): Homolog of NCBI NO: 15227254 NR Description: MADS-box protein AGL17; protein id: At2g22630.1
MKTIIERYNRVKEEQHQLLNHASEIKFWQREVASLQQQLQYLQECHRKLVGEELSGMNANDLQNLEDQLVTSLKGVRLKKDQLMTNEIRELNRKGQIIQKENHELQNIVDIMRKENIKLQKKVHGRTNAIEGNSSVDPISNGTTTYAPPQLQLIQLQPAPREKSIRLGLQLS

SEQ ID NO: 91796 - DNA, 1912 bp, Arabidopsis thaliana
  misc_feature (1)..(1912): Ceres Seq. ID no. 12729562
  misc_feature: MA Experiment ID: 20000332 Result: Up-regulated in Transcription
  misc_feature: MA Experiment 20000332 PARAMETER Experiment Name: At_4deg_Cold_Sub_P Parameter: Age (day) Value: 14
  misc_feature: MA Experiment 20000332 PARAMETER Experiment Name: At_4deg_Cold_Sub_P Parameter: Organism Value: A. thaliana
  misc_feature: MA Experiment 20000332 PARAMETER Experiment Name: At_4deg_Cold_Sub_P Parameter: Plant Line Value: WS
  misc_feature: MA Experiment 20000332 PARAMETER Experiment Name: At_4deg_Cold_Sub_P Parameter: Temperature (deg C) Value: 4 vs. 22
  misc_feature: MA Experiment 20000332 PARAMETER Experiment Name: At_4deg_Cold_Sub_P Parameter: Timepoint (hr) Value: 2
  misc_feature: MA Experiment 20000332 PARAMETER Experiment Name: At_4deg_Cold_Sub_P Parameter: Tissue Value: Aerial
  misc_feature: MA Experiment ID: 20001806 Result: Up-regulated in Transcription
  misc_feature: MA Experiment 20001806 PARAMETER Experiment Name: At_50mM_NH4NO3_L-to-H_Sub_P Parameter: Timepoint (hr) Value: 4
  misc_feature: MA Experiment 20001806 PARAMETER Experiment Name: At_50mM_NH4NO3_L-to-H_Sub_P Parameter: Tissue Value: Leaf
  misc_feature: MA Experiment 20001806 PARAMETER Experiment Name: At_50mM_NH4NO3_L-to-H_Sub_P Parameter: Treatment Value: 50mM NH4NO3 vs 100mM Mannitol
ggaaaactatgaaacagtctgcgtctctccacgcaaaggctcaatttttacaaaccatgaagaattcttaagcaaaacaagtctaacatctttttgaattcacccaaaactcaaatcctacctcaaatttcgtatttttcttcttctgcattttctagtttaggatcgacatttttatcctccgaaagattcgtgcttttttctctctgtagattacgattgttttgtagatttaagaaaaacaaaaagatgagttttagggatgataatacggaagagggaagaaatgatcttcggcgaccgttcttacacacaggaagttggtatcggatgggttcgagacaatctagtatgttggaatcgtctcaagttattcgagacagctcaatttctgtcttagcttgtgttttgattgttgctcttggtcctattcaattcggattcacttgtggttattcctcaccaactcaagctgccattactaaggatcttggtttaactgtatcagagtactctgtgtttgggtctctatccaatgtgggtgctatggttggagcaattgcgagtggtcagattgctgaatacgttggacggaaagggtctctgatgattgctgcaattcccaatattattggatggctttcgatatcatttgcaaaagatacttcttttctttacatgggaagattgttagaaggcttcggagttgggattatctcctatacggttcccgtatatatagctgagatcgctccacagaccatgagaggagccttaggttcagttaaccagctttctgtaacaattgggataatgctggcgtatttactcggtctctttgttccatggagaattcttgcagttttgggagtattgccatgtacattgttgataccgggtctttttttcattcctgaatctcctcggtggttggcaaagatgggtttgacagatgatttcgaaacttcattgcaagttcttcgtggatttgagactgatattaccgttgaggttaatgaaatcaagagatctgtggcatcatctagcaaacgttctgcagttcggtttgtagacctcaagcgcaggagatactatttcccactgatggttggtatagggctgcttgcacttcaacaacttggaggaatcaatggtgtcttgttctattcgagtacaatttttgaatctgcaggggtgacatcaagtaatgtggcgacatttggagttggcgttgttcaggtagtggcgactgggatagcgacatggttggtggataaagcaggtcgtcggcttctactcatgatctcttctatcggaatgacgataagcctcgtgattgtagcagttgcattttaccttaaggaatttgtatcacctgattccaacatgtacaacattctaagcatggtttccgtagttggagttgtggctatggttatttcttgctctctaggaatgggaccaattccatggctgattatgtctgagattctgccagtgaatataaagggtttagccggaagtatagcaactttgttaaactggttcgtgtcatggttagtgacaatgactgcaaatatgctgttagcatggagcagtgggggaactttcactctctacgctttggtttgtggattcactgtggtttttgtgagtctttgggttcctgagactaaaggaaaaacgcttgaagagatccaagctttgttcagatgatcaaaacaagaagaggaagaagaagacaaaattttcactttttgctttctccattacagatcattcttttgtcccttccctgtgtctgtatttcatgctttgttcaatgtatttcttcttgacattgattataatttgtttatcttgtacaagcatatcattatacctttaaatttgattttttgtttttgtgtgt

SEQ ID NO: 91797 - protein, 488 aa, Arabidopsis thaliana
  peptide (1)..(488): Ceres Seq. ID no. 12729563
  misc_feature (52)..(228): Pfam Name: Sugar (and other) transporter Pfam Description: Sugar (and other) transporter
  misc_feature (1)..(488): Homolog of NCBI NO: 15223557 NR Description: integral membrane protein, putative; protein id: supported by cDNA: gi_16648956, supported by cDNA: gi_20259851 thaliana] >gi|16648957|gb|AAL24330.1| similar to integral
  misc_feature (220)..(488): Homolog of NCBI NO: 8778437 NR Description: F18O14.22 [Arabidopsis thaliana]
  misc_feature (1)..(228): Homolog of NCBI NO: 8778437 NR Description: F18O14.22 [Arabidopsis thaliana]
  misc_feature (1)..(488): Homolog of NCBI NO: 15222158 NR Description: integral membrane protein, putative; protein id:
  misc_feature (11)..(488): Homolog of NCBI NO: 7446725 NR Description: probable sugar transporter protein - beet
  misc_feature (1)..(488): Homolog of NCBI NO: 5091611 NR Description: Similar to gb|U43629 integral membrane protein Beta vulgaris and is a member of the sugar transporter family
  misc_feature (44)..(486): Homolog of NCBI NO: 21536914 NR Description: putative sugar transporter [Arabidopsis thaliana]
  misc_feature (44)..(486): Homolog of NCBI NO: 18407508 NR Description: putative sugar transporter; protein id: supported by cDNA: 114959. [Arabidopsis thaliana]
  misc_feature (49)..(485): Homolog of NCBI NO: 23504385 NR Description: putative sugar transporter [Lycopersicon
  misc_feature (43)..(484): Homolog of NCBI NO: 30695810 NR Description: sugar transporter, putative [Arabidopsis thaliana]
MSFRDDNTEEGRNDLRRPFLHTGSWYRMGSRQSSMLESSQVIRDSSISVLACVLIVALGPIQFGFTCGYSSPTQAAITKDLGLTVSEYSVFGSLSNVGAMVGAIASGQIAEYVGRKGSLMIAAIPNIIGWLSISFAKDTSFLYMGRLLEGFGVGIISYTVPVYIAEIAPQTMRGALGSVNQLSVTIGIMLAYLLGLFVPWRILAVLGVLPCTLLIPGLFFIPESPRWLAKMGLTDDFETSLQVLRGFETDITVEVNEIKRSVASSSKRSAVRFVDLKRRRYYFPLMVGIGLLALQQLGGINGVLFYSSTIFESAGVTSSNVATFGVGVVQVVATGIATWLVDKAGRRLLLMISSIGMTISLVIVAVAFYLKEFVSPDSNMYNILSMVSVVGVVAMVISCSLGMGPIPWLIMSEILPVNIKGLAGSIATLLNWFVSWLVTMTANMLLAWSSGGTFTLYALVCGFTVVFVSLWVPETKGKTLEEIQALFR

SEQ ID NO: 91798 - protein, 461 aa, Arabidopsis thaliana
  peptide (1)..(461): Ceres Seq. ID no. 12729564
  misc_feature (25)..(201): Pfam Name: Sugar (and other) transporter Pfam Description: Sugar (and other) transporter
  misc_feature (1)..(461): Homolog of NCBI NO: 15223557 NR Description: integral membrane protein, putative; protein id: supported by cDNA: gi_16648956, supported by cDNA: gi_20259851 thaliana] >gi|16648957|gb|AAL24330.1| similar to integral
  misc_feature (193)..(461): Homolog of NCBI NO: 8778437 NR Description: F18O14.22 [Arabidopsis thaliana]
  misc_feature (1)..(201): Homolog of NCBI NO: 8778437 NR Description: F18O14.22 [Arabidopsis thaliana]
  misc_feature (1)..(461): Homolog of NCBI NO: 15222158 NR Description: integral membrane protein, putative; protein id:
  misc_feature (1)..(461): Homolog of NCBI NO: 7446725 NR Description: probable sugar transporter protein - beet
  misc_feature (1)..(461): Homolog of NCBI NO: 5091611 NR Description: Similar to gb|U43629 integral membrane protein Beta vulgaris and is a member of the sugar transporter family
  misc_feature (17)..(459): Homolog of NCBI NO: 21536914 NR Description: putative sugar transporter [Arabidopsis thaliana]
  misc_feature (17)..(459): Homolog of NCBI NO: 18407508 NR Description: putative sugar transporter; protein id: supported by cDNA: 114959. [Arabidopsis thaliana]
  misc_feature (22)..(458): Homolog of NCBI NO: 23504385 NR Description: putative sugar transporter [Lycopersicon
  misc_feature (16)..(457): Homolog of NCBI NO: 30695810 NR Description: sugar transporter, putative [Arabidopsis thaliana]
MGSRQSSMLESSQVIRDSSISVLACVLIVALGPIQFGFTCGYSSPTQAAITKDLGLTVSEYSVFGSLSNVGAMVGAIASGQIAEYVGRKGSLMIAAIPNIIGWLSISFAKDTSFLYMGRLLEGFGVGIISYTVPVYIAEIAPQTMRGALGSVNQLSVTIGIMLAYLLGLFVPWRILAVLGVLPCTLLIPGLFFIPESPRWLAKMGLTDDFETSLQVLRGFETDITVEVNEIKRSVASSSKRSAVRFVDLKRRRYYFPLMVGIGLLALQQLGGINGVLFYSSTIFESAGVTSSNVATFGVGVVQVVATGIATWLVDKAGRRLLLMISSIGMTISLVIVAVAFYLKEFVSPDSNMYNILSMVSVVGVVAMVISCSLGMGPIPWLIMSEILPVNIKGLAGSIATLLNWFVSWLVTMTANMLLAWSSGGTFTLYALVCGFTVVFVSLWVPETKGKTLEEIQALFR

SEQ ID NO: 91799 - protein, 454 aa, Arabidopsis thaliana
  peptide (1)..(454): Ceres Seq. ID no. 12729565
  misc_feature (18)..(194): Pfam Name: Sugar (and other) transporter Pfam Description: Sugar (and other) transporter
  misc_feature (1)..(454): Homolog of NCBI NO: 15223557 NR Description: integral membrane protein, putative; protein id: supported by cDNA: gi_16648956, supported by cDNA: gi_20259851 thaliana] >gi|16648957|gb|AAL24330.1| similar to integral
  misc_feature (186)..(454): Homolog of NCBI NO: 8778437 NR Description: F18O14.22 [Arabidopsis thaliana]
  misc_feature (1)..(194): Homolog of NCBI NO: 8778437 NR Description: F18O14.22 [Arabidopsis thaliana]
  misc_feature (1)..(454): Homolog of NCBI NO: 15222158 NR Description: integral membrane protein, putative; protein id:
  misc_feature (1)..(454): Homolog of NCBI NO: 7446725 NR Description: probable sugar transporter protein - beet
  misc_feature (1)..(454): Homolog of NCBI NO: 5091611 NR Description: Similar to gb|U43629 integral membrane protein Beta vulgaris and is a member of the sugar transporter family
  misc_feature (10)..(452): Homolog of NCBI NO: 21536914 NR Description: putative sugar transporter [Arabidopsis thaliana]
  misc_feature (10)..(452): Homolog of NCBI NO: 18407508 NR Description: putative sugar transporter; protein id: supported by cDNA: 114959. [Arabidopsis thaliana]
  misc_feature (15)..(451): Homolog of NCBI NO: 23504385 NR Description: putative sugar transporter [Lycopersicon
  misc_feature (9)..(450): Homolog of NCBI NO: 30695810 NR Description: sugar transporter, putative [Arabidopsis thaliana]
MLESSQVIRDSSISVLACVLIVALGPIQFGFTCGYSSPTQAAITKDLGLTVSEYSVFGSLSNVGAMVGAIASGQIAEYVGRKGSLMIAAIPNIIGWLSISFAKDTSFLYMGRLLEGFGVGIISYTVPVYIAEIAPQTMRGALGSVNQLSVTIGIMLAYLLGLFVPWRILAVLGVLPCTLLIPGLFFIPESPRWLAKMGLTDDFETSLQVLRGFETDITVEVNEIKRSVASSSKRSAVRFVDLKRRRYYFPLMVGIGLLALQQLGGINGVLFYSSTIFESAGVTSSNVATFGVGVVQVVATGIATWLVDKAGRRLLLMISSIGMTISLVIVAVAFYLKEFVSPDSNMYNILSMVSVVGVVAMVISCSLGMGPIPWLIMSEILPVNIKGLAGSIATLLNWFVSWLVTMTANMLLAWSSGGTFTLYALVCGFTVVFVSLWVPETKGKTLEEIQALFR

SEQ ID NO: 91800 - DNA, 975 bp, Arabidopsis thaliana
  misc_feature (1)..(975): Ceres Seq. ID no. 12729589
  misc_feature: MA Experiment ID: 20000307 Result: Up-regulated in Transcription
  misc_feature: MA Experiment 20000307 PARAMETER Experiment Name: At_Germinating_Seeds_Sub_P Parameter: Age (hr) Value: 24 vs. 0
  misc_feature: MA Experiment 20000307 PARAMETER Experiment Name: At_Germinating_Seeds_Sub_P Parameter: Organism Value: A. thaliana
  misc_feature: MA Experiment 20000307 PARAMETER Experiment Name: At_Germinating_Seeds_Sub_P Parameter: Plant Line Value: WS
  misc_feature: MA Experiment 20000307 PARAMETER Experiment Name: At_Germinating_Seeds_Sub_P Parameter: Tissue Value: Germinating Seeds
  misc_feature: MA Experiment ID: 20000314 Result: Down-regulated in Transcription
  misc_feature: MA Experiment 20000314 PARAMETER Experiment Name: At_14day_Shoots-Roots_Sub_P Parameter: Age (day) Value: 14
  misc_feature: MA Experiment 20000314 PARAMETER Experiment Name: At_14day_Shoots-Roots_Sub_P Parameter: Organism Value: A. thaliana
  misc_feature: MA Experiment 20000314 PARAMETER Experiment Name: At_14day_Shoots-Roots_Sub_P Parameter: Plant Line Value: WS
  misc_feature: MA Experiment 20000314 PARAMETER Experiment Name: At_14day_Shoots-Roots_Sub_P Parameter: Tissue Value: Roots vs. Whole Plant
  misc_feature: MA Experiment ID: 20000315 Result: Down-regulated in Transcription
  misc_feature: MA Experiment 20000315 PARAMETER Experiment Name: At_14day_Shoots-Roots_Sub_P Parameter: Age (day) Value: 14
  misc_feature: MA Experiment 20000315 PARAMETER Experiment Name: At_14day_Shoots-Roots_Sub_P Parameter: Organism Value: A. thaliana
  misc_feature: MA Experiment 20000315 PARAMETER Experiment Name: At_14day_Shoots-Roots_Sub_P Parameter: Plant Line Value: WS
  misc_feature: MA Experiment 20000315 PARAMETER Experiment Name: At_14day_Shoots-Roots_Sub_P Parameter: Tissue Value: Shoots vs. Whole Plant
  misc_feature: MA Experiment ID: 20000328 Result: Up-regulated in Transcription
  misc_feature: MA Experiment 20000328 PARAMETER Experiment Name: At_42deg_Heat_Sub_P Parameter: Age (day) Value: 14
  misc_feature: MA Experiment 20000328 PARAMETER Experiment Name: At_42deg_Heat_Sub_P Parameter: Organism Value: A. thaliana
  misc_feature: MA Experiment 20000328 PARAMETER Experiment Name: At_42deg_Heat_Sub_P Parameter: Plant Line Value: WS
  misc_feature: MA Experiment 20000328 PARAMETER Experiment Name: At_42deg_Heat_Sub_P Parameter: Temperature (deg C) Value: 42 vs. 22
  misc_feature: MA Experiment 20000328 PARAMETER Experiment Name: At_42deg_Heat_Sub_P Parameter: Timepoint (hr) Value: 6
  misc_feature: MA Experiment 20000328 PARAMETER Experiment Name: At_42deg_Heat_Sub_P Parameter: Tissue Value: Aerial
  misc_feature: MA Experiment ID: 20000332 Result: Up-regulated in Transcription
  misc_feature: MA Experiment 20000332 PARAMETER Experiment Name: At_4deg_Cold_Sub_P Parameter: Age (day) Value: 14
  misc_feature: MA Experiment 20000332 PARAMETER Experiment Name: At_4deg_Cold_Sub_P Parameter: Organism Value: A. thaliana
  misc_feature: MA Experiment 20000332 PARAMETER Experiment Name: At_4deg_Cold_Sub_P Parameter: Plant Line Value: WS
  misc_feature: MA Experiment 20000332 PARAMETER Experiment Name: At_4deg_Cold_Sub_P Parameter: Temperature (deg C) Value: 4 vs. 22
  misc_feature: MA Experiment 20000332 PARAMETER Experiment Name: At_4deg_Cold_Sub_P Parameter: Timepoint (hr) Value: 2
  misc_feature: MA Experiment 20000332 PARAMETER Experiment Name: At_4deg_Cold_Sub_P Parameter: Tissue Value: Aerial
  misc_feature: MA Experiment ID: 20000346 Result: Up-regulated in Transcription
  misc_feature: MA Experiment 20000346 PARAMETER Experiment Name: At_2mM_SA_Sub_P Parameter: Age (day) Value: 14
  misc_feature: MA Experiment 20000346 PARAMETER Experiment Name: At_2mM_SA_Sub_P Parameter: Organism Value: A. thaliana
  misc_feature: MA Experiment 20000346 PARAMETER Experiment Name: At_2mM_SA_Sub_P Parameter: Plant Line Value: WS
  misc_feature: MA Experiment 20000346 PARAMETER Experiment Name: At_2mM_SA_Sub_P Parameter: Timepoint (hr) Value: 1
  misc_feature: MA Experiment 20000346 PARAMETER Experiment Name: At_2mM_SA_Sub_P Parameter: Tissue Value: Aerial
  misc_feature: MA Experiment 20000346 PARAMETER Experiment Name: At_2mM_SA_Sub_P Parameter: Treatment Value: 2mM SA vs. No Treatment
actctcacttcagacttctcttcaacgaaactagccagagagatgacgagcaagattctagttatcggagctacaggtctcatcggaaaagtcctcgtagaggaaagcgccaagtctggccacgccactttcgctctggttagagaagcctctctctccgatcccgttaaggcccaactcgttgagagattcaaagatctcggcgttaccatactctacggaagtttaagtgataaagagagcttagtgaaggcgattaaacaagtcgatgtcgtgatatcagctgttggtcggtttcaaactgaaattcttaatcaaaccaatatcatcgatgccatcaaagaatctggaaatgttaagagattcttaccgtcggaatttggtaatgacgtggatcgtacggtagccattgagccaacgctatcagagttcatcactaaagctcagataaggcgtgccattgaagctgcaaagataccttatacgtatgtcgtctcaggttgctttgcaggtctttttgttccttgtttgggtcaatgccacttgcgactcagatctcctcctagagacaaagtttcaatctatgatactggcaatggcaaagccattgtcaacactgaagaagacatcgttgcatatacattgaaagctgttgatgatccgagaacacttaacaagattctctacattcacccgcccaattacattgtatcgcagaacgatatggttggtttgtgggaggaaaagatcggtaagactctcgaaaagacttatgtttcagaggaagaactcctcaaaaccatccaagagagtaagcctccaatggattttttggtgggtctgatccatacaatccttgtgaagagtgactttacctccttcactatagatccttcttttggagttgaggcttccgagctttaccctgaagtcaagtacactagtgttgatgagtttcttaaccggtttatctga

SEQ ID NO: 91801 - protein, 324 aa, Arabidopsis thaliana
  peptide (1)..(324): Ceres Seq. ID no. 12729590
  misc_feature (17)..(324): Pfam Name: Isoflavone reductase Pfam Description: Isoflavone reductase
  misc_feature (15)..(324): Homolog of NCBI NO: 15223574 NR Description: isoflavone reductase homolog P3, putative;
  misc_feature (15)..(324): Homolog of NCBI NO: 8778426 NR Description: F18O14.30 [Arabidopsis thaliana]
  misc_feature (17)..(323): Homolog of NCBI NO: 18410820 NR Description: isoflavone reductase homolog P3; protein id: supported by cDNA: 11944., supported by cDNA: gi_17529217
  misc_feature (17)..(323): Homolog of NCBI NO: 25344798 NR Description: probable NADPH oxidoreductase, 14094-12769 - Arabidopsis thaliana >gi|10092264|gb|AAG12677.1|AC025814_1
  misc_feature (17)..(323): Homolog of NCBI NO: 15222190 NR Description: isoflavone reductase homolog P3, putative; id: At1g75290.1 [Arabidopsis thaliana] >gi|25344800|pir||D96783
  misc_feature (17)..(324): Homolog of NCBI NO: 10764491 NR Description: allergenic isoflavone reductase-like protein Bet
  misc_feature (17)..(324): Homolog of NCBI NO: 3243234 NR Description: isoflavone reductase related protein [Pyrus
  misc_feature (17)..(316): Homolog of NCBI NO: 4731376 NR Description: isoflavone reductase homolog Bet v 6.0101 [Betula
  misc_feature (17)..(324): Homolog of NCBI NO: 3114901 NR Description: phenylcoumaran benzylic ether reductase [Populus subsp. trichocarpa] >gi|3114905|emb|CAA06709.1| phenylcoumaran ether reductase [Populus balsamifera subsp. trichocarpa] [Populus
  misc_feature (17)..(323): Homolog of NCBI NO: 15222191 NR Description: isoflavone reductase homolog P3, putative; id: At1g75300.1 [Arabidopsis thaliana] >gi|25344801|pir||E96783
TLTSDFSSTKLAREMTSKILVIGATGLIGKVLVEESAKSGHATFALVREASLSDPVKAQLVERFKDLGVTILYGSLSDKESLVKAIKQVDVVISAVGRFQTEILNQTNIIDAIKESGNVKRFLPSEFGNDVDRTVAIEPTLSEFITKAQIRRAIEAAKIPYTYVVSGCFAGLFVPCLGQCHLRLRSPPRDKVSIYDTGNGKAIVNTEEDIVAYTLKAVDDPRTLNKILYIHPPNYIVSQNDMVGLWEEKIGKTLEKTYVSEEELLKTIQESKPPMDFLVGLIHTILVKSDFTSFTIDPSFGVEASELYPEVKYTSVDEFLNRFI

SEQ ID NO: 91802 - protein, 310 aa, Arabidopsis thaliana
  peptide (1)..(310): Ceres Seq. ID no. 12729591
  misc_feature (3)..(310): Pfam Name: Isoflavone reductase Pfam Description: Isoflavone reductase
  misc_feature (1)..(310): Homolog of NCBI NO: 15223574 NR Description: isoflavone reductase homolog P3, putative;
  misc_feature (1)..(310): Homolog of NCBI NO: 8778426 NR Description: F18O14.30 [Arabidopsis thaliana]
  misc_feature (3)..(309): Homolog of NCBI NO: 18410820 NR Description: isoflavone reductase homolog P3; protein id: supported by cDNA: 11944., supported by cDNA: gi_17529217
  misc_feature (3)..(309): Homolog of NCBI NO: 25344798 NR Description: probable NADPH oxidoreductase, 14094-12769 - Arabidopsis thaliana >gi|10092264|gb|AAG12677.1|AC025814_1
  misc_feature (3)..(309): Homolog of NCBI NO: 15222190 NR Description: isoflavone reductase homolog P3, putative; id: At1g75290.1 [Arabidopsis thaliana] >gi|25344800|pir||D96783
  misc_feature (3)..(310): Homolog of NCBI NO: 10764491 NR Description: allergenic isoflavone reductase-like protein Bet
  misc_feature (3)..(310): Homolog of NCBI NO: 3243234 NR Description: isoflavone reductase related protein [Pyrus
  misc_feature (3)..(302): Homolog of NCBI NO: 4731376 NR Description: isoflavone reductase homolog Bet v 6.0101 [Betula
  misc_feature (3)..(310): Homolog of NCBI NO: 3114901 NR Description: phenylcoumaran benzylic ether reductase [Populus subsp. trichocarpa] >gi|3114905|emb|CAA06709.1| phenylcoumaran ether reductase [Populus balsamifera subsp. trichocarpa] [Populus
  misc_feature (3)..(309): Homolog of NCBI NO: 15222191 NR Description: isoflavone reductase homolog P3, putative; id: At1g75300.1 [Arabidopsis thaliana] >gi|25344801|pir||E96783
MTSKILVIGATGLIGKVLVEESAKSGHATFALVREASLSDPVKAQLVERFKDLGVTILYGSLSDKESLVKAIKQVDVVISAVGRFQTEILNQTNIIDAIKESGNVKRFLPSEFGNDVDRTVAIEPTLSEFITKAQIRRAIEAAKIPYTYVVSGCFAGLFVPCLGQCHLRLRSPPRDKVSIYDTGNGKAIVNTEEDIVAYTLKAVDDPRTLNKILYIHPPNYIVSQNDMVGLWEEKIGKTLEKTYVSEEELLKTIQESKPPMDFLVGLIHTILVKSDFTSFTIDPSFGVEASELYPEVKYTSVDEFLNRFI

SEQ ID NO: 91803 - DNA, 4474 bp, Arabidopsis thaliana
  misc_feature (1)..(4474): Ceres Seq. ID no. 12729600
  misc_feature: MA Experiment ID: 20000180 Result: Up-regulated in Transcription
  misc_feature: MA Experiment 20000180 PARAMETER Experiment Name: At_Germinating_Seeds_P Parameter: Age (hr) Value: 24 vs. 0
  misc_feature: MA Experiment 20000180 PARAMETER Experiment Name: At_Germinating_Seeds_P Parameter: Tissue Value: Germinating Seeds
  misc_feature: MA Experiment ID: 20000185 Result: Down-regulated in Transcription
  misc_feature: MA Experiment 20000185 PARAMETER Experiment Name: At_Roots__P Parameter: Age (day) Value: 7 vs. 21
  misc_feature: MA Experiment 20000185 PARAMETER Experiment Name: At_Roots__P Parameter: Organism Value: A. thaliana
  misc_feature: MA Experiment 20000185 PARAMETER Experiment Name: At_Roots__P Parameter: Tissue Value: Roots vs. Whole Plant
  misc_feature: MA Experiment ID: 20000227 Result: Down-regulated in Transcription
  misc_feature: MA Experiment 20000227 PARAMETER Experiment Name: At_Root-Tips-vs-Tops_P Parameter: Tissue Value: Root Tips vs. Root Tops
  misc_feature: MA Experiment ID: 20000438 Result: Up-regulated in Transcription
  misc_feature: MA Experiment 20000438 PARAMETER Experiment Name: At_Shoots__P Parameter: Age (day) Value: 14
  misc_feature: MA Experiment 20000438 PARAMETER Experiment Name: At_Shoots__P Parameter: Tissue Value: Shoots vs. Whole Plant
  misc_feature: MA Experiment ID: 20001248 Result: Down-regulated in Transcription
  misc_feature: MA Experiment 20001248 PARAMETER Experiment Name: At_Far-red-induction_P Parameter: Age (day) Value: 7
  misc_feature: MA Experiment 20001248 PARAMETER Experiment Name: At_Far-red-induction_P Parameter: Light Value: Far-red vs. White
  misc_feature: MA Experiment 20001248 PARAMETER Experiment Name: At_Far-red-induction_P Parameter: Organism Value: A. thaliana
  misc_feature: MA Experiment 20001248 PARAMETER Experiment Name: At_Far-red-induction_P Parameter: Plant Line Value: Columbia
  misc_feature: MA Experiment 20001248 PARAMETER Experiment Name: At_Far-red-induction_P Parameter: Timepoint (hr) Value: 4
  misc_feature: MA Experiment 20001248 PARAMETER Experiment Name: At_Far-red-induction_P Parameter: Tissue Value: Whole Plant
  misc_feature: MA Experiment ID: 20001451 Result: Down-regulated in Transcription
  misc_feature: MA Experiment 20001451 PARAMETER Experiment Name: At_Far-red-induction_P Parameter: Age (day) Value: 7
  misc_feature: MA Experiment 20001451 PARAMETER Experiment Name: At_Far-red-induction_P Parameter: Light Value: Far-red vs. White
  misc_feature: MA Experiment 20001451 PARAMETER Experiment Name: At_Far-red-induction_P Parameter: Organism Value: A. thaliana
  misc_feature: MA Experiment 20001451 PARAMETER Experiment Name: At_Far-red-induction_P Parameter: Plant Line Value: Columbia
  misc_feature: MA Experiment 20001451 PARAMETER Experiment Name: At_Far-red-induction_P Parameter: Timepoint (hr) Value: 24
  misc_feature: MA Experiment 20001451 PARAMETER Experiment Name: At_Far-red-induction_P Parameter: Tissue Value: Whole Plant
  misc_feature: MA Experiment ID: 20001911 Result: Up-regulated in Transcription
  misc_feature: MA Experiment 20001911 PARAMETER Experiment Name: At_Drought_Reproduction_P Parameter: Age (day) Value: 40
  misc_feature: MA Experiment 20001911 PARAMETER Experiment Name: At_Drought_Reproduction_P Parameter: Organism Value: A. thaliana
  misc_feature: MA Experiment 20001911 PARAMETER Experiment Name: At_Drought_Reproduction_P Parameter: Plant Line Value: WS
  misc_feature: MA Experiment 20001911 PARAMETER Experiment Name: At_Drought_Reproduction_P Parameter: Timepoint (day) Value: 10
  misc_feature: MA Experiment 20001911 PARAMETER Experiment Name: At_Drought_Reproduction_P Parameter: Tissue Value: Flowers
  misc_feature: MA Experiment 20001911 PARAMETER Experiment Name: At_Drought_Reproduction_P Parameter: Treatment Value: Drought vs. No Drought
atggaaaagctcttcgtaccatcatttcccaaaacttttttgaattatcagactccagctaaagtagagaattcgcctgaacttcatccaaaatccagaaagaaaaacctatcattcaccaagaagaaagaacccaatatcattcccgacgagcaattcgattacttgtgtagaaacggaagtttgctcgaagctgagaaagctctggactcgttgtttcaacaaggttccaaggtaaaacgaagcacttacctcaaattgttggaatcgtgtattgattctggttctatccatttgggtcgtatccttcatgctcggtttggtttgtttactgaacctgacgtctttgtggagacgaagctgttgagcatgtatgctaaatgtgggtgtattgctgatgcacgtaaggtgtttgattcaatgcgtgagagaaatctgtttacatggtctgctatgattggtgcttactcgagggagaatcggtggagagaggtggcgaagctctttcgtttgatgatgaaagatggtgttttgcctgatgatttcttgtttcctaagatattacagggatgtgctaattgtggagatgttgaggctgggaaggtgattcattcggtggttataaaactcgggatgagttcgtgtcttcgtgttagtaactcgattttagctgtgtatgcgaaatgtggtgaattggatttcgctaccaagttttttagacgtatgagggagagagatgtgattgcttggaactcagtactgttagcttactgccaaaatggtaaacatgaagaagctgtagaattggttaaagagatggaaaaggaaggaatttctcctgggttagttacttggaacatactgattgggggttataaccagctagggaaatgtgatgctgcaatggatttgatgcagaagatggagacttttggtataactgctgatgtgtttacgtggacagctatgatttcgggtttgattcataatgggatgagatatcaggcattagatatgtttaggaagatgtttttagcgggtgtagtgccaaatgcagtcactattatgagtgctgtgtctgcttgttcatgtttgaaagttataaaccagggctcagaagttcattctattgctgtgaagatgggatttatcgatgatgtgcttgtgggcaattctctggttgatatgtattcaaagtgtggaaaactggaagatgcaaggaaagtttttgattcggtaaagaataaggatgtatatacttggaactcaatgataacagggtattgccaagcaggctattgtgggaaggcttatgagttgtttacgaggatgcaagatgcaaatttaagaccaaatattatcacatggaacacaatgatctcaggatatattaagaatggagacgagggtgaggctatggacttatttcagaggatggaaaaagatggaaaagttcagcggaatactgcaacatggaatctaattattgcaggttacatacaaaacggaaaaaaagacgaggccttggaactttttcgaaaaatgcagttttctcgcttcatgccaaattcagttaccattctaagtctcttaccagcgtgtgctaatcttcttggggcaaaaatggtaagagagatacacggttgcgtattgcggagaaatcttgatgctattcatgccgttaaaaacgctttaacagatacttatgctaagtcaggggatatagaatactcaagaaccatcttcctgggtatggaaacgaaagacatcataacttggaactcgctgattggaggttatgttttacatggtagctatggtccagctcttgctctttttaatcaaatgaagacacaggggattacgccgaacaggggaacgctttcgagtattattcttgcgcacggtctaatgggaaatgtagacgaaggaaagaaagttttctacagcattgcgaatgattaccatattattcctgctctggaacattgttctgctatggtatatttgtatggacgagccaacagacttgaagaagctctgcagtttatccaggagatgaatattcaatcagagacacccatctgggaaagcttcttaactggctgcaggattcatggtgatattgacatggcaatccatgccgcagagaacttattctccttggaacctgaaaatacagccactgaaagtattgtttcgcagatctatgcattaggtgcaaaacttgggagatcattagaaggaaataaaccgaggagagataacctgttgaagaaacctctcgggcagagctggattgaagtcagaaatttaattcacacattcacgacaggtgatcagtcgaaattatgtactgatgtgctgtatcccttggtggaaaaaatgagtaggctggataatagaagtgaccaatataatggagaactttggattgaggaagaaggaagggaagaaacttgtggaatccacagtgaaaaatttgccatggcgtttggtctcatttcgtcatccggtgcatctaagacgacgataaggatcttgaaaaatcttaggatgtgccgagactgccatgatactgcaaagacacaagatgcttgcaccactttaagaatggagattgttcctagtgttgaaggcaagcctgcatcacttggcccatggggaggccagagtggtcatgcctgggatgatggaatgtacaccacagtaaagcaaataattatagcccatggttctggaatagactccatacaaattgagtatgacaaaaacggtagctcggtttggtctgaaaaacgtggaggaaagggaggcaagaagtttgataaggtcaaatttgattacccacatgagtatctgatttcagtaaatggaacctacggtagctttgacgtctggggaactatatgtgtccgatcacttactttcgagagtaaccgcagaaaatatggaccgtttggtgttgattcaggtacattctttgcattgccaaaatcaggatcgaagattattgggttccatgggaaggctggttggtatttggatgctattggtgttcacactcaaccaattcctaaagagaataatccttcgtcgaaaatccttttgcactcgcatcaaagtttttctcagggtgataagaaacatgagtactcagtgctacaaggaagtgtagggcaaaactttgatatagttgttaccctcagaaagaaagatccaactttgccttcttttgagtcccgagattccgcaggagccgaggtcaccaaacataagttggtgacagatactgagaagtcacagtcaaaaattgaaggtggcgcgaaaacatatggaccatggggcggaaccggtggaatcatgtttgacgatgggatttataccggtattcgacaaatcaatttgtcacgcaatgtcgggattgtgtcgatgaaggtctgttatgattttagaggacaagctgtgtggggaagcaaacatggtggcgtgggaggattcaaacatgataagattgtatttgactacccttcagaggttttaacacatgtaacgggaacatatgggccgctgatgtatatgggacctaatgtgataaagtcactgactttccgcaccaacagaggaaagcatggaccttatggagaagaacaaggaccgtcttttacacatcaaatggacgagggtaaagttgttggattccttggaagagagggtttatttcttgattccataggtgttcatgttatggaatgcaaaataagttcccttaagccatcatctcctcacaatgcaattgttcctcataataactccggcactgcgcaaatagaaaattccccatgggctaataagctagtccttgcagcaaacggccatggcgaagaggttgatcgtggagtcgtcaaagaaccaacaccgagcgggcctggaccgtggggaggtgacggaggtcaagcttgggacgatggagtattttcagggatcaagcagatatttgtgacaagaggaaatgatgctatcacttcaatacaaattgagtacgataggaatggacaatctgtttggtccattaaacatggtggtgacagcaatggagtcgctacacacagaattaaatttgagtatccagatgaatcgatcacctgcatttcagggtattacggacctctgaacaattcagaccgatataatgttgtcaagtctctgagtttctacacgagccgtgggaggtacgggccatacggtgaagaaaccgggacgtttttcacttcgactacaacacaaggaaaagttttggggttccatggaaggagtagctttcacttggacgccattggagtgcatatgcagcattggcttggcaacaataagtcttattacagcagggctagttgtttcaagctcttctgataatcttctctgcgcaacaagaaaacatctaacctggttccaccgacgcttacagttatcc

SEQ ID NO: 91804 - protein, 1470 aa, Arabidopsis thaliana
  peptide (1)..(1470): Ceres Seq. ID no. 12729601
  misc_feature (1318)..(1452): Pfam Name: Jacalin-like lectin domain Pfam Description: Jacalin-like lectin domain
  misc_feature (490)..(862): Homolog of NCBI NO: 25453570 NR Description: hypothetical protein DYW7 [imported] - thaliana (fragment) >gi|7799758|emb|CAA06829.1| DYW7 protein
  misc_feature (105)..(862): Homolog of NCBI NO: 30103011 NR Description: putative pentatricopeptide repeat containing
  misc_feature (899)..(1456): Homolog of NCBI NO: 34910006 NR Description: P0413G02.3 [Oryza sativa (japonica
  misc_feature (492)..(862): Homolog of NCBI NO: 22093801 NR Description: hypothetical protein~predicted by
  misc_feature (300)..(463): Homolog of NCBI NO: 22093801 NR Description: hypothetical protein~predicted by
  misc_feature (71)..(862): Homolog of NCBI NO: 9279687 NR Description: gb|AAC35225.1~gene_id:MWI23.6~strong similarity
  misc_feature (71)..(862): Homolog of NCBI NO: 15228829 NR Description: hypothetical protein; protein id: At3g22690.1
  misc_feature (220)..(862): Homolog of NCBI NO: 15235498 NR Description: hypothetical protein; protein id: At4g02750.1
  misc_feature (316)..(862): Homolog of NCBI NO: 15229097 NR Description: putative protein; protein id: At3g49140.1
  misc_feature (449)..(862): Homolog of NCBI NO: 18394615 NR Description: hypothetical protein; protein id: At1g18485.1
MEKLFVPSFPKTFLNYQTPAKVENSPELHPKSRKKNLSFTKKKEPNIIPDEQFDYLCRNGSLLEAEKALDSLFQQGSKVKRSTYLKLLESCIDSGSIHLGRILHARFGLFTEPDVFVETKLLSMYAKCGCIADARKVFDSMRERNLFTWSAMIGAYSRENRWREVAKLFRLMMKDGVLPDDFLFPKILQGCANCGDVEAGKVIHSVVIKLGMSSCLRVSNSILAVYAKCGELDFATKFFRRMRERDVIAWNSVLLAYCQNGKHEEAVELVKEMEKEGISPGLVTWNILIGGYNQLGKCDAAMDLMQKMETFGITADVFTWTAMISGLIHNGMRYQALDMFRKMFLAGVVPNAVTIMSAVSACSCLKVINQGSEVHSIAVKMGFIDDVLVGNSLVDMYSKCGKLEDARKVFDSVKNKDVYTWNSMITGYCQAGYCGKAYELFTRMQDANLRPNIITWNTMISGYIKNGDEGEAMDLFQRMEKDGKVQRNTATWNLIIAGYIQNGKKDEALELFRKMQFSRFMPNSVTILSLLPACANLLGAKMVREIHGCVLRRNLDAIHAVKNALTDTYAKSGDIEYSRTIFLGMETKDIITWNSLIGGYVLHGSYGPALALFNQMKTQGITPNRGTLSSIILAHGLMGNVDEGKKVFYSIANDYHIIPALEHCSAMVYLYGRANRLEEALQFIQEMNIQSETPIWESFLTGCRIHGDIDMAIHAAENLFSLEPENTATESIVSQIYALGAKLGRSLEGNKPRRDNLLKKPLGQSWIEVRNLIHTFTTGDQSKLCTDVLYPLVEKMSRLDNRSDQYNGELWIEEEGREETCGIHSEKFAMAFGLISSSGASKTTIRILKNLRMCRDCHDTAKTQDACTTLRMEIVPSVEGKPASLGPWGGQSGHAWDDGMYTTVKQIIIAHGSGIDSIQIEYDKNGSSVWSEKRGGKGGKKFDKVKFDYPHEYLISVNGTYGSFDVWGTICVRSLTFESNRRKYGPFGVDSGTFFALPKSGSKIIGFHGKAGWYLDAIGVHTQPIPKENNPSSKILLHSHQSFSQGDKKHEYSVLQGSVGQNFDIVVTLRKKDPTLPSFESRDSAGAEVTKHKLVTDTEKSQSKIEGGAKTYGPWGGTGGIMFDDGIYTGIRQINLSRNVGIVSMKVCYDFRGQAVWGSKHGGVGGFKHDKIVFDYPSEVLTHVTGTYGPLMYMGPNVIKSLTFRTNRGKHGPYGEEQGPSFTHQMDEGKVVGFLGREGLFLDSIGVHVMECKISSLKPSSPHNAIVPHNNSGTAQIENSPWANKLVLAANGHGEEVDRGVVKEPTPSGPGPWGGDGGQAWDDGVFSGIKQIFVTRGNDAITSIQIEYDRNGQSVWSIKHGGDSNGVATHRIKFEYPDESITCISGYYGPLNNSDRYNVVKSLSFYTSRGRYGPYGEETGTFFTSTTTQGKVLGFHGRSSFHLDAIGVHMQHWLGNNKSYYSRASCFKLF

SEQ ID NO: 91805 - protein, 1347 aa, Arabidopsis thaliana
  peptide (1)..(1347): Ceres Seq. ID no. 12729602
  misc_feature (1195)..(1329): Pfam Name: Jacalin-like lectin domain Pfam Description: Jacalin-like lectin domain
  misc_feature (367)..(739): Homolog of NCBI NO: 25453570 NR Description: hypothetical protein DYW7 [imported] - thaliana (fragment) >gi|7799758|emb|CAA06829.1| DYW7 protein
  misc_feature (1)..(739): Homolog of NCBI NO: 30103011 NR Description: putative pentatricopeptide repeat containing
  misc_feature (776)..(1333): Homolog of NCBI NO: 34910006 NR Description: P0413G02.3 [Oryza sativa (japonica
  misc_feature (369)..(739): Homolog of NCBI NO: 22093801 NR Description: hypothetical protein~predicted by
  misc_feature (177)..(340): Homolog of NCBI NO: 22093801 NR Description: hypothetical protein~predicted by
  misc_feature (1)..(739): Homolog of NCBI NO: 9279687 NR Description: gb|AAC35225.1~gene_id:MWI23.6~strong similarity
  misc_feature (1)..(739): Homolog of NCBI NO: 15228829 NR Description: hypothetical protein; protein id: At3g22690.1
  misc_feature (97)..(739): Homolog of NCBI NO: 15235498 NR Description: hypothetical protein; protein id: At4g02750.1
  misc_feature (193)..(739): Homolog of NCBI NO: 15229097 NR Description: putative protein; protein id: At3g49140.1
  misc_feature (326)..(739): Homolog of NCBI NO: 18394615 NR Description: hypothetical protein; protein id: At1g18485.1
MYAKCGCIADARKVFDSMRERNLFTWSAMIGAYSRENRWREVAKLFRLMMKDGVLPDDFLFPKILQGCANCGDVEAGKVIHSVVIKLGMSSCLRVSNSILAVYAKCGELDFATKFFRRMRERDVIAWNSVLLAYCQNGKHEEAVELVKEMEKEGISPGLVTWNILIGGYNQLGKCDAAMDLMQKMETFGITADVFTWTAMISGLIHNGMRYQALDMFRKMFLAGVVPNAVTIMSAVSACSCLKVINQGSEVHSIAVKMGFIDDVLVGNSLVDMYSKCGKLEDARKVFDSVKNKDVYTWNSMITGYCQAGYCGKAYELFTRMQDANLRPNIITWNTMISGYIKNGDEGEAMDLFQRMEKDGKVQRNTATWNLIIAGYIQNGKKDEALELFRKMQFSRFMPNSVTILSLLPACANLLGAKMVREIHGCVLRRNLDAIHAVKNALTDTYAKSGDIEYSRTIFLGMETKDIITWNSLIGGYVLHGSYGPALALFNQMKTQGITPNRGTLSSIILAHGLMGNVDEGKKVFYSIANDYHIIPALEHCSAMVYLYGRANRLEEALQFIQEMNIQSETPIWESFLTGCRIHGDIDMAIHAAENLFSLEPENTATESIVSQIYALGAKLGRSLEGNKPRRDNLLKKPLGQSWIEVRNLIHTFTTGDQSKLCTDVLYPLVEKMSRLDNRSDQYNGELWIEEEGREETCGIHSEKFAMAFGLISSSGASKTTIRILKNLRMCRDCHDTAKTQDACTTLRMEIVPSVEGKPASLGPWGGQSGHAWDDGMYTTVKQIIIAHGSGIDSIQIEYDKNGSSVWSEKRGGKGGKKFDKVKFDYPHEYLISVNGTYGSFDVWGTICVRSLTFESNRRKYGPFGVDSGTFFALPKSGSKIIGFHGKAGWYLDAIGVHTQPIPKENNPSSKILLHSHQSFSQGDKKHEYSVLQGSVGQNFDIVVTLRKKDPTLPSFESRDSAGAEVTKHKLVTDTEKSQSKIEGGAKTYGPWGGTGGIMFDDGIYTGIRQINLSRNVGIVSMKVCYDFRGQAVWGSKHGGVGGFKHDKIVFDYPSEVLTHVTGTYGPLMYMGPNVIKSLTFRTNRGKHGPYGEEQGPSFTHQMDEGKVVGFLGREGLFLDSIGVHVMECKISSLKPSSPHNAIVPHNNSGTAQIENSPWANKLVLAANGHGEEVDRGVVKEPTPSGPGPWGGDGGQAWDDGVFSGIKQIFVTRGNDAITSIQIEYDRNGQSVWSIKHGGDSNGVATHRIKFEYPDESITCISGYYGPLNNSDRYNVVKSLSFYTSRGRYGPYGEETGTFFTSTTTQGKVLGFHGRSSFHLDAIGVHMQHWLGNNKSYYSRASCFKLF

SEQ ID NO: 91806 - protein, 1330 aa, Arabidopsis thaliana
  peptide (1)..(1330): Ceres Seq. ID no. 12729603
  misc_feature (1178)..(1312): Pfam Name: Jacalin-like lectin domain Pfam Description: Jacalin-like lectin domain
  misc_feature (350)..(722): Homolog of NCBI NO: 25453570 NR Description: hypothetical protein DYW7 [imported] - thaliana (fragment) >gi|7799758|emb|CAA06829.1| DYW7 protein
  misc_feature (1)..(722): Homolog of NCBI NO: 30103011 NR Description: putative pentatricopeptide repeat containing
  misc_feature (759)..(1316): Homolog of NCBI NO: 34910006 NR Description: P0413G02.3 [Oryza sativa (japonica
  misc_feature (352)..(722): Homolog of NCBI NO: 22093801 NR Description: hypothetical protein~predicted by
  misc_feature (160)..(323): Homolog of NCBI NO: 22093801 NR Description: hypothetical protein~predicted by
  misc_feature (1)..(722): Homolog of NCBI NO: 9279687 NR Description: gb|AAC35225.1~gene_id:MWI23.6~strong similarity
  misc_feature (1)..(722): Homolog of NCBI NO: 15228829 NR Description: hypothetical protein; protein id: At3g22690.1
  misc_feature (80)..(722): Homolog of NCBI NO: 15235498 NR Description: hypothetical protein; protein id: At4g02750.1
  misc_feature (176)..(722): Homolog of NCBI NO: 15229097 NR Description: putative protein; protein id: At3g49140.1
  misc_feature (309)..(722): Homolog of NCBI NO: 18394615 NR Description: hypothetical protein; protein id: At1g18485.1
MRERNLFTWSAMIGAYSRENRWREVAKLFRLMMKDGVLPDDFLFPKILQGCANCGDVEAGKVIHSVVIKLGMSSCLRVSNSILAVYAKCGELDFATKFFRRMRERDVIAWNSVLLAYCQNGKHEEAVELVKEMEKEGISPGLVTWNILIGGYNQLGKCDAAMDLMQKMETFGITADVFTWTAMISGLIHNGMRYQALDMFRKMFLAGVVPNAVTIMSAVSACSCLKVINQGSEVHSIAVKMGFIDDVLVGNSLVDMYSKCGKLEDARKVFDSVKNKDVYTWNSMITGYCQAGYCGKAYELFTRMQDANLRPNIITWNTMISGYIKNGDEGEAMDLFQRMEKDGKVQRNTATWNLIIAGYIQNGKKDEALELFRKMQFSRFMPNSVTILSLLPACANLLGAKMVREIHGCVLRRNLDAIHAVKNALTDTYAKSGDIEYSRTIFLGMETKDIITWNSLIGGYVLHGSYGPALALFNQMKTQGITPNRGTLSSIILAHGLMGNVDEGKKVFYSIANDYHIIPALEHCSAMVYLYGRANRLEEALQFIQEMNIQSETPIWESFLTGCRIHGDIDMAIHAAENLFSLEPENTATESIVSQIYALGAKLGRSLEGNKPRRDNLLKKPLGQSWIEVRNLIHTFTTGDQSKLCTDVLYPLVEKMSRLDNRSDQYNGELWIEEEGREETCGIHSEKFAMAFGLISSSGASKTTIRILKNLRMCRDCHDTAKTQDACTTLRMEIVPSVEGKPASLGPWGGQSGHAWDDGMYTTVKQIIIAHGSGIDSIQIEYDKNGSSVWSEKRGGKGGKKFDKVKFDYPHEYLISVNGTYGSFDVWGTICVRSLTFESNRRKYGPFGVDSGTFFALPKSGSKIIGFHGKAGWYLDAIGVHTQPIPKENNPSSKILLHSHQSFSQGDKKHEYSVLQGSVGQNFDIVVTLRKKDPTLPSFESRDSAGAEVTKHKLVTDTEKSQSKIEGGAKTYGPWGGTGGIMFDDGIYTGIRQINLSRNVGIVSMKVCYDFRGQAVWGSKHGGVGGFKHDKIVFDYPSEVLTHVTGTYGPLMYMGPNVIKSLTFRTNRGKHGPYGEEQGPSFTHQMDEGKVVGFLGREGLFLDSIGVHVMECKISSLKPSSPHNAIVPHNNSGTAQIENSPWANKLVLAANGHGEEVDRGVVKEPTPSGPGPWGGDGGQAWDDGVFSGIKQIFVTRGNDAITSIQIEYDRNGQSVWSIKHGGDSNGVATHRIKFEYPDESITCISGYYGPLNNSDRYNVVKSLSFYTSRGRYGPYGEETGTFFTSTTTQGKVLGFHGRSSFHLDAIGVHMQHWLGNNKSYYSRASCFKLF

SEQ ID NO: 91807 - DNA, 1038 bp, Arabidopsis thaliana
  misc_feature (1)..(1038): Ceres Seq. ID no. 12729604
  misc_feature: MA Experiment ID: 20000440 Result: Up-regulated in Transcription
  misc_feature: MA Experiment 20000440 PARAMETER Experiment Name: At_Closed-Flower__Sub_P Parameter: Tissue Value: Closed Flower vs. Whole Plant
atggctggattgttctatctaggagggagagatcacaacaaacaagatcatcatcaagaaaaggatcataatgaagacaagagcaacaattatctctatctatacaaagacgagatctacaacaacaacaagggttttgagattttccctcctcaatattttcaacaacaacagcaacaaaatcatgcggctgctccaacaaatctctactcttttggtatggtcccgagtggtggtaacataaacaataaccggagtactaatcggagtttgtacttcaacgtcgtctccgatcatgagccggtgagatcctcaacgggagggtttacggtaacgagacaagggaacatgaattgccaagactgtgggaatcaagccaagaaagattgtcctcatatgagatgtcgtacttgttgtaagagccgagggtttgattgccaaacacacgtgaagagcacgtgggtctcggctgctaaacgccgtgagagacaggctcagttagctgttttgccagctaagcgtataagagacgctaactcaaggggtggtggggatgacgatgatgatgacaaagaggacgagaaaaatgacagttgtggtggtggctcggctcttgcttgcacccgtgtggttaatgctagttcttcagggttagagactagtcacttaccaccggagataagttccccggctgttttccggtgtatgagagtcagctcaatcgacgatgaagacgaagagtatgcttatcaaacggctgttagcattggaggacacgtgttcaaaggcattctctacgaccaaggtccatcgtcagatcaccaccgttacagctcaagcctcaatggcgaaacctctcatcaacaccatcttaacctcatggactcaactccttcagccgcaactacaaacgccgtgaccgccgttaacactaacaacggatctattgacccttcttccctttacactgcggtggcaactccgttcaacgcctttgtcgccggtggtacgcctttctttgcatcttctaggtgttga

SEQ ID NO: 91808 - protein, 345 aa, Arabidopsis thaliana
  peptide (1)..(345): Ceres Seq. ID no. 12729605
  misc_feature (110)..(273): Pfam Name: Domain of unknown function (DUF702) Pfam Description: Domain of unknown function (DUF702)
  misc_feature (1)..(345): Homolog of NCBI NO: 15223669 NR Description: hypothetical protein; protein id: At1g19790.1
  misc_feature (1)..(344): Homolog of NCBI NO: 15222285 NR Description: unknown protein; protein id: At1g75520.1
  misc_feature (97)..(344): Homolog of NCBI NO: 15239350 NR Description: zinc finger protein SHI-like; protein id: supported by cDNA: gi_4929802 [Arabidopsis thaliana] putative zinc finger protein SHI [Arabidopsis thaliana]
  misc_feature (41)..(328): Homolog of NCBI NO: 15234365 NR Description: putative protein; protein id: At4g36260.1
  misc_feature (77)..(322): Homolog of NCBI NO: 34906658 NR Description: putative LRP(lateral root primordia) 1 [Oryza
  misc_feature (82)..(183): Homolog of NCBI NO: 15224110 NR Description: unknown protein; protein id: At2g18120.1
  misc_feature (200)..(276): Homolog of NCBI NO: 15224110 NR Description: unknown protein; protein id: At2g18120.1
  misc_feature (80)..(306): Homolog of NCBI NO: 882341 NR Description: LRP1
  misc_feature (80)..(306): Homolog of NCBI NO: 18416839 NR Description: lateral root primordia (LRP1); protein id: [Arabidopsis thaliana] >gi|14586363|emb|CAC42894.1| lateral root
  misc_feature (222)..(307): Homolog of NCBI NO: 15226540 NR Description: hypothetical protein; protein id: At2g21400.1
MAGLFYLGGRDHNKQDHHQEKDHNEDKSNNYLYLYKDEIYNNNKGFEIFPPQYFQQQQQQNHAAAPTNLYSFGMVPSGGNINNNRSTNRSLYFNVVSDHEPVRSSTGGFTVTRQGNMNCQDCGNQAKKDCPHMRCRTCCKSRGFDCQTHVKSTWVSAAKRRERQAQLAVLPAKRIRDANSRGGGDDDDDDKEDEKNDSCGGGSALACTRVVNASSSGLETSHLPPEISSPAVFRCMRVSSIDDEDEEYAYQTAVSIGGHVFKGILYDQGPSSDHHRYSSSLNGETSHQHHLNLMDSTPSAATTNAVTAVNTNNGSIDPSSLYTAVATPFNAFVAGGTPFFASSRC

SEQ ID NO: 91809 - protein, 272 aa, Arabidopsis thaliana
  peptide (1)..(272): Ceres Seq. ID no. 12729606
  misc_feature (37)..(200): Pfam Name: Domain of unknown function (DUF702) Pfam Description: Domain of unknown function (DUF702)
  misc_feature (1)..(272): Homolog of NCBI NO: 15223669 NR Description: hypothetical protein; protein id: At1g19790.1
  misc_feature (1)..(271): Homolog of NCBI NO: 15222285 NR Description: unknown protein; protein id: At1g75520.1
  misc_feature (24)..(271): Homolog of NCBI NO: 15239350 NR Description: zinc finger protein SHI-like; protein id: supported by cDNA: gi_4929802 [Arabidopsis thaliana] putative zinc finger protein SHI [Arabidopsis thaliana]
  misc_feature (1)..(255): Homolog of NCBI NO: 15234365 NR Description: putative protein; protein id: At4g36260.1
  misc_feature (4)..(249): Homolog of NCBI NO: 34906658 NR Description: putative LRP(lateral root primordia) 1 [Oryza
  misc_feature (9)..(110): Homolog of NCBI NO: 15224110 NR Description: unknown protein; protein id: At2g18120.1
  misc_feature (127)..(203): Homolog of NCBI NO: 15224110 NR Description: unknown protein; protein id: At2g18120.1
  misc_feature (7)..(233): Homolog of NCBI NO: 882341 NR Description: LRP1
  misc_feature (7)..(233): Homolog of NCBI NO: 18416839 NR Description: lateral root primordia (LRP1); protein id: [Arabidopsis thaliana] >gi|14586363|emb|CAC42894.1| lateral root
  misc_feature (149)..(234): Homolog of NCBI NO: 15226540 NR Description: hypothetical protein; protein id: At2g21400.1
MVPSGGNINNNRSTNRSLYFNVVSDHEPVRSSTGGFTVTRQGNMNCQDCGNQAKKDCPHMRCRTCCKSRGFDCQTHVKSTWVSAAKRRERQAQLAVLPAKRIRDANSRGGGDDDDDDKEDEKNDSCGGGSALACTRVVNASSSGLETSHLPPEISSPAVFRCMRVSSIDDEDEEYAYQTAVSIGGHVFKGILYDQGPSSDHHRYSSSLNGETSHQHHLNLMDSTPSAATTNAVTAVNTNNGSIDPSSLYTAVATPFNAFVAGGTPFFASSRC

SEQ ID NO: 91810 - protein, 229 aa, Arabidopsis thaliana
  peptide (1)..(229): Ceres Seq. ID no. 12729607
  misc_feature (1)..(157): Pfam Name: Domain of unknown function (DUF702) Pfam Description: Domain of unknown function (DUF702)
  misc_feature (1)..(229): Homolog of NCBI NO: 15223669 NR Description: hypothetical protein; protein id: At1g19790.1
  misc_feature (1)..(228): Homolog of NCBI NO: 15222285 NR Description: unknown protein; protein id: At1g75520.1
  misc_feature (1)..(228): Homolog of NCBI NO: 15239350 NR Description: zinc finger protein SHI-like; protein id: supported by cDNA: gi_4929802 [Arabidopsis thaliana] putative zinc finger protein SHI [Arabidopsis thaliana]
  misc_feature (1)..(212): Homolog of NCBI NO: 15234365 NR Description: putative protein; protein id: At4g36260.1
  misc_feature (1)..(206): Homolog of NCBI NO: 34906658 NR Description: putative LRP(lateral root primordia) 1 [Oryza
  misc_feature (1)..(67): Homolog of NCBI NO: 15224110 NR Description: unknown protein; protein id: At2g18120.1
  misc_feature (84)..(160): Homolog of NCBI NO: 15224110 NR Description: unknown protein; protein id: At2g18120.1
  misc_feature (1)..(190): Homolog of NCBI NO: 882341 NR Description: LRP1
  misc_feature (1)..(190): Homolog of NCBI NO: 18416839 NR Description: lateral root primordia (LRP1); protein id: [Arabidopsis thaliana] >gi|14586363|emb|CAC42894.1| lateral root
  misc_feature (106)..(191): Homolog of NCBI NO: 15226540 NR Description: hypothetical protein; protein id: At2g21400.1
MNCQDCGNQAKKDCPHMRCRTCCKSRGFDCQTHVKSTWVSAAKRRERQAQLAVLPAKRIRDANSRGGGDDDDDDKEDEKNDSCGGGSALACTRVVNASSSGLETSHLPPEISSPAVFRCMRVSSIDDEDEEYAYQTAVSIGGHVFKGILYDQGPSSDHHRYSSSLNGETSHQHHLNLMDSTPSAATTNAVTAVNTNNGSIDPSSLYTAVATPFNAFVAGGTPFFASSRC

SEQ ID NO: 91811 - DNA, 414 bp, Arabidopsis thaliana
  misc_feature (1)..(414): Ceres Seq. ID no. 12729622
  misc_feature: MA Experiment ID: 20000440 Result: Up-regulated in Transcription
  misc_feature: MA Experiment 20000440 PARAMETER Experiment Name: At_Closed-Flower__Sub_P Parameter: Tissue Value: Closed Flower vs. Whole Plant
atggcacgtacgaagcaaactgcgaggaaatctactggtggaaaaggtccaaggaaggaactcgctaccaaggcggcgaggaaaactagacgaccgtaccgtggtggagtcaagagggctcaccgtttccgtcctggaaccgtcgctcttcgtgagatccgcaaataccagaagagtaccgacttgttgatccgcaaattgcctttccaacgacttgttcgtgaaatcgcccaagattttaaggtggatttaaggttccaaagccatgcggtgctcgcacttcaagaggcagccgaagcatacttggtggggttgttcgaagacacgaatttgtgtgcgattcacgccaaaagggttacgatcatgtccaaggacattcagttggccagacgcattcgtggggaacgtgcttga

SEQ ID NO: 91812 - protein, 137 aa, Arabidopsis thaliana
  peptide (1)..(137): Ceres Seq. ID no. 12729623
  misc_feature (17)..(136): Pfam Name: Core histone H2A/H2B/H3/H4 Pfam Description: Core histone H2A/H2B/H3/H4
  misc_feature (1)..(137): Homolog of NCBI NO: 15223698 NR Description: histone H3, putative; protein id: At1g19890.1
  misc_feature (1)..(137): Homolog of NCBI NO: 15236103 NR Description: histone H3.3; protein id: At4g40030.1, supported cDNA: gi_14326561 [Arabidopsis thaliana] Histon H3; protein id: At4g40040.1, supported by cDNA: 2670.
  misc_feature (1)..(137): Homolog of NCBI NO: 18698662 NR Description: disease-resistent-related protein [Oryza sativa]
  misc_feature (1)..(137): Homolog of NCBI NO: 122090 NR Description: Histone H3 >gi|81287|pir||S00940 histone H3 -
  misc_feature (1)..(137): Homolog of NCBI NO: 2119018 NR Description: histone H3 (clone CH-I) - Chlamydomonas
  misc_feature (1)..(137): Homolog of NCBI NO: 15232146 NR Description: histone H3, putative; protein id: At3g27360.1, by cDNA: gi_14335141, supported by cDNA: gi_18655352 [Arabidopsis >gi|15238433|ref|NP_201339.1| histone H3 (sp|P05203); id:
  misc_feature (1)..(137): Homolog of NCBI NO: 122087 NR Description: Histone H3 >gi|81849|pir||S04520 histone H3
  misc_feature (1)..(137): Homolog of NCBI NO: 19880141 NR Description: histone 3 [Eimeria tenella]
  misc_feature (1)..(137): Homolog of NCBI NO: 28192620 NR Description: histone H3 [Toxoplasma gondii]
  misc_feature (1)..(136): Homolog of NCBI NO: 33772147 NR Description: histone 3 [Malus x domestica]
MARTKQTARKSTGGKGPRKELATKAARKTRRPYRGGVKRAHRFRPGTVALREIRKYQKSTDLLIRKLPFQRLVREIAQDFKVDLRFQSHAVLALQEAAEAYLVGLFEDTNLCAIHAKRVTIMSKDIQLARRIRGERA

SEQ ID NO: 91813 - DNA, 1843 bp, Arabidopsis thaliana
  misc_feature (1)..(1843): Ceres Seq. ID no. 12729624
  misc_feature: MA Experiment ID: 20000185 Result: Up-regulated in Transcription
  misc_feature: MA Experiment 20000185 PARAMETER Experiment Name: At_Roots__P Parameter: Age (day) Value: 7 vs. 21
  misc_feature: MA Experiment 20000185 PARAMETER Experiment Name: At_Roots__P Parameter: Organism Value: A. thaliana
  misc_feature: MA Experiment 20000185 PARAMETER Experiment Name: At_Roots__P Parameter: Tissue Value: Roots vs. Whole Plant
  misc_feature: MA Experiment ID: 20000227 Result: Up-regulated in Transcription
  misc_feature: MA Experiment 20000227 PARAMETER Experiment Name: At_Root-Tips-vs-Tops_P Parameter: Tissue Value: Root Tips vs. Root Tops
  misc_feature: MA Experiment ID: 20000267 Result: Down-regulated in Transcription
  misc_feature: MA Experiment 20000267 PARAMETER Experiment Name: At_Drought_P Parameter: Age (day) Value: 7
  misc_feature: MA Experiment 20000267 PARAMETER Experiment Name: At_Drought_P Parameter: Organism Value: A. thaliana
  misc_feature: MA Experiment 20000267 PARAMETER Experiment Name: At_Drought_P Parameter: Plant Line Value: WS
  misc_feature: MA Experiment 20000267 PARAMETER Experiment Name: At_Drought_P Parameter: Timepoint (hr) Value: 6
  misc_feature: MA Experiment 20000267 PARAMETER Experiment Name: At_Drought_P Parameter: Tissue Value: Whole Plant
  misc_feature: MA Experiment 20000267 PARAMETER Experiment Name: At_Drought_P Parameter: Treatment Value: Drought vs. No Drought
  misc_feature: MA Experiment ID: 20000286 Result: Down-regulated in Transcription
  misc_feature: MA Experiment 20000286 PARAMETER Experiment Name: At_Open_Flower_P Parameter: Age (day) Value: 21
  misc_feature: MA Experiment 20000286 PARAMETER Experiment Name: At_Open_Flower_P Parameter: Plant Line Value: WS
  misc_feature: MA Experiment 20000286 PARAMETER Experiment Name: At_Open_Flower_P Parameter: Tissue Value: Half Open vs. Whole Plant
  misc_feature: MA Experiment ID: 20000436 Result: Down-regulated in Transcription
  misc_feature: MA Experiment 20000436 PARAMETER Experiment Name: At_Drought_P Parameter: Age (day) Value: 7
  misc_feature: MA Experiment 20000436 PARAMETER Experiment Name: At_Drought_P Parameter: Organism Value: A. thaliana
  misc_feature: MA Experiment 20000436 PARAMETER Experiment Name: At_Drought_P Parameter: Plant Line Value: WS
  misc_feature: MA Experiment 20000436 PARAMETER Experiment Name: At_Drought_P Parameter: Timepoint (hr) Value: 12
  misc_feature: MA Experiment 20000436 PARAMETER Experiment Name: At_Drought_P Parameter: Tissue Value: Whole Plant
  misc_feature: MA Experiment 20000436 PARAMETER Experiment Name: At_Drought_P Parameter: Treatment Value: Drought vs. No Drought
  misc_feature: MA Experiment ID: 20000437 Result: Down-regulated in Transcription
  misc_feature: MA Experiment 20000437 PARAMETER Experiment Name: At_Drought_P Parameter: Age (day) Value: 8
  misc_feature: MA Experiment 20000437 PARAMETER Experiment Name: At_Drought_P Parameter: Organism Value: A. thaliana
  misc_feature: MA Experiment 20000437 PARAMETER Experiment Name: At_Drought_P Parameter: Plant Line Value: WS
  misc_feature: MA Experiment 20000437 PARAMETER Experiment Name: At_Drought_P Parameter: Timepoint (hr) Value: 24
  misc_feature: MA Experiment 20000437 PARAMETER Experiment Name: At_Drought_P Parameter: Tissue Value: Whole Plant
  misc_feature: MA Experiment 20000437 PARAMETER Experiment Name: At_Drought_P Parameter: Treatment Value: Drought vs. No Drought
  misc_feature: MA Experiment ID: 20000439 Result: Up-regulated in Transcription
  misc_feature: MA Experiment 20000439 PARAMETER Experiment Name: At_Roots__P Parameter: Age (day) Value: 14 vs. 21
  misc_feature: MA Experiment 20000439 PARAMETER Experiment Name: At_Roots__P Parameter: Organism Value: A. thaliana
  misc_feature: MA Experiment 20000439 PARAMETER Experiment Name: At_Roots__P Parameter: Tissue Value: Roots vs. Whole Plant
  misc_feature: MA Experiment ID: 20000451 Result: Down-regulated in Transcription
  misc_feature: MA Experiment 20000451 PARAMETER Experiment Name: At_CS6879_Shoots-Roots_P Parameter: Age (day) Value: 14
  misc_feature: MA Experiment 20000451 PARAMETER Experiment Name: At_CS6879_Shoots-Roots_P Parameter: Organism Value: A. thaliana
  misc_feature: MA Experiment 20000451 PARAMETER Experiment Name: At_CS6879_Shoots-Roots_P Parameter: Plant Line Value: CS6879 vs. WS
  misc_feature: MA Experiment 20000451 PARAMETER Experiment Name: At_CS6879_Shoots-Roots_P Parameter: Tissue Value: Roots
  misc_feature: MA Experiment ID: 20001761 Result: Down-regulated in Transcription
  misc_feature: MA Experiment 20001761 PARAMETER Experiment Name: At_50mM_NH4NO3_L-to-H_P Parameter: Timepoint (hr) Value: 4
  misc_feature: MA Experiment 20001761 PARAMETER Experiment Name: At_50mM_NH4NO3_L-to-H_P Parameter: Tissue Value: Siliques
  misc_feature: MA Experiment 20001761 PARAMETER Experiment Name: At_50mM_NH4NO3_L-to-H_P Parameter: Treatment Value: 50mM NH4NO3 vs 100mM Mannitol
  misc_feature: MA Experiment ID: 20001906 Result: Up-regulated in Transcription
  misc_feature: MA Experiment 20001906 PARAMETER Experiment Name: At_Drought_Reproduction_P Parameter: Age (day) Value: 35
  misc_feature: MA Experiment 20001906 PARAMETER Experiment Name: At_Drought_Reproduction_P Parameter: Organism Value: A. thaliana
  misc_feature: MA Experiment 20001906 PARAMETER Experiment Name: At_Drought_Reproduction_P Parameter: Plant Line Value: WS
  misc_feature: MA Experiment 20001906 PARAMETER Experiment Name: At_Drought_Reproduction_P Parameter: Timepoint (day) Value: 5
  misc_feature: MA Experiment 20001906 PARAMETER Experiment Name: At_Drought_Reproduction_P Parameter: Tissue Value: Siliques
  misc_feature: MA Experiment 20001906 PARAMETER Experiment Name: At_Drought_Reproduction_P Parameter: Treatment Value: Drought vs. No Drought
  misc_feature: MA Experiment ID: 20001907 Result: Up-regulated in Transcription
  misc_feature: MA Experiment 20001907 PARAMETER Experiment Name: At_Drought_Reproduction_P Parameter: Age (day) Value: 37
  misc_feature: MA Experiment 20001907 PARAMETER Experiment Name: At_Drought_Reproduction_P Parameter: Organism Value: A. thaliana
  misc_feature: MA Experiment 20001907 PARAMETER Experiment Name: At_Drought_Reproduction_P Parameter: Plant Line Value: WS
  misc_feature: MA Experiment 20001907 PARAMETER Experiment Name: At_Drought_Reproduction_P Parameter: Timepoint (day) Value: 7
  misc_feature: MA Experiment 20001907 PARAMETER Experiment Name: At_Drought_Reproduction_P Parameter: Tissue Value: Siliques
  misc_feature: MA Experiment 20001907 PARAMETER Experiment Name: At_Drought_Reproduction_P Parameter: Treatment Value: Drought vs. No Drought
  misc_feature: MA Experiment ID: 20001908 Result: Up-regulated in Transcription
  misc_feature: MA Experiment 20001908 PARAMETER Experiment Name: At_Drought_Reproduction_P Parameter: Age (day) Value: 40
  misc_feature: MA Experiment 20001908 PARAMETER Experiment Name: At_Drought_Reproduction_P Parameter: Organism Value: A. thaliana
  misc_feature: MA Experiment 20001908 PARAMETER Experiment Name: At_Drought_Reproduction_P Parameter: Plant Line Value: WS
  misc_feature: MA Experiment 20001908 PARAMETER Experiment Name: At_Drought_Reproduction_P Parameter: Timepoint (day) Value: 10
  misc_feature: MA Experiment 20001908 PARAMETER Experiment Name: At_Drought_Reproduction_P Parameter: Tissue Value: Siliques
  misc_feature: MA Experiment 20001908 PARAMETER Experiment Name: At_Drought_Reproduction_P Parameter: Treatment Value: Drought vs. No Drought
acataccacaaaatatctcataaagatcaaataaacactaaacctgaaagcaaaaaaatggcagcacgagcaacattcatattctatgctctcttcctaaccacactccaattccttctaacacaccatgtgtcatccgccgcccgaggattatggaaatacatcgcccccaacgtcggaatctccgcgatgcatatgcaacttctccataacgaccgtgtcgtaatgtacgaccgaaccaacttcggaccatcaaacatctctctacctaacggtaactgccgtgacaacccccaagacgccgtctccaaaatcgactgcacagctcactcgatcgaatacgacgtcgcaacgaacaccatccgacctttaacggtacaatccaacacatggtgctcatccggttcggttcgaccggacggtgttcttgtccaaaccggtggagaccgagacggagaacttaagacaagaaccttttctccttgtaataacaatcaatgtgattgggtcgaaatgaacaacggtttaaaaaagagaagatggtacgcttccaaccatattcttcccgacggtaaacaaatcgtcatgggaggtcaaggacaattcaactacgagttctttcccaaaacgacaaaccctaacgtagtcgcgttaccgtttttggccgagactcatgatcaaggacaagagaataatctttatccttttgtgtttatgaataccgatgggaatctatttatgttcgctaataacagagcgatattactcgactatgttaagaacacggtggtgaaaacttttccggcgattcccggtggtgatccgagaaactatccgagcactggctcagccgtgttattaccgttaaagaatcttgaagcggataatgtcgagacggaggttctagtgtgtggaggtgcaccaaaaggatcatacaacctcgctagaaagaaaactttcgtgaaagcgcttgacacgtgtgcaaggatcaagattaacgatgccaaacctgaatgggcggttgagaagatgccacatgctagagttatgggagatatgattcctttgccaaacggagatgttttgctaatcaacggtggatcttttggtactgctgcatgggagcttggtcgtacaccggttttagcaccagacctataccatcccgagaatccggttggctctaggtttgaatcgctaaggccgactacaatcccgagaatgtatcactccgcggctattcttctacgtgacggtagggttttagtcggaggaagcaatcctcatgcgttttataactacaccggagtgcttttcccgacggagttgagcttagaagctttctctccggtttacctacaacgggagttttcgaatcttcgtcccaagattatatctcctgaacctcagtcgatgattaaatatgggacgaatttgaagttgaaattttcggtcaccggagaagttacgactccggcgaaagtgactatggtatttccgacgttcacgacgcatagcttcgcgatgaatcagagggttttggttttggacaatgttaagtttacgaggaaaggcaaatcgccgatgtatgaggttcaagtgaggactccgaggtcggcgaatattgcatggcctggttattatatgatttttgtggtgaatcaagacataccaagcgaaggtgtttgggtaaagttagaatgattcattgacttttatttaatatctttatttttgtgtgtaattgtgttatattactgatatcaattgtatatgaatgtaataagaatatgtcttctcaacttgatgataataaattaattaactactctttttctatgtc

SEQ ID NO: 91814 - protein, 567 aa, Arabidopsis thaliana
  peptide (1)..(567): Ceres Seq. ID no. 12729625
  misc_feature (20)..(567): Homolog of NCBI NO: 15223699 NR Description: unknown protein; protein id: At1g19900.1, by cDNA: gi_16604506 [Arabidopsis thaliana]
  misc_feature (64)..(567): Homolog of NCBI NO: 25352604 NR Description: hypothetical protein F6F9.4 [imported] - thaliana >gi|10086483|gb|AAG12543.1|AC007797_3 Unknown Protein
  misc_feature (38)..(567): Homolog of NCBI NO: 15222300 NR Description: unknown protein; protein id: At1g75620.1 thaliana] >gi|9369366|gb|AAF87115.1|AC006434_11 F10A5.18
  misc_feature (52)..(567): Homolog of NCBI NO: 15230360 NR Description: putative protein; protein id: At3g57620.1 thaliana] >gi|7485502|pir||T06758 probable galactose oxidase (EC
  misc_feature (25)..(566): Homolog of NCBI NO: 25352602 NR Description: F14L17.20 protein - Arabidopsis thaliana Weak similarity to glyoxal oxidase (glx2) from Phanerochaete
  misc_feature (25)..(563): Homolog of NCBI NO: 15223754 NR Description: hypothetical protein; protein id: At1g14430.1
  misc_feature (50)..(566): Homolog of NCBI NO: 15241135 NR Description: putative protein; protein id: At5g19580.1,
  misc_feature (50)..(566): Homolog of NCBI NO: 19310437 NR Description: AT5g19580/T20D1_100 [Arabidopsis thaliana]
  misc_feature (31)..(566): Homolog of NCBI NO: 15232379 NR Description: putative protein; protein id: At3g53950.1, by cDNA: gi_15809875 [Arabidopsis thaliana]
  misc_feature (50)..(566): Homolog of NCBI NO: 15220398 NR Description: glyoxal oxidase (glx1), putative; protein id: [Arabidopsis thaliana] >gi|9828629|gb|AAG00252.1|AC002130_17 [Arabidopsis thaliana] >gi|27754377|gb|AAO22637.1| putative
TYHKISHKDQINTKPESKKMAARATFIFYALFLTTLQFLLTHHVSSAARGLWKYIAPNVGISAMHMQLLHNDRVVMYDRTNFGPSNISLPNGNCRDNPQDAVSKIDCTAHSIEYDVATNTIRPLTVQSNTWCSSGSVRPDGVLVQTGGDRDGELKTRTFSPCNNNQCDWVEMNNGLKKRRWYASNHILPDGKQIVMGGQGQFNYEFFPKTTNPNVVALPFLAETHDQGQENNLYPFVFMNTDGNLFMFANNRAILLDYVKNTVVKTFPAIPGGDPRNYPSTGSAVLLPLKNLEADNVETEVLVCGGAPKGSYNLARKKTFVKALDTCARIKINDAKPEWAVEKMPHARVMGDMIPLPNGDVLLINGGSFGTAAWELGRTPVLAPDLYHPENPVGSRFESLRPTTIPRMYHSAAILLRDGRVLVGGSNPHAFYNYTGVLFPTELSLEAFSPVYLQREFSNLRPKIISPEPQSMIKYGTNLKLKFSVTGEVTTPAKVTMVFPTFTTHSFAMNQRVLVLDNVKFTRKGKSPMYEVQVRTPRSANIAWPGYYMIFVVNQDIPSEGVWVKLE

SEQ ID NO: 91815 - protein, 548 aa, Arabidopsis thaliana
  peptide (1)..(548): Ceres Seq. ID no. 12729626
  misc_feature (1)..(548): Homolog of NCBI NO: 15223699 NR Description: unknown protein; protein id: At1g19900.1, by cDNA: gi_16604506 [Arabidopsis thaliana]
  misc_feature (45)..(548): Homolog of NCBI NO: 25352604 NR Description: hypothetical protein F6F9.4 [imported] - thaliana >gi|10086483|gb|AAG12543.1|AC007797_3 Unknown Protein
  misc_feature (19)..(548): Homolog of NCBI NO: 15222300 NR Description: unknown protein; protein id: At1g75620.1 thaliana] >gi|9369366|gb|AAF87115.1|AC006434_11 F10A5.18
  misc_feature (33)..(548): Homolog of NCBI NO: 15230360 NR Description: putative protein; protein id: At3g57620.1 thaliana] >gi|7485502|pir||T06758 probable galactose oxidase (EC
  misc_feature (6)..(547): Homolog of NCBI NO: 25352602 NR Description: F14L17.20 protein - Arabidopsis thaliana Weak similarity to glyoxal oxidase (glx2) from Phanerochaete
  misc_feature (6)..(544): Homolog of NCBI NO: 15223754 NR Description: hypothetical protein; protein id: At1g14430.1
  misc_feature (31)..(547): Homolog of NCBI NO: 15241135 NR Description: putative protein; protein id: At5g19580.1,
  misc_feature (31)..(547): Homolog of NCBI NO: 19310437 NR Description: AT5g19580/T20D1_100 [Arabidopsis thaliana]
  misc_feature (12)..(547): Homolog of NCBI NO: 15232379 NR Description: putative protein; protein id: At3g53950.1, by cDNA: gi_15809875 [Arabidopsis thaliana]
  misc_feature (31)..(547): Homolog of NCBI NO: 15220398 NR Description: glyoxal oxidase (glx1), putative; protein id: [Arabidopsis thaliana] >gi|9828629|gb|AAG00252.1|AC002130_17 [Arabidopsis thaliana] >gi|27754377|gb|AAO22637.1| putative
MAARATFIFYALFLTTLQFLLTHHVSSAARGLWKYIAPNVGISAMHMQLLHNDRVVMYDRTNFGPSNISLPNGNCRDNPQDAVSKIDCTAHSIEYDVATNTIRPLTVQSNTWCSSGSVRPDGVLVQTGGDRDGELKTRTFSPCNNNQCDWVEMNNGLKKRRWYASNHILPDGKQIVMGGQGQFNYEFFPKTTNPNVVALPFLAETHDQGQENNLYPFVFMNTDGNLFMFANNRAILLDYVKNTVVKTFPAIPGGDPRNYPSTGSAVLLPLKNLEADNVETEVLVCGGAPKGSYNLARKKTFVKALDTCARIKINDAKPEWAVEKMPHARVMGDMIPLPNGDVLLINGGSFGTAAWELGRTPVLAPDLYHPENPVGSRFESLRPTTIPRMYHSAAILLRDGRVLVGGSNPHAFYNYTGVLFPTELSLEAFSPVYLQREFSNLRPKIISPEPQSMIKYGTNLKLKFSVTGEVTTPAKVTMVFPTFTTHSFAMNQRVLVLDNVKFTRKGKSPMYEVQVRTPRSANIAWPGYYMIFVVNQDIPSEGVWVKLE

SEQ ID NO: 91816 - protein, 504 aa, Arabidopsis thaliana
  peptide (1)..(504): Ceres Seq. ID no. 12729627
  misc_feature (1)..(504): Homolog of NCBI NO: 15223699 NR Description: unknown protein; protein id: At1g19900.1, by cDNA: gi_16604506 [Arabidopsis thaliana]
  misc_feature (1)..(504): Homolog of NCBI NO: 25352604 NR Description: hypothetical protein F6F9.4 [imported] - thaliana >gi|10086483|gb|AAG12543.1|AC007797_3 Unknown Protein
  misc_feature (1)..(504): Homolog of NCBI NO: 15222300 NR Description: unknown protein; protein id: At1g75620.1 thaliana] >gi|9369366|gb|AAF87115.1|AC006434_11 F10A5.18
  misc_feature (1)..(504): Homolog of NCBI NO: 15230360 NR Description: putative protein; protein id: At3g57620.1 thaliana] >gi|7485502|pir||T06758 probable galactose oxidase (EC
  misc_feature (1)..(503): Homolog of NCBI NO: 25352602 NR Description: F14L17.20 protein - Arabidopsis thaliana Weak similarity to glyoxal oxidase (glx2) from Phanerochaete
  misc_feature (1)..(500): Homolog of NCBI NO: 15223754 NR Description: hypothetical protein; protein id: At1g14430.1
  misc_feature (1)..(503): Homolog of NCBI NO: 15241135 NR Description: putative protein; protein id: At5g19580.1,
  misc_feature (1)..(503): Homolog of NCBI NO: 19310437 NR Description: AT5g19580/T20D1_100 [Arabidopsis thaliana]
  misc_feature (1)..(503): Homolog of NCBI NO: 15232379 NR Description: putative protein; protein id: At3g53950.1, by cDNA: gi_15809875 [Arabidopsis thaliana]
  misc_feature (1)..(503): Homolog of NCBI NO: 15220398 NR Description: glyoxal oxidase (glx1), putative; protein id: [Arabidopsis thaliana] >gi|9828629|gb|AAG00252.1|AC002130_17 [Arabidopsis thaliana] >gi|27754377|gb|AAO22637.1| putative
MHMQLLHNDRVVMYDRTNFGPSNISLPNGNCRDNPQDAVSKIDCTAHSIEYDVATNTIRPLTVQSNTWCSSGSVRPDGVLVQTGGDRDGELKTRTFSPCNNNQCDWVEMNNGLKKRRWYASNHILPDGKQIVMGGQGQFNYEFFPKTTNPNVVALPFLAETHDQGQENNLYPFVFMNTDGNLFMFANNRAILLDYVKNTVVKTFPAIPGGDPRNYPSTGSAVLLPLKNLEADNVETEVLVCGGAPKGSYNLARKKTFVKALDTCARIKINDAKPEWAVEKMPHARVMGDMIPLPNGDVLLINGGSFGTAAWELGRTPVLAPDLYHPENPVGSRFESLRPTTIPRMYHSAAILLRDGRVLVGGSNPHAFYNYTGVLFPTELSLEAFSPVYLQREFSNLRPKIISPEPQSMIKYGTNLKLKFSVTGEVTTPAKVTMVFPTFTTHSFAMNQRVLVLDNVKFTRKGKSPMYEVQVRTPRSANIAWPGYYMIFVVNQDIPSEGVWVKLE

SEQ ID NO: 91817 - DNA, 1366 bp, Arabidopsis thaliana
  misc_feature (1)..(1366): Ceres Seq. ID no. 12729653
  misc_feature: MA Experiment ID: 20000171 Result: Up-regulated in Transcription
  misc_feature: MA Experiment 20000171 PARAMETER Experiment Name: At_42deg_Heat_P Parameter: Age (day) Value: 14
  misc_feature: MA Experiment 20000171 PARAMETER Experiment Name: At_42deg_Heat_P Parameter: Organism Value: A. thaliana
  misc_feature: MA Experiment 20000171 PARAMETER Experiment Name: At_42deg_Heat_P Parameter: Plant Line Value: WS
  misc_feature: MA Experiment 20000171 PARAMETER Experiment Name: At_42deg_Heat_P Parameter: Temperature (deg C) Value: 42 vs. 22
  misc_feature: MA Experiment 20000171 PARAMETER Experiment Name: At_42deg_Heat_P Parameter: Timepoint (hr) Value: 1
  misc_feature: MA Experiment 20000171 PARAMETER Experiment Name: At_42deg_Heat_P Parameter: Tissue Value: Aerial
  misc_feature: MA Experiment ID: 20000173 Result: Up-regulated in Transcription
  misc_feature: MA Experiment 20000173 PARAMETER Experiment Name: At_42deg_Heat_P Parameter: Age (day) Value: 14
  misc_feature: MA Experiment 20000173 PARAMETER Experiment Name: At_42deg_Heat_P Parameter: Organism Value: A. thaliana
  misc_feature: MA Experiment 20000173 PARAMETER Experiment Name: At_42deg_Heat_P Parameter: Plant Line Value: WS
  misc_feature: MA Experiment 20000173 PARAMETER Experiment Name: At_42deg_Heat_P Parameter: Temperature (deg C) Value: 42 vs. 22
  misc_feature: MA Experiment 20000173 PARAMETER Experiment Name: At_42deg_Heat_P Parameter: Timepoint (hr) Value: 6
  misc_feature: MA Experiment 20000173 PARAMETER Experiment Name: At_42deg_Heat_P Parameter: Tissue Value: Aerial
  misc_feature: MA Experiment ID: 20000185 Result: Up-regulated in Transcription
  misc_feature: MA Experiment 20000185 PARAMETER Experiment Name: At_Roots__P Parameter: Age (day) Value: 7 vs. 21
  misc_feature: MA Experiment 20000185 PARAMETER Experiment Name: At_Roots__P Parameter: Organism Value: A. thaliana
  misc_feature: MA Experiment 20000185 PARAMETER Experiment Name: At_Roots__P Parameter: Tissue Value: Roots vs. Whole Plant
  misc_feature: MA Experiment ID: 20000227 Result: Up-regulated in Transcription
  misc_feature: MA Experiment 20000227 PARAMETER Experiment Name: At_Root-Tips-vs-Tops_P Parameter: Tissue Value: Root Tips vs. Root Tops
  misc_feature: MA Experiment ID: 20000234 Result: Up-regulated in Transcription
  misc_feature: MA Experiment 20000234 PARAMETER Experiment Name: At_Siliques_P Parameter: Age (day) Value: 21
  misc_feature: MA Experiment 20000234 PARAMETER Experiment Name: At_Siliques_P Parameter: Organism Value: A. thaliana
  misc_feature: MA Experiment 20000234 PARAMETER Experiment Name: At_Siliques_P Parameter: Plant Line Value: WS
  misc_feature: MA Experiment 20000234 PARAMETER Experiment Name: At_Siliques_P Parameter: Tissue Value: Less Than 5mm Siliques vs. Whole Plant
  misc_feature: MA Experiment ID: 20000264 Result: Up-regulated in Transcription
  misc_feature: MA Experiment 20000264 PARAMETER Experiment Name: At_Open_Flower_P Parameter: Age (day) Value: 21
  misc_feature: MA Experiment 20000264 PARAMETER Experiment Name: At_Open_Flower_P Parameter: Plant Line Value: WS
  misc_feature: MA Experiment 20000264 PARAMETER Experiment Name: At_Open_Flower_P Parameter: Tissue Value: Open Flower vs. Whole Plant
  misc_feature: MA Experiment ID: 20000265 Result: Up-regulated in Transcription
  misc_feature: MA Experiment 20000265 PARAMETER Experiment Name: At_Open_Flower_P Parameter: Age (day) Value: 21
  misc_feature: MA Experiment 20000265 PARAMETER Experiment Name: At_Open_Flower_P Parameter: Plant Line Value: WS
  misc_feature: MA Experiment 20000265 PARAMETER Experiment Name: At_Open_Flower_P Parameter: Tissue Value: Closed Flower vs. Whole Plant
  misc_feature: MA Experiment ID: 20000437 Result: Down-regulated in Transcription
  misc_feature: MA Experiment 20000437 PARAMETER Experiment Name: At_Drought_P Parameter: Age (day) Value: 8
  misc_feature: MA Experiment 20000437 PARAMETER Experiment Name: At_Drought_P Parameter: Organism Value: A. thaliana
  misc_feature: MA Experiment 20000437 PARAMETER Experiment Name: At_Drought_P Parameter: Plant Line Value: WS
  misc_feature: MA Experiment 20000437 PARAMETER Experiment Name: At_Drought_P Parameter: Timepoint (hr) Value: 24
  misc_feature: MA Experiment 20000437 PARAMETER Experiment Name: At_Drought_P Parameter: Tissue Value: Whole Plant
  misc_feature: MA Experiment 20000437 PARAMETER Experiment Name: At_Drought_P Parameter: Treatment Value: Drought vs. No Drought
  misc_feature: MA Experiment ID: 20001557 Result: Up-regulated in Transcription
  misc_feature: MA Experiment 20001557 PARAMETER Experiment Name: At_Drought_Soil_Dry_P Parameter: Age (day) Value: 27
  misc_feature: MA Experiment 20001557 PARAMETER Experiment Name: At_Drought_Soil_Dry_P Parameter: Organism Value: A. thaliana
  misc_feature: MA Experiment 20001557 PARAMETER Experiment Name: At_Drought_Soil_Dry_P Parameter: Plant Line Value: WS
  misc_feature: MA Experiment 20001557 PARAMETER Experiment Name: At_Drought_Soil_Dry_P Parameter: Post Timepoint (hr) Value: 3
  misc_feature: MA Experiment 20001557 PARAMETER Experiment Name: At_Drought_Soil_Dry_P Parameter: Post-Treatment Value: Re-Water vs. No Drought
  misc_feature: MA Experiment 20001557 PARAMETER Experiment Name: At_Drought_Soil_Dry_P Parameter: Timepoint (day) Value: 13
  misc_feature: MA Experiment 20001557 PARAMETER Experiment Name: At_Drought_Soil_Dry_P Parameter: Treatment Value: Drought vs. No Drought
  misc_feature: MA Experiment ID: 20001558 Result: Up-regulated in Transcription
  misc_feature: MA Experiment 20001558 PARAMETER Experiment Name: At_Drought_Soil_Dry_P Parameter: Age (day) Value: 27
  misc_feature: MA Experiment 20001558 PARAMETER Experiment Name: At_Drought_Soil_Dry_P Parameter: Organism Value: A. thaliana
  misc_feature: MA Experiment 20001558 PARAMETER Experiment Name: At_Drought_Soil_Dry_P Parameter: Plant Line Value: WS
  misc_feature: MA Experiment 20001558 PARAMETER Experiment Name: At_Drought_Soil_Dry_P Parameter: Post Timepoint (hr) Value: 6
  misc_feature: MA Experiment 20001558 PARAMETER Experiment Name: At_Drought_Soil_Dry_P Parameter: Post-Treatment Value: Re-Water vs. No Drought
  misc_feature: MA Experiment 20001558 PARAMETER Experiment Name: At_Drought_Soil_Dry_P Parameter: Timepoint (day) Value: 13
  misc_feature: MA Experiment 20001558 PARAMETER Experiment Name: At_Drought_Soil_Dry_P Parameter: Treatment Value: Drought vs. No Drought
agggcagttcactggtgcatgggtttgtggaagagaagttgtgcggctgttatatatatcagagaagcgccttcaacaaccgcctcttagggcgtataaaatcagaaacagaaacgagacaagaattaattctctcgtccaaatttcttctgggcagaaaccaacatttatccttatccgattcttctagggtttcggaagatctaaccagaaccttcgcaacaagatggataagtatcagagagttgagaagccgaaggcggatacgccgattgctgagaatgagattcgtatcaccagtatgggtagggcacggaactacatcacctatgcgatggctcttcttcaggaaaacaaatcgaatgaagttatcttcaaggctatgggaagagctatcaacaagagtgtgaccatagttgagctgattaagagaaggattcctggtcttcatcagatcacatctattggatcaacggacattacagatacctgggaacctacagaggaaggccttcaaacaattgagaccacgaggcatgtgtcgatgataaccataacactttccaaggagcagttgaacacatcctcagttgggtaccagtgtccgattcctattgagatggtgaagccattggctgagattgactacgaagggcaagacggatctcctagaggcagaggaggaagaagaggtagaggaggaagaggaaggggaaggggaagaggtggtagaggaaatggacctgcgaatgttgagtatgatgatggaggaaggggaagaggtggcagaggaaacggatatgtgaacaatgagtatgatgatggaggaaggggaagaggcggcagaggaagtggatatgtgaacaatgagtataatgatggaggtatggagcaggaccggtcatatggcagaggacgcgggcgtgggagaggaggtggacgtggtggtcgaggaagaggaggttacaatggccccccaccaccttactatgaagctcaacaagatggaggagactatggatacaacaatgttgctcctccagcagaccatggatatgatggtcctccgcctcagggacgtggacgtggccgtggaaggggaggtcgtggaagaggaggaggccgtggtggattcaacagatcaaatggagcacctatccaggctgctgcatgagcgaccagggtcattgaatgaagttggatctttcttacattctcatgtttttgtctctgttcttcaaagcaacttgttgccgtagaataatctttcgttcatgtcgctttaggttatatatatcctcatttattttatcatggatcttggattttcaagtttttattccttcaagagttttctagttttgtc

SEQ ID NO: 91818 - protein, 315 aa, Arabidopsis thaliana
  peptide (1)..(315): Ceres Seq. ID no. 12729654
  misc_feature (150)..(310): Pfam Name: Herpesvirus latent membrane protein 1 (LMP1) Pfam Description: Herpesvirus latent membrane protein 1 (LMP1)
  misc_feature (1)..(315): Homolog of NCBI NO: 25518088 NR Description: T20H2.2 protein - Arabidopsis thaliana Contains similarity to pigpen protein from Mus musculus and contains protein of unknown function DUF78 PF|01918 domain.
  misc_feature (1)..(315): Homolog of NCBI NO: 18394837 NR Description: expressed protein; protein id: At1g20220.1, by cDNA: gi_16612273 [Arabidopsis thaliana]
  misc_feature (1)..(275): Homolog of NCBI NO: 24417384 NR Description: unknown [Arabidopsis thaliana]
  misc_feature (1)..(308): Homolog of NCBI NO: 18410994 NR Description: expressed protein; protein id: At1g76010.1, by cDNA: gi_15724323, supported by cDNA: gi_15809881, supported cDNA: gi_16226598 [Arabidopsis thaliana]
  misc_feature (1)..(256): Homolog of NCBI NO: 34897552 NR Description: OSJNBa0042L16.13 [Oryza sativa (japonica
  misc_feature (41)..(308): Homolog of NCBI NO: 25404999 NR Description: protein T4O12.22 [imported] - Arabidopsis >gi|8778814|gb|AAF79819.1|AC007396_20 T4O12.22 [Arabidopsis
  misc_feature (1)..(48): Homolog of NCBI NO: 25404999 NR Description: protein T4O12.22 [imported] - Arabidopsis >gi|8778814|gb|AAF79819.1|AC007396_20 T4O12.22 [Arabidopsis
  misc_feature (177)..(310): Homolog of NCBI NO: 25404999 NR Description: protein T4O12.22 [imported] - Arabidopsis >gi|8778814|gb|AAF79819.1|AC007396_20 T4O12.22 [Arabidopsis
  misc_feature (137)..(315): Homolog of NCBI NO: 25404999 NR Description: protein T4O12.22 [imported] - Arabidopsis >gi|8778814|gb|AAF79819.1|AC007396_20 T4O12.22 [Arabidopsis
  misc_feature (1)..(146): Homolog of NCBI NO: 15231369 NR Description: unknown protein; protein id: At3g07030.1 thaliana] >gi|6729010|gb|AAF27007.1|AC016827_18 unknown protein
MDKYQRVEKPKADTPIAENEIRITSMGRARNYITYAMALLQENKSNEVIFKAMGRAINKSVTIVELIKRRIPGLHQITSIGSTDITDTWEPTEEGLQTIETTRHVSMITITLSKEQLNTSSVGYQCPIPIEMVKPLAEIDYEGQDGSPRGRGGRRGRGGRGRGRGRGGRGNGPANVEYDDGGRGRGGRGNGYVNNEYDDGGRGRGGRGSGYVNNEYNDGGMEQDRSYGRGRGRGRGGGRGGRGRGGYNGPPPPYYEAQQDGGDYGYNNVAPPADHGYDGPPPQGRGRGRGRGGRGRGGGRGGFNRSNGAPIQAAA

SEQ ID NO: 91819 - protein, 290 aa, Arabidopsis thaliana
  peptide (1)..(290): Ceres Seq. ID no. 12729655
  misc_feature (125)..(285): Pfam Name: Herpesvirus latent membrane protein 1 (LMP1) Pfam Description: Herpesvirus latent membrane protein 1 (LMP1)
  misc_feature (1)..(290): Homolog of NCBI NO: 25518088 NR Description: T20H2.2 protein - Arabidopsis thaliana Contains similarity to pigpen protein from Mus musculus and contains protein of unknown function DUF78 PF|01918 domain.
  misc_feature (1)..(290): Homolog of NCBI NO: 18394837 NR Description: expressed protein; protein id: At1g20220.1, by cDNA: gi_16612273 [Arabidopsis thaliana]
  misc_feature (1)..(250): Homolog of NCBI NO: 24417384 NR Description: unknown [Arabidopsis thaliana]
  misc_feature (1)..(283): Homolog of NCBI NO: 18410994 NR Description: expressed protein; protein id: At1g76010.1, by cDNA: gi_15724323, supported by cDNA: gi_15809881, supported cDNA: gi_16226598 [Arabidopsis thaliana]
  misc_feature (1)..(231): Homolog of NCBI NO: 34897552 NR Description: OSJNBa0042L16.13 [Oryza sativa (japonica
  misc_feature (16)..(283): Homolog of NCBI NO: 25404999 NR Description: protein T4O12.22 [imported] - Arabidopsis >gi|8778814|gb|AAF79819.1|AC007396_20 T4O12.22 [Arabidopsis
  misc_feature (1)..(23): Homolog of NCBI NO: 25404999 NR Description: protein T4O12.22 [imported] - Arabidopsis >gi|8778814|gb|AAF79819.1|AC007396_20 T4O12.22 [Arabidopsis
  misc_feature (152)..(285): Homolog of NCBI NO: 25404999 NR Description: protein T4O12.22 [imported] - Arabidopsis >gi|8778814|gb|AAF79819.1|AC007396_20 T4O12.22 [Arabidopsis
  misc_feature (112)..(290): Homolog of NCBI NO: 25404999 NR Description: protein T4O12.22 [imported] - Arabidopsis >gi|8778814|gb|AAF79819.1|AC007396_20 T4O12.22 [Arabidopsis
  misc_feature (1)..(121): Homolog of NCBI NO: 15231369 NR Description: unknown protein; protein id: At3g07030.1 thaliana] >gi|6729010|gb|AAF27007.1|AC016827_18 unknown protein
MGRARNYITYAMALLQENKSNEVIFKAMGRAINKSVTIVELIKRRIPGLHQITSIGSTDITDTWEPTEEGLQTIETTRHVSMITITLSKEQLNTSSVGYQCPIPIEMVKPLAEIDYEGQDGSPRGRGGRRGRGGRGRGRGRGGRGNGPANVEYDDGGRGRGGRGNGYVNNEYDDGGRGRGGRGSGYVNNEYNDGGMEQDRSYGRGRGRGRGGGRGGRGRGGYNGPPPPYYEAQQDGGDYGYNNVAPPADHGYDGPPPQGRGRGRGRGGRGRGGGRGGFNRSNGAPIQAAA

SEQ ID NO: 91820 - protein, 279 aa, Arabidopsis thaliana
  peptide (1)..(279): Ceres Seq. ID no. 12729656
  misc_feature (114)..(274): Pfam Name: Herpesvirus latent membrane protein 1 (LMP1) Pfam Description: Herpesvirus latent membrane protein 1 (LMP1)
  misc_feature (1)..(279): Homolog of NCBI NO: 25518088 NR Description: T20H2.2 protein - Arabidopsis thaliana Contains similarity to pigpen protein from Mus musculus and contains protein of unknown function DUF78 PF|01918 domain.
  misc_feature (1)..(279): Homolog of NCBI NO: 18394837 NR Description: expressed protein; protein id: At1g20220.1, by cDNA: gi_16612273 [Arabidopsis thaliana]
  misc_feature (1)..(239): Homolog of NCBI NO: 24417384 NR Description: unknown [Arabidopsis thaliana]
  misc_feature (1)..(272): Homolog of NCBI NO: 18410994 NR Description: expressed protein; protein id: At1g76010.1, by cDNA: gi_15724323, supported by cDNA: gi_15809881, supported cDNA: gi_16226598 [Arabidopsis thaliana]
  misc_feature (1)..(220): Homolog of NCBI NO: 34897552 NR Description: OSJNBa0042L16.13 [Oryza sativa (japonica
  misc_feature (5)..(272): Homolog of NCBI NO: 25404999 NR Description: protein T4O12.22 [imported] - Arabidopsis >gi|8778814|gb|AAF79819.1|AC007396_20 T4O12.22 [Arabidopsis
  misc_feature (1)..(12): Homolog of NCBI NO: 25404999 NR Description: protein T4O12.22 [imported] - Arabidopsis >gi|8778814|gb|AAF79819.1|AC007396_20 T4O12.22 [Arabidopsis
  misc_feature (141)..(274): Homolog of NCBI NO: 25404999 NR Description: protein T4O12.22 [imported] - Arabidopsis >gi|8778814|gb|AAF79819.1|AC007396_20 T4O12.22 [Arabidopsis
  misc_feature (101)..(279): Homolog of NCBI NO: 25404999 NR Description: protein T4O12.22 [imported] - Arabidopsis >gi|8778814|gb|AAF79819.1|AC007396_20 T4O12.22 [Arabidopsis
  misc_feature (1)..(110): Homolog of NCBI NO: 15231369 NR Description: unknown protein; protein id: At3g07030.1 thaliana] >gi|6729010|gb|AAF27007.1|AC016827_18 unknown protein
MALLQENKSNEVIFKAMGRAINKSVTIVELIKRRIPGLHQITSIGSTDITDTWEPTEEGLQTIETTRHVSMITITLSKEQLNTSSVGYQCPIPIEMVKPLAEIDYEGQDGSPRGRGGRRGRGGRGRGRGRGGRGNGPANVEYDDGGRGRGGRGNGYVNNEYDDGGRGRGGRGSGYVNNEYNDGGMEQDRSYGRGRGRGRGGGRGGRGRGGYNGPPPPYYEAQQDGGDYGYNNVAPPADHGYDGPPPQGRGRGRGRGGRGRGGGRGGFNRSNGAPIQAAA

SEQ ID NO: 91821 - DNA, 2283 bp, Arabidopsis thaliana
  misc_feature (1)..(2283): Ceres Seq. ID no. 12729657
  misc_feature: MA Experiment ID: 20000307 Result: Down-regulated in Transcription
  misc_feature: MA Experiment 20000307 PARAMETER Experiment Name: At_Germinating_Seeds_Sub_P Parameter: Age (hr) Value: 24 vs. 0
  misc_feature: MA Experiment 20000307 PARAMETER Experiment Name: At_Germinating_Seeds_Sub_P Parameter: Organism Value: A. thaliana
  misc_feature: MA Experiment 20000307 PARAMETER Experiment Name: At_Germinating_Seeds_Sub_P Parameter: Plant Line Value: WS
  misc_feature: MA Experiment 20000307 PARAMETER Experiment Name: At_Germinating_Seeds_Sub_P Parameter: Tissue Value: Germinating Seeds
  misc_feature: MA Experiment ID: 20000328 Result: Down-regulated in Transcription
  misc_feature: MA Experiment 20000328 PARAMETER Experiment Name: At_42deg_Heat_Sub_P Parameter: Age (day) Value: 14
  misc_feature: MA Experiment 20000328 PARAMETER Experiment Name: At_42deg_Heat_Sub_P Parameter: Organism Value: A. thaliana
  misc_feature: MA Experiment 20000328 PARAMETER Experiment Name: At_42deg_Heat_Sub_P Parameter: Plant Line Value: WS
  misc_feature: MA Experiment 20000328 PARAMETER Experiment Name: At_42deg_Heat_Sub_P Parameter: Temperature (deg C) Value: 42 vs. 22
  misc_feature: MA Experiment 20000328 PARAMETER Experiment Name: At_42deg_Heat_Sub_P Parameter: Timepoint (hr) Value: 6
  misc_feature: MA Experiment 20000328 PARAMETER Experiment Name: At_42deg_Heat_Sub_P Parameter: Tissue Value: Aerial
atgacaaaacaagttcttccactgatagagaaaattcctcaatcgatcgttggattcttagaatcttcatcatatcattggtcttcttcgttgtcgaagacaacacaagctcatgctcgtatactcaaatccggagctcaaaacgatggctatatctccgctaaactcattgcttcatactcgaactataattgtttcaacgatgctgatctcgtcttgcaatcgattccggatcctactatttactctttctcttctcttatatacgctttaacaaaggctaagctttttacgcaatcgattggtgtgttttctcggatgttctctcatgggttgattccagatagtcatgttcttccgaatttgttcaaggtttgtgctgaattatcggcttttaaagtgggtaaacagatacattgtgtgtcgtgtgtttccgggttggatatggatgcgtttgttcaggggtctatgtttcatatgtacatgaggtgtggtaggatgggtgatgcacgcaaagtgttcgatagaatgtctgacaaagatgttgtcacttgcagtgctttgctttgtgcctatgcgcgaaagggttgcttagaagaggtggttcgtatcctctctgagatggaaagttcaggtattgaggcgaatattgtgtcttggaatggtattcttagtgggtttaatcggagtgggtatcacaaggaagcagtggtgatgttccagaagattcaccatttggggttttgtcctgatcaagttacagtttcaagtgttcttccttcagttggagattcagagatgctgaatatggggaggctgattcatggatatgtgattaaacagggtttgcttaaggataaatgtgtcattagtgcaatgattgatatgtatgggaaatctgggcatgtttatggaatcataagtcttttcaatcaatttgagatgatggaggcaggggtttgcaatgcctacattacagggctatcgcgaaatggtcttgttgacaaggcacttgaaatgtttgagctattcaaggagcaaacgatggagcttaatgttgtgtcatggacttcaatcatagctgggtgtgctcagaacgggaaagatatcgaagctttggaattgttcagagaaatgcaggttgcaggggtgaagccaaaccatgtaacaatcccttcaatgcttccagcttgcggaaatatagcagctttgggtcatgggagatccactcatggatttgcagtaagggtccaccttttggataatgttcatgtagggagtgctctgattgacatgtatgccaaatgtggaagaatcaacttgtctcagattgtctttaatatgatgcctacaaaaaacttagtctgctggaactctttaatgaatggattttcgatgcatgggaaggccaaggaagtcatgagcatatttgaatctcttatgagaaccaggttgaaacccgatttcatcagctttaccagtttattatcagcatgtggccaagtaggtttaacagatgaagggtggaaatatttcaaaatgatgtcagaggaatatgggataaaaccgaggttggaacactattcttgcatggtaaaccttcttggacgcgcaggcaagttgcaagaagcatatgatctgataaaagagatgccttttgagccagactcctgcgtctggggagctttgttaaattcttgcaggcttcaaaacaatgtagatttagctgaaatcgcagcagaaaagcttttccatttagaacccgaaaacccagggacttacgttctcttgtccaatatatatgccgctaaaggcatgtggacagaagtagacagtattagaaacaagatggagagtctgggactgaagaagaacccgggatgcagctggattcaagtgaagaacagagtgtacacgcttctggctggtgacaagtcgcatccgcagatagatcaaataacagagaagatggatgagattagcaaagagatgaggaaatcaggtcaccgcccaaatttagattttgctctgcatgatgtggaggagcaagagcaagagcagatgttatggggacacagtgagaaactagcagtagttttcggtcttcttaacacaccagacggcacacctcttcaggtcataaagaaccttaggatatgcggcgattgccatgcagtcattaaatttatatcaagttacgcaggtagagagattttcattagagatacaaataggtttcatcattttaaagacggaatttgttcctgtggagatttctggtga

SEQ ID NO: 91822 - protein, 760 aa, Arabidopsis thaliana
  peptide (1)..(760): Ceres Seq. ID no. 12729658
  misc_feature (218)..(252): Pfam Name: PPR repeat Pfam Description: PPR repeat
  misc_feature (32)..(760): Homolog of NCBI NO: 15227144 NR Description: hypothetical protein; protein id: At2g22070.1
  misc_feature (30)..(760): Homolog of NCBI NO: 34393605 NR Description: pentatricopeptide (PPR) repeat-containing
  misc_feature (320)..(760): Homolog of NCBI NO: 15234006 NR Description: putative protein; protein id: At4g18750.1
  misc_feature (22)..(311): Homolog of NCBI NO: 15234006 NR Description: putative protein; protein id: At4g18750.1
  misc_feature (56)..(760): Homolog of NCBI NO: 34896896 NR Description: hypothetical protein [Oryza sativa (japonica group)] >gi|24899461|gb|AAN65031.1| hypothetical protein [Oryza
  misc_feature (315)..(760): Homolog of NCBI NO: 34915012 NR Description: P0458A05.10 [Oryza sativa (japonica
  misc_feature (36)..(320): Homolog of NCBI NO: 34915012 NR Description: P0458A05.10 [Oryza sativa (japonica
  misc_feature (332)..(760): Homolog of NCBI NO: 38606535 NR Description: OSJNBa0016O02.23 [Oryza sativa (japonica
  misc_feature (30)..(224): Homolog of NCBI NO: 38606535 NR Description: OSJNBa0016O02.23 [Oryza sativa (japonica
  misc_feature (35)..(231): Homolog of NCBI NO: 38606535 NR Description: OSJNBa0016O02.23 [Oryza sativa (japonica
MTKQVLPLIEKIPQSIVGFLESSSYHWSSSLSKTTQAHARILKSGAQNDGYISAKLIASYSNYNCFNDADLVLQSIPDPTIYSFSSLIYALTKAKLFTQSIGVFSRMFSHGLIPDSHVLPNLFKVCAELSAFKVGKQIHCVSCVSGLDMDAFVQGSMFHMYMRCGRMGDARKVFDRMSDKDVVTCSALLCAYARKGCLEEVVRILSEMESSGIEANIVSWNGILSGFNRSGYHKEAVVMFQKIHHLGFCPDQVTVSSVLPSVGDSEMLNMGRLIHGYVIKQGLLKDKCVISAMIDMYGKSGHVYGIISLFNQFEMMEAGVCNAYITGLSRNGLVDKALEMFELFKEQTMELNVVSWTSIIAGCAQNGKDIEALELFREMQVAGVKPNHVTIPSMLPACGNIAALGHGRSTHGFAVRVHLLDNVHVGSALIDMYAKCGRINLSQIVFNMMPTKNLVCWNSLMNGFSMHGKAKEVMSIFESLMRTRLKPDFISFTSLLSACGQVGLTDEGWKYFKMMSEEYGIKPRLEHYSCMVNLLGRAGKLQEAYDLIKEMPFEPDSCVWGALLNSCRLQNNVDLAEIAAEKLFHLEPENPGTYVLLSNIYAAKGMWTEVDSIRNKMESLGLKKNPGCSWIQVKNRVYTLLAGDKSHPQIDQITEKMDEISKEMRKSGHRPNLDFALHDVEEQEQEQMLWGHSEKLAVVFGLLNTPDGTPLQVIKNLRICGDCHAVIKFISSYAGREIFIRDTNRFHHFKDGICSCGDFW

SEQ ID NO: 91823 - protein, 654 aa, Arabidopsis thaliana
  peptide (1)..(654): Ceres Seq. ID no. 12729659
  misc_feature (112)..(146): Pfam Name: PPR repeat Pfam Description: PPR repeat
  misc_feature (1)..(654): Homolog of NCBI NO: 15227144 NR Description: hypothetical protein; protein id: At2g22070.1
  misc_feature (1)..(654): Homolog of NCBI NO: 34393605 NR Description: pentatricopeptide (PPR) repeat-containing
  misc_feature (214)..(654): Homolog of NCBI NO: 15234006 NR Description: putative protein; protein id: At4g18750.1
  misc_feature (1)..(205): Homolog of NCBI NO: 15234006 NR Description: putative protein; protein id: At4g18750.1
  misc_feature (1)..(654): Homolog of NCBI NO: 34896896 NR Description: hypothetical protein [Oryza sativa (japonica group)] >gi|24899461|gb|AAN65031.1| hypothetical protein [Oryza
  misc_feature (209)..(654): Homolog of NCBI NO: 34915012 NR Description: P0458A05.10 [Oryza sativa (japonica
  misc_feature (1)..(214): Homolog of NCBI NO: 34915012 NR Description: P0458A05.10 [Oryza sativa (japonica
  misc_feature (226)..(654): Homolog of NCBI NO: 38606535 NR Description: OSJNBa0016O02.23 [Oryza sativa (japonica
  misc_feature (1)..(118): Homolog of NCBI NO: 38606535 NR Description: OSJNBa0016O02.23 [Oryza sativa (japonica
  misc_feature (1)..(125): Homolog of NCBI NO: 38606535 NR Description: OSJNBa0016O02.23 [Oryza sativa (japonica
MFSHGLIPDSHVLPNLFKVCAELSAFKVGKQIHCVSCVSGLDMDAFVQGSMFHMYMRCGRMGDARKVFDRMSDKDVVTCSALLCAYARKGCLEEVVRILSEMESSGIEANIVSWNGILSGFNRSGYHKEAVVMFQKIHHLGFCPDQVTVSSVLPSVGDSEMLNMGRLIHGYVIKQGLLKDKCVISAMIDMYGKSGHVYGIISLFNQFEMMEAGVCNAYITGLSRNGLVDKALEMFELFKEQTMELNVVSWTSIIAGCAQNGKDIEALELFREMQVAGVKPNHVTIPSMLPACGNIAALGHGRSTHGFAVRVHLLDNVHVGSALIDMYAKCGRINLSQIVFNMMPTKNLVCWNSLMNGFSMHGKAKEVMSIFESLMRTRLKPDFISFTSLLSACGQVGLTDEGWKYFKMMSEEYGIKPRLEHYSCMVNLLGRAGKLQEAYDLIKEMPFEPDSCVWGALLNSCRLQNNVDLAEIAAEKLFHLEPENPGTYVLLSNIYAAKGMWTEVDSIRNKMESLGLKKNPGCSWIQVKNRVYTLLAGDKSHPQIDQITEKMDEISKEMRKSGHRPNLDFALHDVEEQEQEQMLWGHSEKLAVVFGLLNTPDGTPLQVIKNLRICGDCHAVIKFISSYAGREIFIRDTNRFHHFKDGICSCGDFW

SEQ ID NO: 91824 - protein, 612 aa, Arabidopsis thaliana
  peptide (1)..(612): Ceres Seq. ID no. 12729660
  misc_feature (70)..(104): Pfam Name: PPR repeat Pfam Description: PPR repeat
  misc_feature (1)..(612): Homolog of NCBI NO: 15227144 NR Description: hypothetical protein; protein id: At2g22070.1
  misc_feature (1)..(612): Homolog of NCBI NO: 34393605 NR Description: pentatricopeptide (PPR) repeat-containing
  misc_feature (172)..(612): Homolog of NCBI NO: 15234006 NR Description: putative protein; protein id: At4g18750.1
  misc_feature (1)..(163): Homolog of NCBI NO: 15234006 NR Description: putative protein; protein id: At4g18750.1
  misc_feature (1)..(612): Homolog of NCBI NO: 34896896 NR Description: hypothetical protein [Oryza sativa (japonica group)] >gi|24899461|gb|AAN65031.1| hypothetical protein [Oryza
  misc_feature (167)..(612): Homolog of NCBI NO: 34915012 NR Description: P0458A05.10 [Oryza sativa (japonica
  misc_feature (1)..(172): Homolog of NCBI NO: 34915012 NR Description: P0458A05.10 [Oryza sativa (japonica
  misc_feature (184)..(612): Homolog of NCBI NO: 38606535 NR Description: OSJNBa0016O02.23 [Oryza sativa (japonica
  misc_feature (1)..(76): Homolog of NCBI NO: 38606535 NR Description: OSJNBa0016O02.23 [Oryza sativa (japonica
  misc_feature (1)..(83): Homolog of NCBI NO: 38606535 NR Description: OSJNBa0016O02.23 [Oryza sativa (japonica
MDAFVQGSMFHMYMRCGRMGDARKVFDRMSDKDVVTCSALLCAYARKGCLEEVVRILSEMESSGIEANIVSWNGILSGFNRSGYHKEAVVMFQKIHHLGFCPDQVTVSSVLPSVGDSEMLNMGRLIHGYVIKQGLLKDKCVISAMIDMYGKSGHVYGIISLFNQFEMMEAGVCNAYITGLSRNGLVDKALEMFELFKEQTMELNVVSWTSIIAGCAQNGKDIEALELFREMQVAGVKPNHVTIPSMLPACGNIAALGHGRSTHGFAVRVHLLDNVHVGSALIDMYAKCGRINLSQIVFNMMPTKNLVCWNSLMNGFSMHGKAKEVMSIFESLMRTRLKPDFISFTSLLSACGQVGLTDEGWKYFKMMSEEYGIKPRLEHYSCMVNLLGRAGKLQEAYDLIKEMPFEPDSCVWGALLNSCRLQNNVDLAEIAAEKLFHLEPENPGTYVLLSNIYAAKGMWTEVDSIRNKMESLGLKKNPGCSWIQVKNRVYTLLAGDKSHPQIDQITEKMDEISKEMRKSGHRPNLDFALHDVEEQEQEQMLWGHSEKLAVVFGLLNTPDGTPLQVIKNLRICGDCHAVIKFISSYAGREIFIRDTNRFHHFKDGICSCGDFW

SEQ ID NO: 91825 - DNA, 1828 bp, Arabidopsis thaliana
  misc_feature (1)..(1828): Ceres Seq. ID no. 12729665
  misc_feature: MA Experiment ID: 20000173 Result: Down-regulated in Transcription
  misc_feature: MA Experiment 20000173 PARAMETER Experiment Name: At_42deg_Heat_P Parameter: Age (day) Value: 14
  misc_feature: MA Experiment 20000173 PARAMETER Experiment Name: At_42deg_Heat_P Parameter: Organism Value: A. thaliana
  misc_feature: MA Experiment 20000173 PARAMETER Experiment Name: At_42deg_Heat_P Parameter: Plant Line Value: WS
  misc_feature: MA Experiment 20000173 PARAMETER Experiment Name: At_42deg_Heat_P Parameter: Temperature (deg C) Value: 42 vs. 22
  misc_feature: MA Experiment 20000173 PARAMETER Experiment Name: At_42deg_Heat_P Parameter: Timepoint (hr) Value: 6
  misc_feature: MA Experiment 20000173 PARAMETER Experiment Name: At_42deg_Heat_P Parameter: Tissue Value: Aerial
  misc_feature: MA Experiment ID: 20000179 Result: Down-regulated in Transcription
  misc_feature: MA Experiment 20000179 PARAMETER Experiment Name: At_Germinating_Seeds_P Parameter: Age (hr) Value: 6 vs. 0
  misc_feature: MA Experiment 20000179 PARAMETER Experiment Name: At_Germinating_Seeds_P Parameter: Tissue Value: Germinating Seeds
  misc_feature: MA Experiment ID: 20000180 Result: Down-regulated in Transcription
  misc_feature: MA Experiment 20000180 PARAMETER Experiment Name: At_Germinating_Seeds_P Parameter: Age (hr) Value: 24 vs. 0
  misc_feature: MA Experiment 20000180 PARAMETER Experiment Name: At_Germinating_Seeds_P Parameter: Tissue Value: Germinating Seeds
  misc_feature: MA Experiment ID: 20000185 Result: Down-regulated in Transcription
  misc_feature: MA Experiment 20000185 PARAMETER Experiment Name: At_Roots__P Parameter: Age (day) Value: 7 vs. 21
  misc_feature: MA Experiment 20000185 PARAMETER Experiment Name: At_Roots__P Parameter: Organism Value: A. thaliana
  misc_feature: MA Experiment 20000185 PARAMETER Experiment Name: At_Roots__P Parameter: Tissue Value: Roots vs. Whole Plant
atcgccactctgctccgttctacatttagaagagactgaccaaaatctcccattaatggcgttactccgatcaaaactccatctttctcgaaccctttccttcatctctcctcttctacccaaaaccttctccacctcggcaacttctctactcagtgaccatgaaaacgacgaatccgccgccaccataaccgccgccgtctctgtcccaatctcacctctgttaactccggaagacacacaaaccgtagaaaagttccattcaatcatcaaagaccactatcgcaaaaaccctacaagccccaacgacgccatcttaaaccctagcttaactctccatgctctctccctcgatttctcccaaattgaaacttcccaagtctctccctccgtcgtccgatgcgtgatagagaagtgcggcagtgtccgccacggaatccctcttcaccaatctctagctttcttcaattgggcaacttcacgagacgattacgaccacaaatcacctcatccttacaacgaaatgatcgatctttcaggaaaggttagacaattcgacttagcttggcatttgattgatctaatgaaatccagaaacgtagagatttcgattgaaaccttcacgattttgattagacgttatgttagagctggattagcttcagaggctgtacattgctttaatcgtatggaagattacggttgcgtacctgataaaatcgcgttttccatagttattagtaacctttctaggaagaggagagctagtgaagctcagtcgtttttcgatagtttgaaagatagattcgagcctgatgttatagtttacaccaatttggttcgtggttggtgtagagctggtgaaatctctgaggcagagaaagtgttcaaggagatgaagttggctgggattgaacctaatgtgtatacttacagtattgtgatcgatgcgttgtgtagatgcgggcaaatcagccgtgcgcatgatgtgtttgcggatatgttagattcaggttgtgcgccgaatgcgattacttttaacaacttgatgagggttcatgtgaaagcaggaagaacagagaaggttttgcaggtttataaccagatgaagaagctaggatgtgagcctgatactattacttataacttccttattgaggctcattgcagagacgagaatctggaaaacgcggtcaaggttttgaacacgatgatcaagaagaagtgtgaagtgaatgcttcgactttcaatacgatatttaggtacattgagaagaagagagacgtgaatggcgctcataggatgtattcgaagatgatggaagcgaaatgtgagccgaatacggtgacttataatatactgatgaggatgtttgtcgggtcaaaatctactgatatggttctgaagatgaagaaagagatggatgataaagaagttgagccgaatgtgaatacttataggcttttggttacgatgttttgtgggatgggacattggaataatgcttataagttgtttaaagaaatggttgaagagaagtgtttgacaccgagcttgtctttatatgagatggttcttgctcagttaagaagagctgggcaattgaagaagcatgaagagctggtggagaagatgattcagaagggactcgttgctcggccattgtaggaacccttccaagtatcaaagaagaagcttttttttctcaggagtttttaaggatattttcaagcaattttcttgtaactttgttttggtacaacatttggttatcaagaagtattattgtaccatgtactctttttttaactctcattttctactatg

SEQ ID NO: 91826 - protein, 555 aa, Arabidopsis thaliana
  peptide (1)..(555): Ceres Seq. ID no. 12729666
  misc_feature (484)..(518): Pfam Name: PPR repeat Pfam Description: PPR repeat
  misc_feature (19)..(555): Homolog of NCBI NO: 18394846 NR Description: expressed protein; protein id: At1g20300.1, by cDNA: gi_15450346, supported by cDNA: gi_17386103 [Arabidopsis
  misc_feature (117)..(555): Homolog of NCBI NO: 14488357 NR Description: unknown protein [Oryza sativa (japonica
  misc_feature (107)..(555): Homolog of NCBI NO: 15223926 NR Description: hypothetical protein; protein id: At1g77360.1
  misc_feature (126)..(545): Homolog of NCBI NO: 15223927 NR Description: hypothetical protein; protein id: At1g71060.1
  misc_feature (126)..(545): Homolog of NCBI NO: 15219049 NR Description: hypothetical protein; protein id: At1g52640.1
  misc_feature (105)..(549): Homolog of NCBI NO: 15222036 NR Description: hypothetical protein; protein id: At1g74900.1
  misc_feature (115)..(541): Homolog of NCBI NO: 15229604 NR Description: putative protein; protein id: At3g49730.1
  misc_feature (128)..(547): Homolog of NCBI NO: 21686921 NR Description: putative reverse transcriptase [Oryza sativa
  misc_feature (115)..(549): Homolog of NCBI NO: 15239161 NR Description: putative protein; protein id: At5g65820.1
  misc_feature (135)..(544): Homolog of NCBI NO: 15228767 NR Description: putative protein; protein id: At3g62470.1
SPLCSVLHLEETDQNLPLMALLRSKLHLSRTLSFISPLLPKTFSTSATSLLSDHENDESAATITAAVSVPISPLLTPEDTQTVEKFHSIIKDHYRKNPTSPNDAILNPSLTLHALSLDFSQIETSQVSPSVVRCVIEKCGSVRHGIPLHQSLAFFNWATSRDDYDHKSPHPYNEMIDLSGKVRQFDLAWHLIDLMKSRNVEISIETFTILIRRYVRAGLASEAVHCFNRMEDYGCVPDKIAFSIVISNLSRKRRASEAQSFFDSLKDRFEPDVIVYTNLVRGWCRAGEISEAEKVFKEMKLAGIEPNVYTYSIVIDALCRCGQISRAHDVFADMLDSGCAPNAITFNNLMRVHVKAGRTEKVLQVYNQMKKLGCEPDTITYNFLIEAHCRDENLENAVKVLNTMIKKKCEVNASTFNTIFRYIEKKRDVNGAHRMYSKMMEAKCEPNTVTYNILMRMFVGSKSTDMVLKMKKEMDDKEVEPNVNTYRLLVTMFCGMGHWNNAYKLFKEMVEEKCLTPSLSLYEMVLAQLRRAGQLKKHEELVEKMIQKGLVARPL

SEQ ID NO: 91827 - protein, 537 aa, Arabidopsis thaliana
  peptide (1)..(537): Ceres Seq. ID no. 12729667
  misc_feature (466)..(500): Pfam Name: PPR repeat Pfam Description: PPR repeat
  misc_feature (1)..(537): Homolog of NCBI NO: 18394846 NR Description: expressed protein; protein id: At1g20300.1, by cDNA: gi_15450346, supported by cDNA: gi_17386103 [Arabidopsis
  misc_feature (99)..(537): Homolog of NCBI NO: 14488357 NR Description: unknown protein [Oryza sativa (japonica
  misc_feature (89)..(537): Homolog of NCBI NO: 15223926 NR Description: hypothetical protein; protein id: At1g77360.1
  misc_feature (108)..(527): Homolog of NCBI NO: 15223927 NR Description: hypothetical protein; protein id: At1g71060.1
  misc_feature (108)..(527): Homolog of NCBI NO: 15219049 NR Description: hypothetical protein; protein id: At1g52640.1
  misc_feature (87)..(531): Homolog of NCBI NO: 15222036 NR Description: hypothetical protein; protein id: At1g74900.1
  misc_feature (97)..(523): Homolog of NCBI NO: 15229604 NR Description: putative protein; protein id: At3g49730.1
  misc_feature (110)..(529): Homolog of NCBI NO: 21686921 NR Description: putative reverse transcriptase [Oryza sativa
  misc_feature (97)..(531): Homolog of NCBI NO: 15239161 NR Description: putative protein; protein id: At5g65820.1
  misc_feature (117)..(526): Homolog of NCBI NO: 15228767 NR Description: putative protein; protein id: At3g62470.1
MALLRSKLHLSRTLSFISPLLPKTFSTSATSLLSDHENDESAATITAAVSVPISPLLTPEDTQTVEKFHSIIKDHYRKNPTSPNDAILNPSLTLHALSLDFSQIETSQVSPSVVRCVIEKCGSVRHGIPLHQSLAFFNWATSRDDYDHKSPHPYNEMIDLSGKVRQFDLAWHLIDLMKSRNVEISIETFTILIRRYVRAGLASEAVHCFNRMEDYGCVPDKIAFSIVISNLSRKRRASEAQSFFDSLKDRFEPDVIVYTNLVRGWCRAGEISEAEKVFKEMKLAGIEPNVYTYSIVIDALCRCGQISRAHDVFADMLDSGCAPNAITFNNLMRVHVKAGRTEKVLQVYNQMKKLGCEPDTITYNFLIEAHCRDENLENAVKVLNTMIKKKCEVNASTFNTIFRYIEKKRDVNGAHRMYSKMMEAKCEPNTVTYNILMRMFVGSKSTDMVLKMKKEMDDKEVEPNVNTYRLLVTMFCGMGHWNNAYKLFKEMVEEKCLTPSLSLYEMVLAQLRRAGQLKKHEELVEKMIQKGLVARPL

SEQ ID NO: 91828 - protein, 381 aa, Arabidopsis thaliana
  peptide (1)..(381): Ceres Seq. ID no. 12729668
  misc_feature (310)..(344): Pfam Name: PPR repeat Pfam Description: PPR repeat
  misc_feature (1)..(381): Homolog of NCBI NO: 18394846 NR Description: expressed protein; protein id: At1g20300.1, by cDNA: gi_15450346, supported by cDNA: gi_17386103 [Arabidopsis
  misc_feature (1)..(381): Homolog of NCBI NO: 14488357 NR Description: unknown protein [Oryza sativa (japonica
  misc_feature (1)..(381): Homolog of NCBI NO: 15223926 NR Description: hypothetical protein; protein id: At1g77360.1
  misc_feature (1)..(371): Homolog of NCBI NO: 15223927 NR Description: hypothetical protein; protein id: At1g71060.1
  misc_feature (1)..(371): Homolog of NCBI NO: 15219049 NR Description: hypothetical protein; protein id: At1g52640.1
  misc_feature (1)..(375): Homolog of NCBI NO: 15222036 NR Description: hypothetical protein; protein id: At1g74900.1
  misc_feature (1)..(367): Homolog of NCBI NO: 15229604 NR Description: putative protein; protein id: At3g49730.1
  misc_feature (1)..(373): Homolog of NCBI NO: 21686921 NR Description: putative reverse transcriptase [Oryza sativa
  misc_feature (1)..(375): Homolog of NCBI NO: 15239161 NR Description: putative protein; protein id: At5g65820.1
  misc_feature (1)..(370): Homolog of NCBI NO: 15228767 NR Description: putative protein; protein id: At3g62470.1
MIDLSGKVRQFDLAWHLIDLMKSRNVEISIETFTILIRRYVRAGLASEAVHCFNRMEDYGCVPDKIAFSIVISNLSRKRRASEAQSFFDSLKDRFEPDVIVYTNLVRGWCRAGEISEAEKVFKEMKLAGIEPNVYTYSIVIDALCRCGQISRAHDVFADMLDSGCAPNAITFNNLMRVHVKAGRTEKVLQVYNQMKKLGCEPDTITYNFLIEAHCRDENLENAVKVLNTMIKKKCEVNASTFNTIFRYIEKKRDVNGAHRMYSKMMEAKCEPNTVTYNILMRMFVGSKSTDMVLKMKKEMDDKEVEPNVNTYRLLVTMFCGMGHWNNAYKLFKEMVEEKCLTPSLSLYEMVLAQLRRAGQLKKHEELVEKMIQKGLVARPL

SEQ ID NO: 91829 - DNA, 1837 bp, Arabidopsis thaliana
  misc_feature (1)..(1837): Ceres Seq. ID no. 12729691
  misc_feature: MA Experiment ID: 20000171 Result: Down-regulated in Transcription
  misc_feature: MA Experiment 20000171 PARAMETER Experiment Name: At_42deg_Heat_P Parameter: Age (day) Value: 14
  misc_feature: MA Experiment 20000171 PARAMETER Experiment Name: At_42deg_Heat_P Parameter: Organism Value: A. thaliana
  misc_feature: MA Experiment 20000171 PARAMETER Experiment Name: At_42deg_Heat_P Parameter: Plant Line Value: WS
  misc_feature: MA Experiment 20000171 PARAMETER Experiment Name: At_42deg_Heat_P Parameter: Temperature (deg C) Value: 42 vs. 22
  misc_feature: MA Experiment 20000171 PARAMETER Experiment Name: At_42deg_Heat_P Parameter: Timepoint (hr) Value: 1
  misc_feature: MA Experiment 20000171 PARAMETER Experiment Name: At_42deg_Heat_P Parameter: Tissue Value: Aerial
  misc_feature: MA Experiment ID: 20000173 Result: Down-regulated in Transcription
  misc_feature: MA Experiment 20000173 PARAMETER Experiment Name: At_42deg_Heat_P Parameter: Age (day) Value: 14
  misc_feature: MA Experiment 20000173 PARAMETER Experiment Name: At_42deg_Heat_P Parameter: Organism Value: A. thaliana
  misc_feature: MA Experiment 20000173 PARAMETER Experiment Name: At_42deg_Heat_P Parameter: Plant Line Value: WS
  misc_feature: MA Experiment 20000173 PARAMETER Experiment Name: At_42deg_Heat_P Parameter: Temperature (deg C) Value: 42 vs. 22
  misc_feature: MA Experiment 20000173 PARAMETER Experiment Name: At_42deg_Heat_P Parameter: Timepoint (hr) Value: 6
  misc_feature: MA Experiment 20000173 PARAMETER Experiment Name: At_42deg_Heat_P Parameter: Tissue Value: Aerial
  misc_feature: MA Experiment ID: 20000182 Result: Up-regulated in Transcription
  misc_feature: MA Experiment 20000182 PARAMETER Experiment Name: At_2mM_SA_P Parameter: Age (day) Value: 14
  misc_feature: MA Experiment 20000182 PARAMETER Experiment Name: At_2mM_SA_P Parameter: Organism Value: A. thaliana
  misc_feature: MA Experiment 20000182 PARAMETER Experiment Name: At_2mM_SA_P Parameter: Plant Line Value: WS
  misc_feature: MA Experiment 20000182 PARAMETER Experiment Name: At_2mM_SA_P Parameter: Timepoint (hr) Value: 6
  misc_feature: MA Experiment 20000182 PARAMETER Experiment Name: At_2mM_SA_P Parameter: Tissue Value: Aerial
  misc_feature: MA Experiment 20000182 PARAMETER Experiment Name: At_2mM_SA_P Parameter: Treatment Value: 2mM SA vs. No Treatment
  misc_feature: MA Experiment ID: 20000184 Result: Down-regulated in Transcription
  misc_feature: MA Experiment 20000184 PARAMETER Experiment Name: At_Shoots__P Parameter: Age (day) Value: 7
  misc_feature: MA Experiment 20000184 PARAMETER Experiment Name: At_Shoots__P Parameter: Tissue Value: Shoots vs. Whole Plant
  misc_feature: MA Experiment ID: 20000185 Result: Down-regulated in Transcription
  misc_feature: MA Experiment 20000185 PARAMETER Experiment Name: At_Roots__P Parameter: Age (day) Value: 7 vs. 21
  misc_feature: MA Experiment 20000185 PARAMETER Experiment Name: At_Roots__P Parameter: Organism Value: A. thaliana
  misc_feature: MA Experiment 20000185 PARAMETER Experiment Name: At_Roots__P Parameter: Tissue Value: Roots vs. Whole Plant
  misc_feature: MA Experiment ID: 20000211 Result: Up-regulated in Transcription
  misc_feature: MA Experiment 20000211 PARAMETER Experiment Name: At_0.001percent_MeJA__P Parameter: Age (day) Value: 14
  misc_feature: MA Experiment 20000211 PARAMETER Experiment Name: At_0.001percent_MeJA__P Parameter: Organism Value: A. thaliana
  misc_feature: MA Experiment 20000211 PARAMETER Experiment Name: At_0.001percent_MeJA__P Parameter: Plant Line Value: WS
  misc_feature: MA Experiment 20000211 PARAMETER Experiment Name: At_0.001percent_MeJA__P Parameter: Timepoint (hr) Value: 1
  misc_feature: MA Experiment 20000211 PARAMETER Experiment Name: At_0.001percent_MeJA__P Parameter: Tissue Value: Aerial
  misc_feature: MA Experiment 20000211 PARAMETER Experiment Name: At_0.001percent_MeJA__P Parameter: Treatment Value: 0.001percent MeJA vs. No Treatment
  misc_feature: MA Experiment ID: 20000213 Result: Up-regulated in Transcription
  misc_feature: MA Experiment 20000213 PARAMETER Experiment Name: At_4deg_Cold_P Parameter: Timepoint (hr) Value: 2
  misc_feature: MA Experiment ID: 20000234 Result: Down-regulated in Transcription
  misc_feature: MA Experiment 20000234 PARAMETER Experiment Name: At_Siliques_P Parameter: Age (day) Value: 21
  misc_feature: MA Experiment 20000234 PARAMETER Experiment Name: At_Siliques_P Parameter: Organism Value: A. thaliana
  misc_feature: MA Experiment 20000234 PARAMETER Experiment Name: At_Siliques_P Parameter: Plant Line Value: WS
  misc_feature: MA Experiment 20000234 PARAMETER Experiment Name: At_Siliques_P Parameter: Tissue Value: Less Than 5mm Siliques vs. Whole Plant
  misc_feature: MA Experiment ID: 20000264 Result: Down-regulated in Transcription
  misc_feature: MA Experiment 20000264 PARAMETER Experiment Name: At_Open_Flower_P Parameter: Age (day) Value: 21
  misc_feature: MA Experiment 20000264 PARAMETER Experiment Name: At_Open_Flower_P Parameter: Plant Line Value: WS
  misc_feature: MA Experiment 20000264 PARAMETER Experiment Name: At_Open_Flower_P Parameter: Tissue Value: Open Flower vs. Whole Plant
  misc_feature: MA Experiment ID: 20000265 Result: Down-regulated in Transcription
  misc_feature: MA Experiment 20000265 PARAMETER Experiment Name: At_Open_Flower_P Parameter: Age (day) Value: 21
  misc_feature: MA Experiment 20000265 PARAMETER Experiment Name: At_Open_Flower_P Parameter: Plant Line Value: WS
  misc_feature: MA Experiment 20000265 PARAMETER Experiment Name: At_Open_Flower_P Parameter: Tissue Value: Closed Flower vs. Whole Plant
  misc_feature: MA Experiment ID: 20000286 Result: Down-regulated in Transcription
  misc_feature: MA Experiment 20000286 PARAMETER Experiment Name: At_Open_Flower_P Parameter: Age (day) Value: 21
  misc_feature: MA Experiment 20000286 PARAMETER Experiment Name: At_Open_Flower_P Parameter: Plant Line Value: WS
  misc_feature: MA Experiment 20000286 PARAMETER Experiment Name: At_Open_Flower_P Parameter: Tissue Value: Half Open vs. Whole Plant
  misc_feature: MA Experiment ID: 20000438 Result: Down-regulated in Transcription
  misc_feature: MA Experiment 20000438 PARAMETER Experiment Name: At_Shoots__P Parameter: Age (day) Value: 14
  misc_feature: MA Experiment 20000438 PARAMETER Experiment Name: At_Shoots__P Parameter: Tissue Value: Shoots vs. Whole Plant
  misc_feature: MA Experiment ID: 20000439 Result: Down-regulated in Transcription
  misc_feature: MA Experiment 20000439 PARAMETER Experiment Name: At_Roots__P Parameter: Age (day) Value: 14 vs. 21
  misc_feature: MA Experiment 20000439 PARAMETER Experiment Name: At_Roots__P Parameter: Organism Value: A. thaliana
  misc_feature: MA Experiment 20000439 PARAMETER Experiment Name: At_Roots__P Parameter: Tissue Value: Roots vs. Whole Plant
  misc_feature: MA Experiment ID: 20000460 Result: Up-regulated in Transcription
  misc_feature: MA Experiment 20000460 PARAMETER Experiment Name: At_10percent_PEG_P Parameter: Age (day) Value: 12
  misc_feature: MA Experiment 20000460 PARAMETER Experiment Name: At_10percent_PEG_P Parameter: Organism Value: A. thaliana
  misc_feature: MA Experiment 20000460 PARAMETER Experiment Name: At_10percent_PEG_P Parameter: Plant Line Value: WS
  misc_feature: MA Experiment 20000460 PARAMETER Experiment Name: At_10percent_PEG_P Parameter: Timepoint (day) Value: 12
  misc_feature: MA Experiment 20000460 PARAMETER Experiment Name: At_10percent_PEG_P Parameter: Tissue Value: Whole Plant
  misc_feature: MA Experiment 20000460 PARAMETER Experiment Name: At_10percent_PEG_P Parameter: Treatment Value: 10percent PEG vs. No Treatment
  misc_feature: MA Experiment ID: 20000495 Result: Down-regulated in Transcription
  misc_feature: MA Experiment 20000495 PARAMETER Experiment Name: At_Guard_Cells_P Parameter: Harvest Date Value: 8/2/2002
  misc_feature: MA Experiment 20000495 PARAMETER Experiment Name: At_Guard_Cells_P Parameter: Organism Value: A. thaliana
  misc_feature: MA Experiment 20000495 PARAMETER Experiment Name: At_Guard_Cells_P Parameter: Tissue Value: Guard Cells vs. Leaves
  misc_feature: MA Experiment ID: 20000573 Result: Down-regulated in Transcription
  misc_feature: MA Experiment 20000573 PARAMETER Experiment Name: At_100uM_ABA_Mutants__P Parameter: Organism Value: A. thaliana
  misc_feature: MA Experiment 20000573 PARAMETER Experiment Name: At_100uM_ABA_Mutants__P Parameter: Plant Line Value: CS22 vs. Ler wt
  misc_feature: MA Experiment 20000573 PARAMETER Experiment Name: At_100uM_ABA_Mutants__P Parameter: Timepoint (hr) Value: N/A
  misc_feature: MA Experiment 20000573 PARAMETER Experiment Name: At_100uM_ABA_Mutants__P Parameter: Tissue Value: Whole Plant
  misc_feature: MA Experiment 20000573 PARAMETER Experiment Name: At_100uM_ABA_Mutants__P Parameter: Treatment Value: None
  misc_feature: MA Experiment ID: 20000794 Result: Down-regulated in Transcription
  misc_feature: MA Experiment 20000794 PARAMETER Experiment Name: At_Petals_P Parameter: Age (day) Value: 23-25 days
  misc_feature: MA Experiment 20000794 PARAMETER Experiment Name: At_Petals_P Parameter: Plant Line Value: WS
  misc_feature: MA Experiment 20000794 PARAMETER Experiment Name: At_Petals_P Parameter: Tissue Value: Petals vs. Whole plant
  misc_feature: MA Experiment ID: 20001451 Result: Down-regulated in Transcription
  misc_feature: MA Experiment 20001451 PARAMETER Experiment Name: At_Far-red-induction_P Parameter: Age (day) Value: 7
  misc_feature: MA Experiment 20001451 PARAMETER Experiment Name: At_Far-red-induction_P Parameter: Light Value: Far-red vs. White
  misc_feature: MA Experiment 20001451 PARAMETER Experiment Name: At_Far-red-induction_P Parameter: Organism Value: A. thaliana
  misc_feature: MA Experiment 20001451 PARAMETER Experiment Name: At_Far-red-induction_P Parameter: Plant Line Value: Columbia
  misc_feature: MA Experiment 20001451 PARAMETER Experiment Name: At_Far-red-induction_P Parameter: Timepoint (hr) Value: 24
  misc_feature: MA Experiment 20001451 PARAMETER Experiment Name: At_Far-red-induction_P Parameter: Tissue Value: Whole Plant
  misc_feature: MA Experiment ID: 20001560 Result: Down-regulated in Transcription
  misc_feature: MA Experiment 20001560 PARAMETER Experiment Name: At_Drought_Soil_Dry_P Parameter: Age (day) Value: 28
  misc_feature: MA Experiment 20001560 PARAMETER Experiment Name: At_Drought_Soil_Dry_P Parameter: Organism Value: A. thaliana
  misc_feature: MA Experiment 20001560 PARAMETER Experiment Name: At_Drought_Soil_Dry_P Parameter: Plant Line Value: WS
  misc_feature: MA Experiment 20001560 PARAMETER Experiment Name: At_Drought_Soil_Dry_P Parameter: Post Timepoint (hr) Value: None
  misc_feature: MA Experiment 20001560 PARAMETER Experiment Name: At_Drought_Soil_Dry_P Parameter: Post-Treatment Value: None
  misc_feature: MA Experiment 20001560 PARAMETER Experiment Name: At_Drought_Soil_Dry_P Parameter: Timepoint (day) Value: 14
  misc_feature: MA Experiment 20001560 PARAMETER Experiment Name: At_Drought_Soil_Dry_P Parameter: Treatment Value: Drought vs. No Drought
  misc_feature: MA Experiment ID: 20001904 Result: Down-regulated in Transcription
  misc_feature: MA Experiment 20001904 PARAMETER Experiment Name: At_Drought_Reproduction_P Parameter: Age (day) Value: 37
  misc_feature: MA Experiment 20001904 PARAMETER Experiment Name: At_Drought_Reproduction_P Parameter: Organism Value: A. thaliana
  misc_feature: MA Experiment 20001904 PARAMETER Experiment Name: At_Drought_Reproduction_P Parameter: Plant Line Value: WS
  misc_feature: MA Experiment 20001904 PARAMETER Experiment Name: At_Drought_Reproduction_P Parameter: Timepoint (day) Value: 7
  misc_feature: MA Experiment 20001904 PARAMETER Experiment Name: At_Drought_Reproduction_P Parameter: Tissue Value: Rosettes
  misc_feature: MA Experiment 20001904 PARAMETER Experiment Name: At_Drought_Reproduction_P Parameter: Treatment Value: Drought vs. No Drought
  misc_feature: MA Experiment ID: 20001905 Result: Down-regulated in Transcription
  misc_feature: MA Experiment 20001905 PARAMETER Experiment Name: At_Drought_Reproduction_P Parameter: Age (day) Value: 40
  misc_feature: MA Experiment 20001905 PARAMETER Experiment Name: At_Drought_Reproduction_P Parameter: Organism Value: A. thaliana
  misc_feature: MA Experiment 20001905 PARAMETER Experiment Name: At_Drought_Reproduction_P Parameter: Plant Line Value: WS
  misc_feature: MA Experiment 20001905 PARAMETER Experiment Name: At_Drought_Reproduction_P Parameter: Timepoint (day) Value: 10
  misc_feature: MA Experiment 20001905 PARAMETER Experiment Name: At_Drought_Reproduction_P Parameter: Tissue Value: Rosettes
  misc_feature: MA Experiment 20001905 PARAMETER Experiment Name: At_Drought_Reproduction_P Parameter: Treatment Value: Drought vs. No Drought
  misc_feature: MA Experiment ID: 20001911 Result: Down-regulated in Transcription
  misc_feature: MA Experiment 20001911 PARAMETER Experiment Name: At_Drought_Reproduction_P Parameter: Age (day) Value: 40
  misc_feature: MA Experiment 20001911 PARAMETER Experiment Name: At_Drought_Reproduction_P Parameter: Organism Value: A. thaliana
  misc_feature: MA Experiment 20001911 PARAMETER Experiment Name: At_Drought_Reproduction_P Parameter: Plant Line Value: WS
  misc_feature: MA Experiment 20001911 PARAMETER Experiment Name: At_Drought_Reproduction_P Parameter: Timepoint (day) Value: 10
  misc_feature: MA Experiment 20001911 PARAMETER Experiment Name: At_Drought_Reproduction_P Parameter: Tissue Value: Flowers
  misc_feature: MA Experiment 20001911 PARAMETER Experiment Name: At_Drought_Reproduction_P Parameter: Treatment Value: Drought vs. No Drought
agaaacaaaatccatggcttcagtgaattctcgaagtggtttctgcaactcaaactcaacattctacagcaaacgaacaccaatcccactcccgccaaatccatcactcgacgtcactactttcatttcttcacaagctcatcgtggccgtatcgccttcatcgacgcttccacaggtcaaaacctcaccttcaccgagctatggcgtgccgtggaatccgtcgccgattgtctctccgagatagggattcgcaaaggccacgtcgtcctcctcctctccccaaactcaattttattccccgtcgtttgtctctccgtcatgtcactaggcgcaatcatcaccaccacgaatccactcaacacttcaaacgagatcgctaaacagattaaggattcaaatccagtcctcgccttcaccacatcgcagcttctcccgaaaatctccgccgccgcaaagaagctcccgatcgtgcttatggacgaggaacgagttgactcagtgggtgatgtgagaagattggtggagatgatgaagaaggaaccgagtgggaaccgagtcaaggagcgagttgaccaggatgatacggcgactttgctttactcttcaggaaccacgggaatgagcaaaggagtgatctcgtctcaccgtaacttaatcgcgatggttcaaaccatcgtgaatcgatttggatctgatgatggagagcaacgattcatctgcactgttcctatgtttcacatctacggtttagctgcgttcgctactggattactcgcttacggatctacgatcatcgttctctctaaattcgagatgcacgagatgatgtcagcgattggcaagtatcaagccacgtctttgcctctcgtgcctccgattcttgtggcgatggttaacggtgcagatcagattaaggctaagtatgatttgagctctatgcatactgttttatgcggcggagctccgttgagtaaggaagtgactgaaggattcgcggagaagtatccgacggttaagattttacaaggttatgggttgactgagtcaacgggtataggagcttctacggatactgttgaggaaagtcggagatacggtaccgctgggaaattgtcggcaagtatggaagggaggattgttgatccggttactggtcagattcttggaccgaaacaaaccggtgagctttggctcaagggtccttccataatgaaaggttatttcagcaatgaggaagctacgagttcgactcttgattctgaaggatggttaagaactggagatctttgctatatcgatgaagatggattcatattcgtggttgatcggttaaaggaactgatcaagtacaagggttatcaggttgctccagctgagctagaggctttgttgcttactcatcctgaaatcactgatgctgcagtgatcccgtttccggacaaagaagtggggcaatttccaatggcatacgtcgtaaggaaaactgggagcagcttatcagagaagacaataatggagtttgtagcgaaacaagtagcaccatacaagaggatacgaaaagttgctttcgtatcttcaataccaaagaacccttcaggcaagattctacgcaaagatctcatcaagatagcaacttccaactccaagctttgaaattattatgagagtcaatctccatgtattatttattgtttgtgctgtagacctgtagaaaaatctgatactatgcatccatgttgaaatatgaccatgtggtcccaaaacacagaagattacacacataaatggccactatatggtttatgtaatagagtatatgttcaaaacatgtttctg

SEQ ID NO: 91830 - protein, 550 aa, Arabidopsis thaliana
  peptide (1)..(550): Ceres Seq. ID no. 12729692
  misc_feature (63)..(475): Pfam Name: AMP-binding enzyme Pfam Description: AMP-binding enzyme
  misc_feature (5)..(550): Homolog of NCBI NO: 18394871 NR Description: expressed protein; protein id: At1g20510.1 thaliana] >gi|13430676|gb|AAK25960.1|AF360250_1 unknown protein thaliana] >gi|14532846|gb|AAK64105.1| unknown protein
  misc_feature (5)..(550): Homolog of NCBI NO: 29893225 NR Description: 4-coumarate-CoA ligase-like protein [Arabidopsis
  misc_feature (5)..(459): Homolog of NCBI NO: 8778603 NR Description: F5M15.17 [Arabidopsis thaliana]
  misc_feature (455)..(550): Homolog of NCBI NO: 8778603 NR Description: F5M15.17 [Arabidopsis thaliana]
  misc_feature (8)..(541): Homolog of NCBI NO: 25402913 NR Description: protein F5M15.18 [imported] - Arabidopsis >gi|8778604|gb|AAF79612.1|AC027665_13 F5M15.18 [Arabidopsis
  misc_feature (1)..(546): Homolog of NCBI NO: 15217956 NR Description: hypothetical protein; protein id: At1g20480.1
  misc_feature (1)..(546): Homolog of NCBI NO: 29888143 NR Description: 4-coumarate-CoA ligase-like protein [Arabidopsis
  misc_feature (3)..(546): Homolog of NCBI NO: 29888141 NR Description: 4-coumarate-CoA ligase-like protein [Arabidopsis
  misc_feature (3)..(546): Homolog of NCBI NO: 30693203 NR Description: 4-coumarate:CoA ligase (4-coumaroyl-CoA synthase)
  misc_feature (8)..(405): Homolog of NCBI NO: 15217958 NR Description: hypothetical protein; protein id: At1g20490.1
ETKSMASVNSRSGFCNSNSTFYSKRTPIPLPPNPSLDVTTFISSQAHRGRIAFIDASTGQNLTFTELWRAVESVADCLSEIGIRKGHVVLLLSPNSILFPVVCLSVMSLGAIITTTNPLNTSNEIAKQIKDSNPVLAFTTSQLLPKISAAAKKLPIVLMDEERVDSVGDVRRLVEMMKKEPSGNRVKERVDQDDTATLLYSSGTTGMSKGVISSHRNLIAMVQTIVNRFGSDDGEQRFICTVPMFHIYGLAAFATGLLAYGSTIIVLSKFEMHEMMSAIGKYQATSLPLVPPILVAMVNGADQIKAKYDLSSMHTVLCGGAPLSKEVTEGFAEKYPTVKILQGYGLTESTGIGASTDTVEESRRYGTAGKLSASMEGRIVDPVTGQILGPKQTGELWLKGPSIMKGYFSNEEATSSTLDSEGWLRTGDLCYIDEDGFIFVVDRLKELIKYKGYQVAPAELEALLLTHPEITDAAVIPFPDKEVGQFPMAYVVRKTGSSLSEKTIMEFVAKQVAPYKRIRKVAFVSSIPKNPSGKILRKDLIKIATSNSKL

SEQ ID NO: 91831 - protein, 546 aa, Arabidopsis thaliana
  peptide (1)..(546): Ceres Seq. ID no. 12729693
  misc_feature (59)..(471): Pfam Name: AMP-binding enzyme Pfam Description: AMP-binding enzyme
  misc_feature (1)..(546): Homolog of NCBI NO: 18394871 NR Description: expressed protein; protein id: At1g20510.1 thaliana] >gi|13430676|gb|AAK25960.1|AF360250_1 unknown protein thaliana] >gi|14532846|gb|AAK64105.1| unknown protein
  misc_feature (1)..(546): Homolog of NCBI NO: 29893225 NR Description: 4-coumarate-CoA ligase-like protein [Arabidopsis
  misc_feature (1)..(455): Homolog of NCBI NO: 8778603 NR Description: F5M15.17 [Arabidopsis thaliana]
  misc_feature (451)..(546): Homolog of NCBI NO: 8778603 NR Description: F5M15.17 [Arabidopsis thaliana]
  misc_feature (4)..(537): Homolog of NCBI NO: 25402913 NR Description: protein F5M15.18 [imported] - Arabidopsis >gi|8778604|gb|AAF79612.1|AC027665_13 F5M15.18 [Arabidopsis
  misc_feature (1)..(542): Homolog of NCBI NO: 15217956 NR Description: hypothetical protein; protein id: At1g20480.1
  misc_feature (1)..(542): Homolog of NCBI NO: 29888143 NR Description: 4-coumarate-CoA ligase-like protein [Arabidopsis
  misc_feature (1)..(542): Homolog of NCBI NO: 29888141 NR Description: 4-coumarate-CoA ligase-like protein [Arabidopsis
  misc_feature (1)..(542): Homolog of NCBI NO: 30693203 NR Description: 4-coumarate:CoA ligase (4-coumaroyl-CoA synthase)
  misc_feature (4)..(401): Homolog of NCBI NO: 15217958 NR Description: hypothetical protein; protein id: At1g20490.1
MASVNSRSGFCNSNSTFYSKRTPIPLPPNPSLDVTTFISSQAHRGRIAFIDASTGQNLTFTELWRAVESVADCLSEIGIRKGHVVLLLSPNSILFPVVCLSVMSLGAIITTTNPLNTSNEIAKQIKDSNPVLAFTTSQLLPKISAAAKKLPIVLMDEERVDSVGDVRRLVEMMKKEPSGNRVKERVDQDDTATLLYSSGTTGMSKGVISSHRNLIAMVQTIVNRFGSDDGEQRFICTVPMFHIYGLAAFATGLLAYGSTIIVLSKFEMHEMMSAIGKYQATSLPLVPPILVAMVNGADQIKAKYDLSSMHTVLCGGAPLSKEVTEGFAEKYPTVKILQGYGLTESTGIGASTDTVEESRRYGTAGKLSASMEGRIVDPVTGQILGPKQTGELWLKGPSIMKGYFSNEEATSSTLDSEGWLRTGDLCYIDEDGFIFVVDRLKELIKYKGYQVAPAELEALLLTHPEITDAAVIPFPDKEVGQFPMAYVVRKTGSSLSEKTIMEFVAKQVAPYKRIRKVAFVSSIPKNPSGKILRKDLIKIATSNSKL

SEQ ID NO: 91832 - protein, 444 aa, Arabidopsis thaliana
  peptide (1)..(444): Ceres Seq. ID no. 12729694
  misc_feature (1)..(369): Pfam Name: AMP-binding enzyme Pfam Description: AMP-binding enzyme
  misc_feature (1)..(444): Homolog of NCBI NO: 18394871 NR Description: expressed protein; protein id: At1g20510.1 thaliana] >gi|13430676|gb|AAK25960.1|AF360250_1 unknown protein thaliana] >gi|14532846|gb|AAK64105.1| unknown protein
  misc_feature (1)..(444): Homolog of NCBI NO: 29893225 NR Description: 4-coumarate-CoA ligase-like protein [Arabidopsis
  misc_feature (1)..(353): Homolog of NCBI NO: 8778603 NR Description: F5M15.17 [Arabidopsis thaliana]
  misc_feature (349)..(444): Homolog of NCBI NO: 8778603 NR Description: F5M15.17 [Arabidopsis thaliana]
  misc_feature (1)..(435): Homolog of NCBI NO: 25402913 NR Description: protein F5M15.18 [imported] - Arabidopsis >gi|8778604|gb|AAF79612.1|AC027665_13 F5M15.18 [Arabidopsis
  misc_feature (1)..(440): Homolog of NCBI NO: 15217956 NR Description: hypothetical protein; protein id: At1g20480.1
  misc_feature (1)..(440): Homolog of NCBI NO: 29888143 NR Description: 4-coumarate-CoA ligase-like protein [Arabidopsis
  misc_feature (1)..(440): Homolog of NCBI NO: 29888141 NR Description: 4-coumarate-CoA ligase-like protein [Arabidopsis
  misc_feature (1)..(440): Homolog of NCBI NO: 30693203 NR Description: 4-coumarate:CoA ligase (4-coumaroyl-CoA synthase)
  misc_feature (1)..(299): Homolog of NCBI NO: 15217958 NR Description: hypothetical protein; protein id: At1g20490.1
MSLGAIITTTNPLNTSNEIAKQIKDSNPVLAFTTSQLLPKISAAAKKLPIVLMDEERVDSVGDVRRLVEMMKKEPSGNRVKERVDQDDTATLLYSSGTTGMSKGVISSHRNLIAMVQTIVNRFGSDDGEQRFICTVPMFHIYGLAAFATGLLAYGSTIIVLSKFEMHEMMSAIGKYQATSLPLVPPILVAMVNGADQIKAKYDLSSMHTVLCGGAPLSKEVTEGFAEKYPTVKILQGYGLTESTGIGASTDTVEESRRYGTAGKLSASMEGRIVDPVTGQILGPKQTGELWLKGPSIMKGYFSNEEATSSTLDSEGWLRTGDLCYIDEDGFIFVVDRLKELIKYKGYQVAPAELEALLLTHPEITDAAVIPFPDKEVGQFPMAYVVRKTGSSLSEKTIMEFVAKQVAPYKRIRKVAFVSSIPKNPSGKILRKDLIKIATSNSKL

SEQ ID NO: 91833 - DNA, 3068 bp, Arabidopsis thaliana
  misc_feature (1)..(3068): Ceres Seq. ID no. 12729703
  misc_feature: MA Experiment ID: 20000307 Result: Up-regulated in Transcription
  misc_feature: MA Experiment 20000307 PARAMETER Experiment Name: At_Germinating_Seeds_Sub_P Parameter: Age (hr) Value: 24 vs. 0
  misc_feature: MA Experiment 20000307 PARAMETER Experiment Name: At_Germinating_Seeds_Sub_P Parameter: Organism Value: A. thaliana
  misc_feature: MA Experiment 20000307 PARAMETER Experiment Name: At_Germinating_Seeds_Sub_P Parameter: Plant Line Value: WS
  misc_feature: MA Experiment 20000307 PARAMETER Experiment Name: At_Germinating_Seeds_Sub_P Parameter: Tissue Value: Germinating Seeds
  misc_feature: MA Experiment ID: 20000327 Result: Up-regulated in Transcription
  misc_feature: MA Experiment 20000327 PARAMETER Experiment Name: At_42deg_Heat_Sub_P Parameter: Age (day) Value: 14
  misc_feature: MA Experiment 20000327 PARAMETER Experiment Name: At_42deg_Heat_Sub_P Parameter: Organism Value: A. thaliana
  misc_feature: MA Experiment 20000327 PARAMETER Experiment Name: At_42deg_Heat_Sub_P Parameter: Plant Line Value: WS
  misc_feature: MA Experiment 20000327 PARAMETER Experiment Name: At_42deg_Heat_Sub_P Parameter: Temperature (deg C) Value: 42 vs. 22
  misc_feature: MA Experiment 20000327 PARAMETER Experiment Name: At_42deg_Heat_Sub_P Parameter: Timepoint (hr) Value: 1
  misc_feature: MA Experiment 20000327 PARAMETER Experiment Name: At_42deg_Heat_Sub_P Parameter: Tissue Value: Aerial
gccatgtcccgatgcataaatgagataacgatccacaaaattttcattttaaaaatttcatctttttttgttttcatcttccgtgaagaagtagtaccacataacccccatcagacatctttaaagctttcttcttttccttgtttcttttggttttgagatttgggtttcttttcatatctgttccttctatctcagacaacaaattgcaacagaggaaatttaaaaacccacttgaggaaggaatctttgagaatctctctctgacttatgttgcttcattgattttggagatatatccatggaagatagtttccttcaatctgagaacgtggttatggacgctgacttcatggatggattgttactagatggttgttggttagagactacagatggatctgagtttcttaacatagctccttcaacttcttctgttagcccttttgatccaacttccttcatgtggtctccaactcaagatacatcagctctttgcacatcaggagttgtatctcagatgtatggtcaggattgtgtagaaagatctagtcttgatgagtttcaatggaacaaacgatggtggattggaccaggaggtggtggttcttcggttactgagaggttggttcaagcagttgaacacattaaagattacacaacagcgagaggctcacttattcagttatgggttccggttaatagaggcggtaagcgagttttgaccacaaaggaacaaccttttagccatgatccgttgtgtcaaagacttgcaaactatagagagatctctgtgaattatcacttctctgctgagcaagatgattccaaggctttagctggtttgcctgggagggttttcttggggaagcttcctgaatggactcctgatgttaggtttttcaagagcgaggagtatccgagagtacaccatgctcaggactgcgatgtccgtggaacgctggcgattccggtgtttgaacaaggtagtaagatttgcttgggtgttattgaggttgtaatgaccactgagatggttaaactaagacctgagcttgaaagcatttgcagagcacttcaggcagttgatcttaggagcaccgagcttccgattccaccttctctaaagggatgtgacttatcctacaaagctgccttacctgaaatccgaaacctcttgagatgtgcttgtgagactcataaactacctttagctcagacatgggtttcttgtcaacagcaaaacaaaagcgggtgccgtcacaacgatgagaactacatccattgcgtatcaaccattgatgatgcttgctacgttggtgatccaacagttcgtgagttccatgaagcttgctctgagcatcacctcttgaaaggccaaggagttgcaggtcaagccttcttgaccaatggaccttgcttttcatctgatgtatctaactacaagaaatcagagtaccctctctctcaccatgctaatatgtacggtttacatggcgcggttgcaattcgcctgcggtgcatccacacgggctctgctgatttcgtcttagagttctttttgcctaaagactgcgatgatctggaggaacagaggaaaatgttgaatgctctttcaactattatggctcatgtgcctagaagcttaaggactgttacagacaaagaactagaagaagagagtgaagtgatagagagggaagagatagtaacgccaaagatagaaaacgcatctgaactccacggaaattccccatggaatgcctctcttgaagaaatccagcggagtaataatactagtaatcctcagaatcttggactggtatttgatggaggagacaaaccaaatgatggttttggcttaaaaagaggttttgactacaccatggattctaatgtcaatgagagcagcactttctctagtggtggtttcagtatgatggccgagaaaaagcgtacaaaagcagataaaaccatcactttggatgttcttcgacagtatttcgctgggagcttgaaagatgcagccaagaatatcggtgtttgtccaacgaccttgaagagaatatgcagacagcatggtatacaaagatggccttcaagaaagataaaaaaagtgggacattctctgcagaagatccaacgagtgattgattcggttcaaggtgtttctggtcctcttcccataggctcattctatgcaaatttccccaatttagtctcacagtcacaagaaccatcacaacaagccaagaccacgcctcctcctccgccgccagtgcagcttgcaaagtcccctgtatcctcgtatagtcacagttcaaactctagccaatgttgctccagtgaaacccaactaaacagcggtgcaacaaccgatcctccttcaactgatgtaggaggtgcattgaagaagacgagcagcgaaatcgagcttcaaagctcgagtcttgacgagacaattttgactctctccagtttagaaaacatccctcaaggcaccaacttgttatcatctcaagatgatgactttctgaggattaaagttagctacggagaagagaagatcagattacggatgcggaattcgcgcaggttaagagatctattgtgggagattgggaagcggtttagcatagaggatatgagcaggtatgatctaaagtacttagacgaagacaatgaatgggttttgttgacttgcgacgaagatgtagaagagtgtgtagatgtctgcagaactacaccgagtcataccattaagcttttgcttcaggcttcttctcatcatttccctgaacgttcttcagctactgaatacagtttatggcactgaccttaaatcagagaaagaagaaagaaaaagaagcgttttaggacatgacacaaaagatagtaatacctttgtgttctgttataattgttcataattttatctttggtttttttgaaagattactaggagaggtgctttgggttttgtttttaaaaacgcaccagagacaagaagagaagaacatgtaaagatcctatcttcctgagaaattgaagttgttgtttttttcttc

SEQ ID NO: 91834 - protein, 844 aa, Arabidopsis thaliana
  peptide (1)..(844): Ceres Seq. ID no. 12729704
  misc_feature (744)..(827): Pfam Name: PB1 domain Pfam Description: PB1 domain
  misc_feature (1)..(722): Homolog of NCBI NO: 15223014 NR Description: hypothetical protein; protein id: At1g76350.1
  misc_feature (663)..(838): Homolog of NCBI NO: 15223014 NR Description: hypothetical protein; protein id: At1g76350.1
  misc_feature (92)..(682): Homolog of NCBI NO: 33468530 NR Description: NIN-like protein 1 [Lotus corniculatus var.
  misc_feature (663)..(828): Homolog of NCBI NO: 33468530 NR Description: NIN-like protein 1 [Lotus corniculatus var.
  misc_feature (13)..(63): Homolog of NCBI NO: 33468530 NR Description: NIN-like protein 1 [Lotus corniculatus var.
  misc_feature (104)..(480): Homolog of NCBI NO: 20503001 NR Description: Putataive nodule inception protein [Oryza sativa
  misc_feature (520)..(719): Homolog of NCBI NO: 20503001 NR Description: Putataive nodule inception protein [Oryza sativa
  misc_feature (724)..(827): Homolog of NCBI NO: 20503001 NR Description: Putataive nodule inception protein [Oryza sativa
  misc_feature (81)..(499): Homolog of NCBI NO: 7486018 NR Description: hypothetical protein F23E12.170 - Arabidopsis >gi|3080423|emb|CAA18742.1| putative protein [Arabidopsis >gi|7270479|emb|CAB80244.1| putative protein [Arabidopsis
  misc_feature (549)..(828): Homolog of NCBI NO: 7486018 NR Description: hypothetical protein F23E12.170 - Arabidopsis >gi|3080423|emb|CAA18742.1| putative protein [Arabidopsis >gi|7270479|emb|CAB80244.1| putative protein [Arabidopsis
MEDSFLQSENVVMDADFMDGLLLDGCWLETTDGSEFLNIAPSTSSVSPFDPTSFMWSPTQDTSALCTSGVVSQMYGQDCVERSSLDEFQWNKRWWIGPGGGGSSVTERLVQAVEHIKDYTTARGSLIQLWVPVNRGGKRVLTTKEQPFSHDPLCQRLANYREISVNYHFSAEQDDSKALAGLPGRVFLGKLPEWTPDVRFFKSEEYPRVHHAQDCDVRGTLAIPVFEQGSKICLGVIEVVMTTEMVKLRPELESICRALQAVDLRSTELPIPPSLKGCDLSYKAALPEIRNLLRCACETHKLPLAQTWVSCQQQNKSGCRHNDENYIHCVSTIDDACYVGDPTVREFHEACSEHHLLKGQGVAGQAFLTNGPCFSSDVSNYKKSEYPLSHHANMYGLHGAVAIRLRCIHTGSADFVLEFFLPKDCDDLEEQRKMLNALSTIMAHVPRSLRTVTDKELEEESEVIEREEIVTPKIENASELHGNSPWNASLEEIQRSNNTSNPQNLGLVFDGGDKPNDGFGLKRGFDYTMDSNVNESSTFSSGGFSMMAEKKRTKADKTITLDVLRQYFAGSLKDAAKNIGVCPTTLKRICRQHGIQRWPSRKIKKVGHSLQKIQRVIDSVQGVSGPLPIGSFYANFPNLVSQSQEPSQQAKTTPPPPPPVQLAKSPVSSYSHSSNSSQCCSSETQLNSGATTDPPSTDVGGALKKTSSEIELQSSSLDETILTLSSLENIPQGTNLLSSQDDDFLRIKVSYGEEKIRLRMRNSRRLRDLLWEIGKRFSIEDMSRYDLKYLDEDNEWVLLTCDEDVEECVDVCRTTPSHTIKLLLQASSHHFPERSSATEYSLWH

SEQ ID NO: 91835 - protein, 832 aa, Arabidopsis thaliana
  peptide (1)..(832): Ceres Seq. ID no. 12729705
  misc_feature (732)..(815): Pfam Name: PB1 domain Pfam Description: PB1 domain
  misc_feature (1)..(710): Homolog of NCBI NO: 15223014 NR Description: hypothetical protein; protein id: At1g76350.1
  misc_feature (651)..(826): Homolog of NCBI NO: 15223014 NR Description: hypothetical protein; protein id: At1g76350.1
  misc_feature (80)..(670): Homolog of NCBI NO: 33468530 NR Description: NIN-like protein 1 [Lotus corniculatus var.
  misc_feature (651)..(816): Homolog of NCBI NO: 33468530 NR Description: NIN-like protein 1 [Lotus corniculatus var.
  misc_feature (1)..(51): Homolog of NCBI NO: 33468530 NR Description: NIN-like protein 1 [Lotus corniculatus var.
  misc_feature (92)..(468): Homolog of NCBI NO: 20503001 NR Description: Putataive nodule inception protein [Oryza sativa
  misc_feature (508)..(707): Homolog of NCBI NO: 20503001 NR Description: Putataive nodule inception protein [Oryza sativa
  misc_feature (712)..(815): Homolog of NCBI NO: 20503001 NR Description: Putataive nodule inception protein [Oryza sativa
  misc_feature (69)..(487): Homolog of NCBI NO: 7486018 NR Description: hypothetical protein F23E12.170 - Arabidopsis >gi|3080423|emb|CAA18742.1| putative protein [Arabidopsis >gi|7270479|emb|CAB80244.1| putative protein [Arabidopsis
  misc_feature (537)..(816): Homolog of NCBI NO: 7486018 NR Description: hypothetical protein F23E12.170 - Arabidopsis >gi|3080423|emb|CAA18742.1| putative protein [Arabidopsis >gi|7270479|emb|CAB80244.1| putative protein [Arabidopsis
MDADFMDGLLLDGCWLETTDGSEFLNIAPSTSSVSPFDPTSFMWSPTQDTSALCTSGVVSQMYGQDCVERSSLDEFQWNKRWWIGPGGGGSSVTERLVQAVEHIKDYTTARGSLIQLWVPVNRGGKRVLTTKEQPFSHDPLCQRLANYREISVNYHFSAEQDDSKALAGLPGRVFLGKLPEWTPDVRFFKSEEYPRVHHAQDCDVRGTLAIPVFEQGSKICLGVIEVVMTTEMVKLRPELESICRALQAVDLRSTELPIPPSLKGCDLSYKAALPEIRNLLRCACETHKLPLAQTWVSCQQQNKSGCRHNDENYIHCVSTIDDACYVGDPTVREFHEACSEHHLLKGQGVAGQAFLTNGPCFSSDVSNYKKSEYPLSHHANMYGLHGAVAIRLRCIHTGSADFVLEFFLPKDCDDLEEQRKMLNALSTIMAHVPRSLRTVTDKELEEESEVIEREEIVTPKIENASELHGNSPWNASLEEIQRSNNTSNPQNLGLVFDGGDKPNDGFGLKRGFDYTMDSNVNESSTFSSGGFSMMAEKKRTKADKTITLDVLRQYFAGSLKDAAKNIGVCPTTLKRICRQHGIQRWPSRKIKKVGHSLQKIQRVIDSVQGVSGPLPIGSFYANFPNLVSQSQEPSQQAKTTPPPPPPVQLAKSPVSSYSHSSNSSQCCSSETQLNSGATTDPPSTDVGGALKKTSSEIELQSSSLDETILTLSSLENIPQGTNLLSSQDDDFLRIKVSYGEEKIRLRMRNSRRLRDLLWEIGKRFSIEDMSRYDLKYLDEDNEWVLLTCDEDVEECVDVCRTTPSHTIKLLLQASSHHFPERSSATEYSLWH

SEQ ID NO: 91836 - protein, 827 aa, Arabidopsis thaliana
  peptide (1)..(827): Ceres Seq. ID no. 12729706
  misc_feature (727)..(810): Pfam Name: PB1 domain Pfam Description: PB1 domain
  misc_feature (1)..(705): Homolog of NCBI NO: 15223014 NR Description: hypothetical protein; protein id: At1g76350.1
  misc_feature (646)..(821): Homolog of NCBI NO: 15223014 NR Description: hypothetical protein; protein id: At1g76350.1
  misc_feature (75)..(665): Homolog of NCBI NO: 33468530 NR Description: NIN-like protein 1 [Lotus corniculatus var.
  misc_feature (646)..(811): Homolog of NCBI NO: 33468530 NR Description: NIN-like protein 1 [Lotus corniculatus var.
  misc_feature (1)..(46): Homolog of NCBI NO: 33468530 NR Description: NIN-like protein 1 [Lotus corniculatus var.
  misc_feature (87)..(463): Homolog of NCBI NO: 20503001 NR Description: Putataive nodule inception protein [Oryza sativa
  misc_feature (503)..(702): Homolog of NCBI NO: 20503001 NR Description: Putataive nodule inception protein [Oryza sativa
  misc_feature (707)..(810): Homolog of NCBI NO: 20503001 NR Description: Putataive nodule inception protein [Oryza sativa
  misc_feature (64)..(482): Homolog of NCBI NO: 7486018 NR Description: hypothetical protein F23E12.170 - Arabidopsis >gi|3080423|emb|CAA18742.1| putative protein [Arabidopsis >gi|7270479|emb|CAB80244.1| putative protein [Arabidopsis
  misc_feature (532)..(811): Homolog of NCBI NO: 7486018 NR Description: hypothetical protein F23E12.170 - Arabidopsis >gi|3080423|emb|CAA18742.1| putative protein [Arabidopsis >gi|7270479|emb|CAB80244.1| putative protein [Arabidopsis
MDGLLLDGCWLETTDGSEFLNIAPSTSSVSPFDPTSFMWSPTQDTSALCTSGVVSQMYGQDCVERSSLDEFQWNKRWWIGPGGGGSSVTERLVQAVEHIKDYTTARGSLIQLWVPVNRGGKRVLTTKEQPFSHDPLCQRLANYREISVNYHFSAEQDDSKALAGLPGRVFLGKLPEWTPDVRFFKSEEYPRVHHAQDCDVRGTLAIPVFEQGSKICLGVIEVVMTTEMVKLRPELESICRALQAVDLRSTELPIPPSLKGCDLSYKAALPEIRNLLRCACETHKLPLAQTWVSCQQQNKSGCRHNDENYIHCVSTIDDACYVGDPTVREFHEACSEHHLLKGQGVAGQAFLTNGPCFSSDVSNYKKSEYPLSHHANMYGLHGAVAIRLRCIHTGSADFVLEFFLPKDCDDLEEQRKMLNALSTIMAHVPRSLRTVTDKELEEESEVIEREEIVTPKIENASELHGNSPWNASLEEIQRSNNTSNPQNLGLVFDGGDKPNDGFGLKRGFDYTMDSNVNESSTFSSGGFSMMAEKKRTKADKTITLDVLRQYFAGSLKDAAKNIGVCPTTLKRICRQHGIQRWPSRKIKKVGHSLQKIQRVIDSVQGVSGPLPIGSFYANFPNLVSQSQEPSQQAKTTPPPPPPVQLAKSPVSSYSHSSNSSQCCSSETQLNSGATTDPPSTDVGGALKKTSSEIELQSSSLDETILTLSSLENIPQGTNLLSSQDDDFLRIKVSYGEEKIRLRMRNSRRLRDLLWEIGKRFSIEDMSRYDLKYLDEDNEWVLLTCDEDVEECVDVCRTTPSHTIKLLLQASSHHFPERSSATEYSLWH

SEQ ID NO: 91837 - DNA, 636 bp, Arabidopsis thaliana
  misc_feature (1)..(636): Ceres Seq. ID no. 12729711
  misc_feature: MA Experiment ID: 20000185 Result: Up-regulated in Transcription
  misc_feature: MA Experiment 20000185 PARAMETER Experiment Name: At_Roots__P Parameter: Age (day) Value: 7 vs. 21
  misc_feature: MA Experiment 20000185 PARAMETER Experiment Name: At_Roots__P Parameter: Organism Value: A. thaliana
  misc_feature: MA Experiment 20000185 PARAMETER Experiment Name: At_Roots__P Parameter: Tissue Value: Roots vs. Whole Plant
  misc_feature: MA Experiment ID: 20000227 Result: Down-regulated in Transcription
  misc_feature: MA Experiment 20000227 PARAMETER Experiment Name: At_Root-Tips-vs-Tops_P Parameter: Tissue Value: Root Tips vs. Root Tops
  misc_feature: MA Experiment ID: 20000234 Result: Down-regulated in Transcription
  misc_feature: MA Experiment 20000234 PARAMETER Experiment Name: At_Siliques_P Parameter: Age (day) Value: 21
  misc_feature: MA Experiment 20000234 PARAMETER Experiment Name: At_Siliques_P Parameter: Organism Value: A. thaliana
  misc_feature: MA Experiment 20000234 PARAMETER Experiment Name: At_Siliques_P Parameter: Plant Line Value: WS
  misc_feature: MA Experiment 20000234 PARAMETER Experiment Name: At_Siliques_P Parameter: Tissue Value: Less Than 5mm Siliques vs. Whole Plant
  misc_feature: MA Experiment ID: 20000235 Result: Down-regulated in Transcription
  misc_feature: MA Experiment 20000235 PARAMETER Experiment Name: At_Siliques_P Parameter: Age (day) Value: 21
  misc_feature: MA Experiment 20000235 PARAMETER Experiment Name: At_Siliques_P Parameter: Organism Value: A. thaliana
  misc_feature: MA Experiment 20000235 PARAMETER Experiment Name: At_Siliques_P Parameter: Plant Line Value: WS
  misc_feature: MA Experiment 20000235 PARAMETER Experiment Name: At_Siliques_P Parameter: Tissue Value: 5-10mm Siliques vs. Whole Plant
  misc_feature: MA Experiment ID: 20000439 Result: Up-regulated in Transcription
  misc_feature: MA Experiment 20000439 PARAMETER Experiment Name: At_Roots__P Parameter: Age (day) Value: 14 vs. 21
  misc_feature: MA Experiment 20000439 PARAMETER Experiment Name: At_Roots__P Parameter: Organism Value: A. thaliana
  misc_feature: MA Experiment 20000439 PARAMETER Experiment Name: At_Roots__P Parameter: Tissue Value: Roots vs. Whole Plant
  misc_feature: MA Experiment ID: 20000496 Result: Up-regulated in Transcription
  misc_feature: MA Experiment 20000496 PARAMETER Experiment Name: At_Guard_Cells_P Parameter: Harvest Date Value: 7/19/2002
  misc_feature: MA Experiment 20000496 PARAMETER Experiment Name: At_Guard_Cells_P Parameter: Organism Value: Canola
  misc_feature: MA Experiment 20000496 PARAMETER Experiment Name: At_Guard_Cells_P Parameter: Tissue Value: Guard Cells vs. Leaves
atggtaaaaaaaaaaaaggaaaaggagaaaagcaaagaaatagaggagatggatagagagatccaaaacggtgcgtatagtgggagagtgatgactgaggagcagatggagattctccgtaagcagatcgccgtttacgccgttatttgtgaccaactcgtcctcctccacaactccctctcttcttaccatccactctcatcaggagtgaggccaatggttggcggatactttgatccgatgggggcatcgtcaagttctcataggatatcgactaggcatcggtggactccgacttcaacacagcttcagatacttgagagcatttacgacgaaggaagtggaacaccgaatcgacggaggattagagagatcgcgacggagctgtctgaacatggacagatcacggagacaaatgtctacaattggtttcaaaaccggcgagctcggtccaaacgaaagcagcctcaaacgacgacagctaatggtcaggctgacgatgtggcggtgacaacggaggaaaggaggagttgtggagattcagggggattagagtcttatgagcatatactcttcccaagtcctgacttagggattgagcatttgttgagtatagggaaatttatggagacttaa

SEQ ID NO: 91838 - protein, 211 aa, Arabidopsis thaliana
  peptide (1)..(211): Ceres Seq. ID no. 12729712
  misc_feature (92)..(153): Pfam Name: Homeobox domain Pfam Description: Homeobox domain
  misc_feature (1)..(211): Homolog of NCBI NO: 30686974 NR Description: homeodomain protein PALE-2, putative [Arabidopsis >gi|8886930|gb|AAF80616.1|AC069251_9 F2D10.19 [Arabidopsis
  misc_feature (17)..(210): Homolog of NCBI NO: 15218015 NR Description: homeodomain protein; protein id: At1g20710.1
  misc_feature (22)..(203): Homolog of NCBI NO: 3955019 NR Description: HB1 homeodomain protein [Populus tremula x
  misc_feature (22)..(203): Homolog of NCBI NO: 40233067 NR Description: homeodomain protein HB1 [Populus tomentosa]
  misc_feature (29)..(203): Homolog of NCBI NO: 3955021 NR Description: HB2 homeodomain protein [Populus tremula x
  misc_feature (29)..(166): Homolog of NCBI NO: 40233087 NR Description: homeodomain protein HB2 [Populus tomentosa]
  misc_feature (7)..(174): Homolog of NCBI NO: 34909272 NR Description: putative HB2 homeodomain protein [Oryza sativa
  misc_feature (11)..(173): Homolog of NCBI NO: 15237035 NR Description: homeodomain - like protein; protein id: supported by cDNA: gi_15081750 [Arabidopsis thaliana]
  misc_feature (80)..(186): Homolog of NCBI NO: 15228599 NR Description: homeodomain protein; protein id: At3g03660.1 thaliana] >gi|6091768|gb|AAF03478.1|AC009327_17 hypothetical
  misc_feature (80)..(157): Homolog of NCBI NO: 34908148 NR Description: P0408C03.16 [Oryza sativa (japonica
MVKKKKEKEKSKEIEEMDREIQNGAYSGRVMTEEQMEILRKQIAVYAVICDQLVLLHNSLSSYHPLSSGVRPMVGGYFDPMGASSSSHRISTRHRWTPTSTQLQILESIYDEGSGTPNRRRIREIATELSEHGQITETNVYNWFQNRRARSKRKQPQTTTANGQADDVAVTTEERRSCGDSGGLESYEHILFPSPDLGIEHLLSIGKFMET

SEQ ID NO: 91839 - protein, 195 aa, Arabidopsis thaliana
  peptide (1)..(195): Ceres Seq. ID no. 12729713
  misc_feature (76)..(137): Pfam Name: Homeobox domain Pfam Description: Homeobox domain
  misc_feature (1)..(195): Homolog of NCBI NO: 30686974 NR Description: homeodomain protein PALE-2, putative [Arabidopsis >gi|8886930|gb|AAF80616.1|AC069251_9 F2D10.19 [Arabidopsis
  misc_feature (1)..(194): Homolog of NCBI NO: 15218015 NR Description: homeodomain protein; protein id: At1g20710.1
  misc_feature (6)..(187): Homolog of NCBI NO: 3955019 NR Description: HB1 homeodomain protein [Populus tremula x
  misc_feature (6)..(187): Homolog of NCBI NO: 40233067 NR Description: homeodomain protein HB1 [Populus tomentosa]
  misc_feature (13)..(187): Homolog of NCBI NO: 3955021 NR Description: HB2 homeodomain protein [Populus tremula x
  misc_feature (13)..(150): Homolog of NCBI NO: 40233087 NR Description: homeodomain protein HB2 [Populus tomentosa]
  misc_feature (1)..(158): Homolog of NCBI NO: 34909272 NR Description: putative HB2 homeodomain protein [Oryza sativa
  misc_feature (1)..(157): Homolog of NCBI NO: 15237035 NR Description: homeodomain - like protein; protein id: supported by cDNA: gi_15081750 [Arabidopsis thaliana]
  misc_feature (64)..(170): Homolog of NCBI NO: 15228599 NR Description: homeodomain protein; protein id: At3g03660.1 thaliana] >gi|6091768|gb|AAF03478.1|AC009327_17 hypothetical
  misc_feature (64)..(141): Homolog of NCBI NO: 34908148 NR Description: P0408C03.16 [Oryza sativa (japonica
MDREIQNGAYSGRVMTEEQMEILRKQIAVYAVICDQLVLLHNSLSSYHPLSSGVRPMVGGYFDPMGASSSSHRISTRHRWTPTSTQLQILESIYDEGSGTPNRRRIREIATELSEHGQITETNVYNWFQNRRARSKRKQPQTTTANGQADDVAVTTEERRSCGDSGGLESYEHILFPSPDLGIEHLLSIGKFMET

SEQ ID NO: 91840 - protein, 181 aa, Arabidopsis thaliana
  peptide (1)..(181): Ceres Seq. ID no. 12729714
  misc_feature (62)..(123): Pfam Name: Homeobox domain Pfam Description: Homeobox domain
  misc_feature (1)..(181): Homolog of NCBI NO: 30686974 NR Description: homeodomain protein PALE-2, putative [Arabidopsis >gi|8886930|gb|AAF80616.1|AC069251_9 F2D10.19 [Arabidopsis
  misc_feature (1)..(180): Homolog of NCBI NO: 15218015 NR Description: homeodomain protein; protein id: At1g20710.1
  misc_feature (1)..(173): Homolog of NCBI NO: 3955019 NR Description: HB1 homeodomain protein [Populus tremula x
  misc_feature (1)..(173): Homolog of NCBI NO: 40233067 NR Description: homeodomain protein HB1 [Populus tomentosa]
  misc_feature (1)..(173): Homolog of NCBI NO: 3955021 NR Description: HB2 homeodomain protein [Populus tremula x
  misc_feature (1)..(136): Homolog of NCBI NO: 40233087 NR Description: homeodomain protein HB2 [Populus tomentosa]
  misc_feature (1)..(144): Homolog of NCBI NO: 34909272 NR Description: putative HB2 homeodomain protein [Oryza sativa
  misc_feature (1)..(143): Homolog of NCBI NO: 15237035 NR Description: homeodomain - like protein; protein id: supported by cDNA: gi_15081750 [Arabidopsis thaliana]
  misc_feature (50)..(156): Homolog of NCBI NO: 15228599 NR Description: homeodomain protein; protein id: At3g03660.1 thaliana] >gi|6091768|gb|AAF03478.1|AC009327_17 hypothetical
  misc_feature (50)..(127): Homolog of NCBI NO: 34908148 NR Description: P0408C03.16 [Oryza sativa (japonica
MTEEQMEILRKQIAVYAVICDQLVLLHNSLSSYHPLSSGVRPMVGGYFDPMGASSSSHRISTRHRWTPTSTQLQILESIYDEGSGTPNRRRIREIATELSEHGQITETNVYNWFQNRRARSKRKQPQTTTANGQADDVAVTTEERRSCGDSGGLESYEHILFPSPDLGIEHLLSIGKFMET

SEQ ID NO: 91841 - DNA, 594 bp, Arabidopsis thaliana
  misc_feature (1)..(594): Ceres Seq. ID no. 12729715
  misc_feature: MA Experiment ID: 20000314 Result: Up-regulated in Transcription
  misc_feature: MA Experiment 20000314 PARAMETER Experiment Name: At_14day_Shoots-Roots_Sub_P Parameter: Age (day) Value: 14
  misc_feature: MA Experiment 20000314 PARAMETER Experiment Name: At_14day_Shoots-Roots_Sub_P Parameter: Organism Value: A. thaliana
  misc_feature: MA Experiment 20000314 PARAMETER Experiment Name: At_14day_Shoots-Roots_Sub_P Parameter: Plant Line Value: WS
  misc_feature: MA Experiment 20000314 PARAMETER Experiment Name: At_14day_Shoots-Roots_Sub_P Parameter: Tissue Value: Roots vs. Whole Plant
atggagcaagagagcctaaacggtaggtatggtagtagagtaatgacggatgaacaaatggagactcttcgtaagcaaatcgccatttacgccgttctttgcgaccagctcgtcttcctccacaactctctctcttctgtccctcttctttcatcaggaatgaatccaatgagaggtgagtattttgatccaatggtggcatcgtcaagcgctcatggaatgtcgactcggcctcgatggactcctacgacaacgcaacttcagattcttgagaacatttacaaggaaggcagtggaacaccaaatccgcggaggattaaagagatcacgatggaactgtctgaacatggacaaatcatggagaaaaatgtataccattggtttcaaaaccgacgagctcggtccaaacgaaagcaacctccgacaacgacaattacctcgagtcaggcggatgatgcggccgtgacaacaactgaggagagagggaggtgtggagatgattctggagggtttgagtcttatgagcatatactgttcccgagtcctgatttagggattgagcatttgttgaatagggacaagtttatagactga

SEQ ID NO: 91842 - protein, 197 aa, Arabidopsis thaliana
  peptide (1)..(197): Ceres Seq. ID no. 12729716
  misc_feature (76)..(137): Pfam Name: Homeobox domain Pfam Description: Homeobox domain
  misc_feature (1)..(197): Homolog of NCBI NO: 15218015 NR Description: homeodomain protein; protein id: At1g20710.1
  misc_feature (1)..(197): Homolog of NCBI NO: 30686974 NR Description: homeodomain protein PALE-2, putative [Arabidopsis >gi|8886930|gb|AAF80616.1|AC069251_9 F2D10.19 [Arabidopsis
  misc_feature (5)..(193): Homolog of NCBI NO: 3955021 NR Description: HB2 homeodomain protein [Populus tremula x
  misc_feature (8)..(192): Homolog of NCBI NO: 3955019 NR Description: HB1 homeodomain protein [Populus tremula x
  misc_feature (5)..(193): Homolog of NCBI NO: 40233087 NR Description: homeodomain protein HB2 [Populus tomentosa]
  misc_feature (8)..(192): Homolog of NCBI NO: 40233067 NR Description: homeodomain protein HB1 [Populus tomentosa]
  misc_feature (8)..(139): Homolog of NCBI NO: 15237035 NR Description: homeodomain - like protein; protein id: supported by cDNA: gi_15081750 [Arabidopsis thaliana]
  misc_feature (13)..(156): Homolog of NCBI NO: 34909272 NR Description: putative HB2 homeodomain protein [Oryza sativa
  misc_feature (64)..(139): Homolog of NCBI NO: 34908148 NR Description: P0408C03.16 [Oryza sativa (japonica
  misc_feature (72)..(158): Homolog of NCBI NO: 30693997 NR Description: expressed protein [Arabidopsis thaliana]
MEQESLNGRYGSRVMTDEQMETLRKQIAIYAVLCDQLVFLHNSLSSVPLLSSGMNPMRGEYFDPMVASSSAHGMSTRPRWTPTTTQLQILENIYKEGSGTPNPRRIKEITMELSEHGQIMEKNVYHWFQNRRARSKRKQPPTTTITSSQADDAAVTTTEERGRCGDDSGGFESYEHILFPSPDLGIEHLLNRDKFID

SEQ ID NO: 91843 - protein, 183 aa, Arabidopsis thaliana
  peptide (1)..(183): Ceres Seq. ID no. 12729717
  misc_feature (62)..(123): Pfam Name: Homeobox domain Pfam Description: Homeobox domain
  misc_feature (1)..(183): Homolog of NCBI NO: 15218015 NR Description: homeodomain protein; protein id: At1g20710.1
  misc_feature (1)..(183): Homolog of NCBI NO: 30686974 NR Description: homeodomain protein PALE-2, putative [Arabidopsis >gi|8886930|gb|AAF80616.1|AC069251_9 F2D10.19 [Arabidopsis
  misc_feature (1)..(179): Homolog of NCBI NO: 3955021 NR Description: HB2 homeodomain protein [Populus tremula x
  misc_feature (1)..(178): Homolog of NCBI NO: 3955019 NR Description: HB1 homeodomain protein [Populus tremula x
  misc_feature (1)..(179): Homolog of NCBI NO: 40233087 NR Description: homeodomain protein HB2 [Populus tomentosa]
  misc_feature (1)..(178): Homolog of NCBI NO: 40233067 NR Description: homeodomain protein HB1 [Populus tomentosa]
  misc_feature (1)..(125): Homolog of NCBI NO: 15237035 NR Description: homeodomain - like protein; protein id: supported by cDNA: gi_15081750 [Arabidopsis thaliana]
  misc_feature (1)..(142): Homolog of NCBI NO: 34909272 NR Description: putative HB2 homeodomain protein [Oryza sativa
  misc_feature (50)..(125): Homolog of NCBI NO: 34908148 NR Description: P0408C03.16 [Oryza sativa (japonica
  misc_feature (58)..(144): Homolog of NCBI NO: 30693997 NR Description: expressed protein [Arabidopsis thaliana]
MTDEQMETLRKQIAIYAVLCDQLVFLHNSLSSVPLLSSGMNPMRGEYFDPMVASSSAHGMSTRPRWTPTTTQLQILENIYKEGSGTPNPRRIKEITMELSEHGQIMEKNVYHWFQNRRARSKRKQPPTTTITSSQADDAAVTTTEERGRCGDDSGGFESYEHILFPSPDLGIEHLLNRDKFID

SEQ ID NO: 91844 - protein, 178 aa, Arabidopsis thaliana
  peptide (1)..(178): Ceres Seq. ID no. 12729718
  misc_feature (57)..(118): Pfam Name: Homeobox domain Pfam Description: Homeobox domain
  misc_feature (1)..(178): Homolog of NCBI NO: 15218015 NR Description: homeodomain protein; protein id: At1g20710.1
  misc_feature (1)..(178): Homolog of NCBI NO: 30686974 NR Description: homeodomain protein PALE-2, putative [Arabidopsis >gi|8886930|gb|AAF80616.1|AC069251_9 F2D10.19 [Arabidopsis
  misc_feature (1)..(174): Homolog of NCBI NO: 3955021 NR Description: HB2 homeodomain protein [Populus tremula x
  misc_feature (1)..(173): Homolog of NCBI NO: 3955019 NR Description: HB1 homeodomain protein [Populus tremula x
  misc_feature (1)..(174): Homolog of NCBI NO: 40233087 NR Description: homeodomain protein HB2 [Populus tomentosa]
  misc_feature (1)..(173): Homolog of NCBI NO: 40233067 NR Description: homeodomain protein HB1 [Populus tomentosa]
  misc_feature (1)..(120): Homolog of NCBI NO: 15237035 NR Description: homeodomain - like protein; protein id: supported by cDNA: gi_15081750 [Arabidopsis thaliana]
  misc_feature (1)..(137): Homolog of NCBI NO: 34909272 NR Description: putative HB2 homeodomain protein [Oryza sativa
  misc_feature (45)..(120): Homolog of NCBI NO: 34908148 NR Description: P0408C03.16 [Oryza sativa (japonica
  misc_feature (53)..(139): Homolog of NCBI NO: 30693997 NR Description: expressed protein [Arabidopsis thaliana]
METLRKQIAIYAVLCDQLVFLHNSLSSVPLLSSGMNPMRGEYFDPMVASSSAHGMSTRPRWTPTTTQLQILENIYKEGSGTPNPRRIKEITMELSEHGQIMEKNVYHWFQNRRARSKRKQPPTTTITSSQADDAAVTTTEERGRCGDDSGGFESYEHILFPSPDLGIEHLLNRDKFID

SEQ ID NO: 91845 - DNA, 862 bp, Arabidopsis thaliana
  misc_feature (1)..(862): Ceres Seq. ID no. 12729727
  misc_feature: MA Experiment ID: 20000234 Result: Down-regulated in Transcription
  misc_feature: MA Experiment 20000234 PARAMETER Experiment Name: At_Siliques_P Parameter: Age (day) Value: 21
  misc_feature: MA Experiment 20000234 PARAMETER Experiment Name: At_Siliques_P Parameter: Organism Value: A. thaliana
  misc_feature: MA Experiment 20000234 PARAMETER Experiment Name: At_Siliques_P Parameter: Plant Line Value: WS
  misc_feature: MA Experiment 20000234 PARAMETER Experiment Name: At_Siliques_P Parameter: Tissue Value: Less Than 5mm Siliques vs. Whole Plant
  misc_feature: MA Experiment ID: 20000264 Result: Down-regulated in Transcription
  misc_feature: MA Experiment 20000264 PARAMETER Experiment Name: At_Open_Flower_P Parameter: Age (day) Value: 21
  misc_feature: MA Experiment 20000264 PARAMETER Experiment Name: At_Open_Flower_P Parameter: Plant Line Value: WS
  misc_feature: MA Experiment 20000264 PARAMETER Experiment Name: At_Open_Flower_P Parameter: Tissue Value: Open Flower vs. Whole Plant
  misc_feature: MA Experiment ID: 20000438 Result: Down-regulated in Transcription
  misc_feature: MA Experiment 20000438 PARAMETER Experiment Name: At_Shoots__P Parameter: Age (day) Value: 14
  misc_feature: MA Experiment 20000438 PARAMETER Experiment Name: At_Shoots__P Parameter: Tissue Value: Shoots vs. Whole Plant
  misc_feature: MA Experiment ID: 20000495 Result: Down-regulated in Transcription
  misc_feature: MA Experiment 20000495 PARAMETER Experiment Name: At_Guard_Cells_P Parameter: Harvest Date Value: 8/2/2002
  misc_feature: MA Experiment 20000495 PARAMETER Experiment Name: At_Guard_Cells_P Parameter: Organism Value: A. thaliana
  misc_feature: MA Experiment 20000495 PARAMETER Experiment Name: At_Guard_Cells_P Parameter: Tissue Value: Guard Cells vs. Leaves
  misc_feature: MA Experiment ID: 20000573 Result: Down-regulated in Transcription
  misc_feature: MA Experiment 20000573 PARAMETER Experiment Name: At_100uM_ABA_Mutants__P Parameter: Organism Value: A. thaliana
  misc_feature: MA Experiment 20000573 PARAMETER Experiment Name: At_100uM_ABA_Mutants__P Parameter: Plant Line Value: CS22 vs. Ler wt
  misc_feature: MA Experiment 20000573 PARAMETER Experiment Name: At_100uM_ABA_Mutants__P Parameter: Timepoint (hr) Value: N/A
  misc_feature: MA Experiment 20000573 PARAMETER Experiment Name: At_100uM_ABA_Mutants__P Parameter: Tissue Value: Whole Plant
  misc_feature: MA Experiment 20000573 PARAMETER Experiment Name: At_100uM_ABA_Mutants__P Parameter: Treatment Value: None
  misc_feature: MA Experiment ID: 20001247 Result: Down-regulated in Transcription
  misc_feature: MA Experiment 20001247 PARAMETER Experiment Name: At_Far-red-induction_P Parameter: Age (day) Value: 7
  misc_feature: MA Experiment 20001247 PARAMETER Experiment Name: At_Far-red-induction_P Parameter: Light Value: Far-red vs. White
  misc_feature: MA Experiment 20001247 PARAMETER Experiment Name: At_Far-red-induction_P Parameter: Organism Value: A. thaliana
  misc_feature: MA Experiment 20001247 PARAMETER Experiment Name: At_Far-red-induction_P Parameter: Plant Line Value: Columbia
  misc_feature: MA Experiment 20001247 PARAMETER Experiment Name: At_Far-red-induction_P Parameter: Timepoint (hr) Value: 1
  misc_feature: MA Experiment 20001247 PARAMETER Experiment Name: At_Far-red-induction_P Parameter: Tissue Value: Whole Plant
  misc_feature: MA Experiment ID: 20001248 Result: Down-regulated in Transcription
  misc_feature: MA Experiment 20001248 PARAMETER Experiment Name: At_Far-red-induction_P Parameter: Age (day) Value: 7
  misc_feature: MA Experiment 20001248 PARAMETER Experiment Name: At_Far-red-induction_P Parameter: Light Value: Far-red vs. White
  misc_feature: MA Experiment 20001248 PARAMETER Experiment Name: At_Far-red-induction_P Parameter: Organism Value: A. thaliana
  misc_feature: MA Experiment 20001248 PARAMETER Experiment Name: At_Far-red-induction_P Parameter: Plant Line Value: Columbia
  misc_feature: MA Experiment 20001248 PARAMETER Experiment Name: At_Far-red-induction_P Parameter: Timepoint (hr) Value: 4
  misc_feature: MA Experiment 20001248 PARAMETER Experiment Name: At_Far-red-induction_P Parameter: Tissue Value: Whole Plant
  misc_feature: MA Experiment ID: 20001457 Result: Down-regulated in Transcription
  misc_feature: MA Experiment 20001457 PARAMETER Experiment Name: At_50mM_NH4NO3_L-to-H_P Parameter: Age (day) Value: Undefined
  misc_feature: MA Experiment 20001457 PARAMETER Experiment Name: At_50mM_NH4NO3_L-to-H_P Parameter: Organism Value: Undefined
  misc_feature: MA Experiment 20001457 PARAMETER Experiment Name: At_50mM_NH4NO3_L-to-H_P Parameter: Plant Line Value: Undefined
  misc_feature: MA Experiment 20001457 PARAMETER Experiment Name: At_50mM_NH4NO3_L-to-H_P Parameter: Timepoint (hr) Value: 0.5
  misc_feature: MA Experiment 20001457 PARAMETER Experiment Name: At_50mM_NH4NO3_L-to-H_P Parameter: Tissue Value: Siliques
  misc_feature: MA Experiment 20001457 PARAMETER Experiment Name: At_50mM_NH4NO3_L-to-H_P Parameter: Treatment Value: 50mM NH4NO3 vs. 100mM Manitol
  misc_feature: MA Experiment ID: 20001757 Result: Down-regulated in Transcription
  misc_feature: MA Experiment 20001757 PARAMETER Experiment Name: At_50mM_NH4NO3_L-to-H_P Parameter: Timepoint (hr) Value: 6
  misc_feature: MA Experiment 20001757 PARAMETER Experiment Name: At_50mM_NH4NO3_L-to-H_P Parameter: Tissue Value: Leaf
  misc_feature: MA Experiment 20001757 PARAMETER Experiment Name: At_50mM_NH4NO3_L-to-H_P Parameter: Treatment Value: 50mM NH4NO3 vs 100mM Mannitol
  misc_feature: MA Experiment ID: 20001904 Result: Down-regulated in Transcription
  misc_feature: MA Experiment 20001904 PARAMETER Experiment Name: At_Drought_Reproduction_P Parameter: Age (day) Value: 37
  misc_feature: MA Experiment 20001904 PARAMETER Experiment Name: At_Drought_Reproduction_P Parameter: Organism Value: A. thaliana
  misc_feature: MA Experiment 20001904 PARAMETER Experiment Name: At_Drought_Reproduction_P Parameter: Plant Line Value: WS
  misc_feature: MA Experiment 20001904 PARAMETER Experiment Name: At_Drought_Reproduction_P Parameter: Timepoint (day) Value: 7
  misc_feature: MA Experiment 20001904 PARAMETER Experiment Name: At_Drought_Reproduction_P Parameter: Tissue Value: Rosettes
  misc_feature: MA Experiment 20001904 PARAMETER Experiment Name: At_Drought_Reproduction_P Parameter: Treatment Value: Drought vs. No Drought
ctctcaaactcaaatcaaccttcttccatttttcaaattacaaacatacacaacaacaacaaaacctcttactcactccaatggctcgccttctctttcgtcttctcgtagaatccaacactccgtctccggcgattgataactccaccgccgcgttgaattctgatctcgtcgtcatcctcgctgctctcctctgcgccttgatttgcgttctcggcttaatcgccgtttctcgatgtgtctggctccgtcgtctcgcagccggaaacagaacagtctccggatctcaaactcaatctcctcaacctccggtggcagcggcgaacaaaggcctgaagaagaaagtccttcaatctctcccgaagcttacgttctcgccagagtcacctgagtcggagaaattcgcagagtgcgcgatctgtctagctgaattctctgccggcgacgagctccgagttttaccgcagtgtggtcacgggttccacgtggcttgcattgacacgtggctaggatctcactcgtcttgcccttcttgccgtcagatcttggttgttgccaggtgtcacaagtgtggaggtttacccggtagctctagctccggacttgaatccgaacccgaaatcgagatccgaatcaagcaaggcgaagatgaccccaactccttcttgccataatcattttagtttcccatttatttattagaaaactctataatttaatgcagatcattttagtgggatagtgtttagtctcttgatgtacatggtttattgtaatttgtaaatgttgtatgaattggaaaatttaacgatttgtgtatttgaaccttttattactttgtgtttatcaaaaacaattgctg

SEQ ID NO: 91846 - protein, 223 aa, Arabidopsis thaliana
  peptide (1)..(223): Ceres Seq. ID no. 12729728
  misc_feature (137)..(178): Pfam Name: Zinc finger, C3HC4 type (RING finger) Pfam Description: Zinc finger, C3HC4 type (RING finger)
  misc_feature (27)..(223): Homolog of NCBI NO: 15218042 NR Description: similar to putative RING zinc finger protein; id: At1g20823.1 [Arabidopsis thaliana] >gi|25402932|pir||F86340
  misc_feature (27)..(223): Homolog of NCBI NO: 21555237 NR Description: putative RING zinc finger protein [Arabidopsis
  misc_feature (27)..(223): Homolog of NCBI NO: 15223041 NR Description: putative RING zinc finger protein; protein id: supported by cDNA: 27464. [Arabidopsis thaliana]
  misc_feature (35)..(191): Homolog of NCBI NO: 15227839 NR Description: putative RING zinc finger protein; protein id: supported by cDNA: gi_13877952, supported by cDNA: gi_17065625,
  misc_feature (40)..(205): Homolog of NCBI NO: 15237013 NR Description: RING-H2 finger protein RHA3b; protein id: supported by cDNA: 31493., supported by cDNA: gi_3790574
  misc_feature (88)..(190): Homolog of NCBI NO: 37536508 NR Description: putative ring finger protein [Oryza sativa
  misc_feature (25)..(102): Homolog of NCBI NO: 37536508 NR Description: putative ring finger protein [Oryza sativa
  misc_feature (53)..(199): Homolog of NCBI NO: 7489432 NR Description: probable ring finger protein - barley
  misc_feature (11)..(222): Homolog of NCBI NO: 15222073 NR Description: RING-H2 finger protein RHA3a, putative; protein
  misc_feature (46)..(183): Homolog of NCBI NO: 15239062 NR Description: RING zinc finger protein-like; protein id:
LKLKSTFFHFSNYKHTQQQQNLLLTPMARLLFRLLVESNTPSPAIDNSTAALNSDLVVILAALLCALICVLGLIAVSRCVWLRRLAAGNRTVSGSQTQSPQPPVAAANKGLKKKVLQSLPKLTFSPESPESEKFAECAICLAEFSAGDELRVLPQCGHGFHVACIDTWLGSHSSCPSCRQILVVARCHKCGGLPGSSSSGLESEPEIEIRIKQGEDDPNSFLP

SEQ ID NO: 91847 - protein, 197 aa, Arabidopsis thaliana
  peptide (1)..(197): Ceres Seq. ID no. 12729729
  misc_feature (111)..(152): Pfam Name: Zinc finger, C3HC4 type (RING finger) Pfam Description: Zinc finger, C3HC4 type (RING finger)
  misc_feature (1)..(197): Homolog of NCBI NO: 15218042 NR Description: similar to putative RING zinc finger protein; id: At1g20823.1 [Arabidopsis thaliana] >gi|25402932|pir||F86340
  misc_feature (1)..(197): Homolog of NCBI NO: 21555237 NR Description: putative RING zinc finger protein [Arabidopsis
  misc_feature (1)..(197): Homolog of NCBI NO: 15223041 NR Description: putative RING zinc finger protein; protein id: supported by cDNA: 27464. [Arabidopsis thaliana]
  misc_feature (9)..(165): Homolog of NCBI NO: 15227839 NR Description: putative RING zinc finger protein; protein id: supported by cDNA: gi_13877952, supported by cDNA: gi_17065625,
  misc_feature (14)..(179): Homolog of NCBI NO: 15237013 NR Description: RING-H2 finger protein RHA3b; protein id: supported by cDNA: 31493., supported by cDNA: gi_3790574
  misc_feature (62)..(164): Homolog of NCBI NO: 37536508 NR Description: putative ring finger protein [Oryza sativa
  misc_feature (1)..(76): Homolog of NCBI NO: 37536508 NR Description: putative ring finger protein [Oryza sativa
  misc_feature (27)..(173): Homolog of NCBI NO: 7489432 NR Description: probable ring finger protein - barley
  misc_feature (1)..(196): Homolog of NCBI NO: 15222073 NR Description: RING-H2 finger protein RHA3a, putative; protein
  misc_feature (20)..(157): Homolog of NCBI NO: 15239062 NR Description: RING zinc finger protein-like; protein id:
MARLLFRLLVESNTPSPAIDNSTAALNSDLVVILAALLCALICVLGLIAVSRCVWLRRLAAGNRTVSGSQTQSPQPPVAAANKGLKKKVLQSLPKLTFSPESPESEKFAECAICLAEFSAGDELRVLPQCGHGFHVACIDTWLGSHSSCPSCRQILVVARCHKCGGLPGSSSSGLESEPEIEIRIKQGEDDPNSFLP

SEQ ID NO: 91848 - DNA, 1323 bp, Arabidopsis thaliana
  misc_feature (1)..(1323): Ceres Seq. ID no. 12729734
  misc_feature: MA Experiment ID: 20000171 Result: Up-regulated in Transcription
  misc_feature: MA Experiment 20000171 PARAMETER Experiment Name: At_42deg_Heat_P Parameter: Age (day) Value: 14
  misc_feature: MA Experiment 20000171 PARAMETER Experiment Name: At_42deg_Heat_P Parameter: Organism Value: A. thaliana
  misc_feature: MA Experiment 20000171 PARAMETER Experiment Name: At_42deg_Heat_P Parameter: Plant Line Value: WS
  misc_feature: MA Experiment 20000171 PARAMETER Experiment Name: At_42deg_Heat_P Parameter: Temperature (deg C) Value: 42 vs. 22
  misc_feature: MA Experiment 20000171 PARAMETER Experiment Name: At_42deg_Heat_P Parameter: Timepoint (hr) Value: 1
  misc_feature: MA Experiment 20000171 PARAMETER Experiment Name: At_42deg_Heat_P Parameter: Tissue Value: Aerial
  misc_feature: MA Experiment ID: 20000184 Result: Up-regulated in Transcription
  misc_feature: MA Experiment 20000184 PARAMETER Experiment Name: At_Shoots__P Parameter: Age (day) Value: 7
  misc_feature: MA Experiment 20000184 PARAMETER Experiment Name: At_Shoots__P Parameter: Tissue Value: Shoots vs. Whole Plant
  misc_feature: MA Experiment ID: 20000185 Result: Up-regulated in Transcription
  misc_feature: MA Experiment 20000185 PARAMETER Experiment Name: At_Roots__P Parameter: Age (day) Value: 7 vs. 21
  misc_feature: MA Experiment 20000185 PARAMETER Experiment Name: At_Roots__P Parameter: Organism Value: A. thaliana
  misc_feature: MA Experiment 20000185 PARAMETER Experiment Name: At_Roots__P Parameter: Tissue Value: Roots vs. Whole Plant
  misc_feature: MA Experiment ID: 20000439 Result: Up-regulated in Transcription
  misc_feature: MA Experiment 20000439 PARAMETER Experiment Name: At_Roots__P Parameter: Age (day) Value: 14 vs. 21
  misc_feature: MA Experiment 20000439 PARAMETER Experiment Name: At_Roots__P Parameter: Organism Value: A. thaliana
  misc_feature: MA Experiment 20000439 PARAMETER Experiment Name: At_Roots__P Parameter: Tissue Value: Roots vs. Whole Plant
  misc_feature: MA Experiment ID: 20001248 Result: Up-regulated in Transcription
  misc_feature: MA Experiment 20001248 PARAMETER Experiment Name: At_Far-red-induction_P Parameter: Age (day) Value: 7
  misc_feature: MA Experiment 20001248 PARAMETER Experiment Name: At_Far-red-induction_P Parameter: Light Value: Far-red vs. White
  misc_feature: MA Experiment 20001248 PARAMETER Experiment Name: At_Far-red-induction_P Parameter: Organism Value: A. thaliana
  misc_feature: MA Experiment 20001248 PARAMETER Experiment Name: At_Far-red-induction_P Parameter: Plant Line Value: Columbia
  misc_feature: MA Experiment 20001248 PARAMETER Experiment Name: At_Far-red-induction_P Parameter: Timepoint (hr) Value: 4
  misc_feature: MA Experiment 20001248 PARAMETER Experiment Name: At_Far-red-induction_P Parameter: Tissue Value: Whole Plant
  misc_feature: MA Experiment ID: 20001450 Result: Up-regulated in Transcription
  misc_feature: MA Experiment 20001450 PARAMETER Experiment Name: At_Far-red-induction_P Parameter: Age (day) Value: 7
  misc_feature: MA Experiment 20001450 PARAMETER Experiment Name: At_Far-red-induction_P Parameter: Light Value: Far-red vs. White
  misc_feature: MA Experiment 20001450 PARAMETER Experiment Name: At_Far-red-induction_P Parameter: Organism Value: A. thaliana
  misc_feature: MA Experiment 20001450 PARAMETER Experiment Name: At_Far-red-induction_P Parameter: Plant Line Value: Columbia
  misc_feature: MA Experiment 20001450 PARAMETER Experiment Name: At_Far-red-induction_P Parameter: Timepoint (hr) Value: 8
  misc_feature: MA Experiment 20001450 PARAMETER Experiment Name: At_Far-red-induction_P Parameter: Tissue Value: Whole Plant
  misc_feature: MA Experiment ID: 20001451 Result: Up-regulated in Transcription
  misc_feature: MA Experiment 20001451 PARAMETER Experiment Name: At_Far-red-induction_P Parameter: Age (day) Value: 7
  misc_feature: MA Experiment 20001451 PARAMETER Experiment Name: At_Far-red-induction_P Parameter: Light Value: Far-red vs. White
  misc_feature: MA Experiment 20001451 PARAMETER Experiment Name: At_Far-red-induction_P Parameter: Organism Value: A. thaliana
  misc_feature: MA Experiment 20001451 PARAMETER Experiment Name: At_Far-red-induction_P Parameter: Plant Line Value: Columbia
  misc_feature: MA Experiment 20001451 PARAMETER Experiment Name: At_Far-red-induction_P Parameter: Timepoint (hr) Value: 24
  misc_feature: MA Experiment 20001451 PARAMETER Experiment Name: At_Far-red-induction_P Parameter: Tissue Value: Whole Plant
tttttatatcttttgcttcgtctttaatttagttctgttcttggtctgtttctatattttgtcggcttgcgtaaccgatcacaccttaatgctttagctattgtttcctcaaaatcatgagttttgacttctcgatctgagttttctttttctctctttacgctcttcttcacctagctaccaatatatgaacgagcaggatcaagaatcgagaaattgatttgagctggcgaataagcagtggtgggatagggaattagtagatgcggcggcgatggaaggcggttacgagcaaggcggtggagcttctagatacttccataacctctttagaccggagattcaccaccaacagcttcaaccgcagggcgggatcaatcttatcgaccagcatcatcatcagcaccagcaacatcaacaacaacaacaaccgtcggatgattcaagagaatctgaccattcaaacaaagatcatcatcaacagggtcgacccgattcagacccgaatacatcaagctcagcaccgggaaaacgtccacgtggacgtccaccaggatctaagaacaaagccaagccaccgatcatagtaactcgtgatagccccaacgcgcttagatctcacgttcttgaagtatctcctggagctgacatagttgagagtgtttccacgtacgctaggaggagagggagaggcgtctccgttttaggaggaaacggcaccgtatctaacgtcactctccgtcagccagtcactcctggaaatggcggtggtgtgtccggaggaggaggagttgtgactttacatggaaggtttgagattctttcgctaacggggactgttttgccacctcctgcaccgcctggtgccggtggtttgtctatatttttagccggagggcaaggtcaggtggtcggaggaagcgttgtggctccccttattgcatcagctccggttatactaatggcggcttcgttctcaaatgcggttttcgagagactaccgattgaggaggaggaagaagaaggtggtggtggcggaggaggaggaggaggagggccaccgcagatgcaacaagctccatcagcatctccgccgtctggagtgaccggtcagggacagttaggaggtaatgtgggtggttatgggttttctggtgatcctcatttgcttggatggggagctggaacaccttcaagaccacctttttaattgaattttaatgtccggaaatttatgtgtttttatcatcttgtggagtcgtctttcctttgggatatttggtgtttaatgtttagttgatatgcatattttggtttctcgtg

SEQ ID NO: 91849 - protein, 311 aa, Arabidopsis thaliana
  peptide (1)..(311): Ceres Seq. ID no. 12729735
  misc_feature (1)..(311): Homolog of NCBI NO: 15218067 NR Description: putative DNA-binding protein; protein id:
  misc_feature (1)..(310): Homolog of NCBI NO: 15223074 NR Description: unknown protein; protein id: At1g76500.1
  misc_feature (37)..(288): Homolog of NCBI NO: 18396925 NR Description: expressed protein; protein id: At3g04570.1, by cDNA: 15781. [Arabidopsis thaliana] hypothetical protein [Arabidopsis thaliana]
  misc_feature (36)..(289): Homolog of NCBI NO: 30690333 NR Description: expressed protein [Arabidopsis thaliana]
  misc_feature (59)..(289): Homolog of NCBI NO: 7486025 NR Description: hypothetical protein F23E12.50 - Arabidopsis >gi|3080411|emb|CAA18730.1| putative protein [Arabidopsis >gi|7270491|emb|CAB80256.1| putative protein [Arabidopsis
  misc_feature (23)..(271): Homolog of NCBI NO: 15234404 NR Description: putative DNA-binding protein; protein id:
  misc_feature (4)..(311): Homolog of NCBI NO: 38346718 NR Description: OSJNBa0086O06.16 [Oryza sativa (japonica
  misc_feature (34)..(250): Homolog of NCBI NO: 15225475 NR Description: putative AT-hook DNA-binding protein; protein id:
  misc_feature (40)..(311): Homolog of NCBI NO: 34905212 NR Description: P0672D01.8 [Oryza sativa (japonica
  misc_feature (24)..(311): Homolog of NCBI NO: 15235815 NR Description: putative DNA binding protein; protein id:
MEGGYEQGGGASRYFHNLFRPEIHHQQLQPQGGINLIDQHHHQHQQHQQQQQPSDDSRESDHSNKDHHQQGRPDSDPNTSSSAPGKRPRGRPPGSKNKAKPPIIVTRDSPNALRSHVLEVSPGADIVESVSTYARRRGRGVSVLGGNGTVSNVTLRQPVTPGNGGGVSGGGGVVTLHGRFEILSLTGTVLPPPAPPGAGGLSIFLAGGQGQVVGGSVVAPLIASAPVILMAASFSNAVFERLPIEEEEEEGGGGGGGGGGGPPQMQQAPSASPPSGVTGQGQLGGNVGGYGFSGDPHLLGWGAGTPSRPPF

SEQ ID NO: 91850 - DNA, 2202 bp, Arabidopsis thaliana
  misc_feature (1)..(2202): Ceres Seq. ID no. 12729755
  misc_feature: MA Experiment ID: 20000171 Result: Down-regulated in Transcription
  misc_feature: MA Experiment 20000171 PARAMETER Experiment Name: At_42deg_Heat_P Parameter: Age (day) Value: 14
  misc_feature: MA Experiment 20000171 PARAMETER Experiment Name: At_42deg_Heat_P Parameter: Organism Value: A. thaliana
  misc_feature: MA Experiment 20000171 PARAMETER Experiment Name: At_42deg_Heat_P Parameter: Plant Line Value: WS
  misc_feature: MA Experiment 20000171 PARAMETER Experiment Name: At_42deg_Heat_P Parameter: Temperature (deg C) Value: 42 vs. 22
  misc_feature: MA Experiment 20000171 PARAMETER Experiment Name: At_42deg_Heat_P Parameter: Timepoint (hr) Value: 1
  misc_feature: MA Experiment 20000171 PARAMETER Experiment Name: At_42deg_Heat_P Parameter: Tissue Value: Aerial
  misc_feature: MA Experiment ID: 20000173 Result: Down-regulated in Transcription
  misc_feature: MA Experiment 20000173 PARAMETER Experiment Name: At_42deg_Heat_P Parameter: Age (day) Value: 14
  misc_feature: MA Experiment 20000173 PARAMETER Experiment Name: At_42deg_Heat_P Parameter: Organism Value: A. thaliana
  misc_feature: MA Experiment 20000173 PARAMETER Experiment Name: At_42deg_Heat_P Parameter: Plant Line Value: WS
  misc_feature: MA Experiment 20000173 PARAMETER Experiment Name: At_42deg_Heat_P Parameter: Temperature (deg C) Value: 42 vs. 22
  misc_feature: MA Experiment 20000173 PARAMETER Experiment Name: At_42deg_Heat_P Parameter: Timepoint (hr) Value: 6
  misc_feature: MA Experiment 20000173 PARAMETER Experiment Name: At_42deg_Heat_P Parameter: Tissue Value: Aerial
  misc_feature: MA Experiment ID: 20000184 Result: Down-regulated in Transcription
  misc_feature: MA Experiment 20000184 PARAMETER Experiment Name: At_Shoots__P Parameter: Age (day) Value: 7
  misc_feature: MA Experiment 20000184 PARAMETER Experiment Name: At_Shoots__P Parameter: Tissue Value: Shoots vs. Whole Plant
  misc_feature: MA Experiment ID: 20000185 Result: Down-regulated in Transcription
  misc_feature: MA Experiment 20000185 PARAMETER Experiment Name: At_Roots__P Parameter: Age (day) Value: 7 vs. 21
  misc_feature: MA Experiment 20000185 PARAMETER Experiment Name: At_Roots__P Parameter: Organism Value: A. thaliana
  misc_feature: MA Experiment 20000185 PARAMETER Experiment Name: At_Roots__P Parameter: Tissue Value: Roots vs. Whole Plant
  misc_feature: MA Experiment ID: 20000234 Result: Down-regulated in Transcription
  misc_feature: MA Experiment 20000234 PARAMETER Experiment Name: At_Siliques_P Parameter: Age (day) Value: 21
  misc_feature: MA Experiment 20000234 PARAMETER Experiment Name: At_Siliques_P Parameter: Organism Value: A. thaliana
  misc_feature: MA Experiment 20000234 PARAMETER Experiment Name: At_Siliques_P Parameter: Plant Line Value: WS
  misc_feature: MA Experiment 20000234 PARAMETER Experiment Name: At_Siliques_P Parameter: Tissue Value: Less Than 5mm Siliques vs. Whole Plant
  misc_feature: MA Experiment ID: 20000235 Result: Down-regulated in Transcription
  misc_feature: MA Experiment 20000235 PARAMETER Experiment Name: At_Siliques_P Parameter: Age (day) Value: 21
  misc_feature: MA Experiment 20000235 PARAMETER Experiment Name: At_Siliques_P Parameter: Organism Value: A. thaliana
  misc_feature: MA Experiment 20000235 PARAMETER Experiment Name: At_Siliques_P Parameter: Plant Line Value: WS
  misc_feature: MA Experiment 20000235 PARAMETER Experiment Name: At_Siliques_P Parameter: Tissue Value: 5-10mm Siliques vs. Whole Plant
  misc_feature: MA Experiment ID: 20000264 Result: Down-regulated in Transcription
  misc_feature: MA Experiment 20000264 PARAMETER Experiment Name: At_Open_Flower_P Parameter: Age (day) Value: 21
  misc_feature: MA Experiment 20000264 PARAMETER Experiment Name: At_Open_Flower_P Parameter: Plant Line Value: WS
  misc_feature: MA Experiment 20000264 PARAMETER Experiment Name: At_Open_Flower_P Parameter: Tissue Value: Open Flower vs. Whole Plant
  misc_feature: MA Experiment ID: 20000265 Result: Down-regulated in Transcription
  misc_feature: MA Experiment 20000265 PARAMETER Experiment Name: At_Open_Flower_P Parameter: Age (day) Value: 21
  misc_feature: MA Experiment 20000265 PARAMETER Experiment Name: At_Open_Flower_P Parameter: Plant Line Value: WS
  misc_feature: MA Experiment 20000265 PARAMETER Experiment Name: At_Open_Flower_P Parameter: Tissue Value: Closed Flower vs. Whole Plant
  misc_feature: MA Experiment ID: 20000267 Result: Down-regulated in Transcription
  misc_feature: MA Experiment 20000267 PARAMETER Experiment Name: At_Drought_P Parameter: Age (day) Value: 7
  misc_feature: MA Experiment 20000267 PARAMETER Experiment Name: At_Drought_P Parameter: Organism Value: A. thaliana
  misc_feature: MA Experiment 20000267 PARAMETER Experiment Name: At_Drought_P Parameter: Plant Line Value: WS
  misc_feature: MA Experiment 20000267 PARAMETER Experiment Name: At_Drought_P Parameter: Timepoint (hr) Value: 6
  misc_feature: MA Experiment 20000267 PARAMETER Experiment Name: At_Drought_P Parameter: Tissue Value: Whole Plant
  misc_feature: MA Experiment 20000267 PARAMETER Experiment Name: At_Drought_P Parameter: Treatment Value: Drought vs. No Drought
  misc_feature: MA Experiment ID: 20000286 Result: Down-regulated in Transcription
  misc_feature: MA Experiment 20000286 PARAMETER Experiment Name: At_Open_Flower_P Parameter: Age (day) Value: 21
  misc_feature: MA Experiment 20000286 PARAMETER Experiment Name: At_Open_Flower_P Parameter: Plant Line Value: WS
  misc_feature: MA Experiment 20000286 PARAMETER Experiment Name: At_Open_Flower_P Parameter: Tissue Value: Half Open vs. Whole Plant
  misc_feature: MA Experiment ID: 20000437 Result: Down-regulated in Transcription
  misc_feature: MA Experiment 20000437 PARAMETER Experiment Name: At_Drought_P Parameter: Age (day) Value: 8
  misc_feature: MA Experiment 20000437 PARAMETER Experiment Name: At_Drought_P Parameter: Organism Value: A. thaliana
  misc_feature: MA Experiment 20000437 PARAMETER Experiment Name: At_Drought_P Parameter: Plant Line Value: WS
  misc_feature: MA Experiment 20000437 PARAMETER Experiment Name: At_Drought_P Parameter: Timepoint (hr) Value: 24
  misc_feature: MA Experiment 20000437 PARAMETER Experiment Name: At_Drought_P Parameter: Tissue Value: Whole Plant
  misc_feature: MA Experiment 20000437 PARAMETER Experiment Name: At_Drought_P Parameter: Treatment Value: Drought vs. No Drought
  misc_feature: MA Experiment ID: 20000438 Result: Down-regulated in Transcription
  misc_feature: MA Experiment 20000438 PARAMETER Experiment Name: At_Shoots__P Parameter: Age (day) Value: 14
  misc_feature: MA Experiment 20000438 PARAMETER Experiment Name: At_Shoots__P Parameter: Tissue Value: Shoots vs. Whole Plant
  misc_feature: MA Experiment ID: 20000439 Result: Down-regulated in Transcription
  misc_feature: MA Experiment 20000439 PARAMETER Experiment Name: At_Roots__P Parameter: Age (day) Value: 14 vs. 21
  misc_feature: MA Experiment 20000439 PARAMETER Experiment Name: At_Roots__P Parameter: Organism Value: A. thaliana
  misc_feature: MA Experiment 20000439 PARAMETER Experiment Name: At_Roots__P Parameter: Tissue Value: Roots vs. Whole Plant
  misc_feature: MA Experiment ID: 20000441 Result: Up-regulated in Transcription
  misc_feature: MA Experiment 20000441 PARAMETER Experiment Name: At_1uM_BR-BRZ__P Parameter: Tissue Value: Shoot Apices
  misc_feature: MA Experiment 20000441 PARAMETER Experiment Name: At_1uM_BR-BRZ__P Parameter: Treatment Value: 1uM BR vs. No Treatment
  misc_feature: MA Experiment ID: 20000443 Result: Up-regulated in Transcription
  misc_feature: MA Experiment 20000443 PARAMETER Experiment Name: At_1uM_BR-BRZ__P Parameter: Tissue Value: Shoot Apices
  misc_feature: MA Experiment 20000443 PARAMETER Experiment Name: At_1uM_BR-BRZ__P Parameter: Treatment Value: 1uM BRZ vs. No Treatment
  misc_feature: MA Experiment ID: 20000452 Result: Down-regulated in Transcription
  misc_feature: MA Experiment 20000452 PARAMETER Experiment Name: At_CS6879_Shoots-Roots_P Parameter: Age (day) Value: 14
  misc_feature: MA Experiment 20000452 PARAMETER Experiment Name: At_CS6879_Shoots-Roots_P Parameter: Organism Value: A. thaliana
  misc_feature: MA Experiment 20000452 PARAMETER Experiment Name: At_CS6879_Shoots-Roots_P Parameter: Plant Line Value: CS6879 vs. WS
  misc_feature: MA Experiment 20000452 PARAMETER Experiment Name: At_CS6879_Shoots-Roots_P Parameter: Tissue Value: Shoots
  misc_feature: MA Experiment ID: 20000527 Result: Down-regulated in Transcription
  misc_feature: MA Experiment 20000527 PARAMETER Experiment Name: At_10percent_PEG_P Parameter: Age (day) Value: 20
  misc_feature: MA Experiment 20000527 PARAMETER Experiment Name: At_10percent_PEG_P Parameter: Organism Value: A. thaliana
  misc_feature: MA Experiment 20000527 PARAMETER Experiment Name: At_10percent_PEG_P Parameter: Plant Line Value: WS
  misc_feature: MA Experiment 20000527 PARAMETER Experiment Name: At_10percent_PEG_P Parameter: Timepoint (day) Value: 20
  misc_feature: MA Experiment 20000527 PARAMETER Experiment Name: At_10percent_PEG_P Parameter: Tissue Value: Whole Plant
  misc_feature: MA Experiment 20000527 PARAMETER Experiment Name: At_10percent_PEG_P Parameter: Treatment Value: 10percent PEG vs. No Treatment
  misc_feature: MA Experiment ID: 20000575 Result: Down-regulated in Transcription
  misc_feature: MA Experiment 20000575 PARAMETER Experiment Name: At_100uM_ABA_Mutants__P Parameter: Organism Value: A. thaliana
  misc_feature: MA Experiment 20000575 PARAMETER Experiment Name: At_100uM_ABA_Mutants__P Parameter: Plant Line Value: CS22
  misc_feature: MA Experiment 20000575 PARAMETER Experiment Name: At_100uM_ABA_Mutants__P Parameter: Timepoint (hr) Value: 6
  misc_feature: MA Experiment 20000575 PARAMETER Experiment Name: At_100uM_ABA_Mutants__P Parameter: Tissue Value: Whole Plant
  misc_feature: MA Experiment 20000575 PARAMETER Experiment Name: At_100uM_ABA_Mutants__P Parameter: Treatment Value: 1uM ABA vs. No Treatment
  misc_feature: MA Experiment ID: 20000794 Result: Down-regulated in Transcription
  misc_feature: MA Experiment 20000794 PARAMETER Experiment Name: At_Petals_P Parameter: Age (day) Value: 23-25 days
  misc_feature: MA Experiment 20000794 PARAMETER Experiment Name: At_Petals_P Parameter: Plant Line Value: WS
  misc_feature: MA Experiment 20000794 PARAMETER Experiment Name: At_Petals_P Parameter: Tissue Value: Petals vs. Whole plant
  misc_feature: MA Experiment ID: 20001451 Result: Down-regulated in Transcription
  misc_feature: MA Experiment 20001451 PARAMETER Experiment Name: At_Far-red-induction_P Parameter: Age (day) Value: 7
  misc_feature: MA Experiment 20001451 PARAMETER Experiment Name: At_Far-red-induction_P Parameter: Light Value: Far-red vs. White
  misc_feature: MA Experiment 20001451 PARAMETER Experiment Name: At_Far-red-induction_P Parameter: Organism Value: A. thaliana
  misc_feature: MA Experiment 20001451 PARAMETER Experiment Name: At_Far-red-induction_P Parameter: Plant Line Value: Columbia
  misc_feature: MA Experiment 20001451 PARAMETER Experiment Name: At_Far-red-induction_P Parameter: Timepoint (hr) Value: 24
  misc_feature: MA Experiment 20001451 PARAMETER Experiment Name: At_Far-red-induction_P Parameter: Tissue Value: Whole Plant
  misc_feature: MA Experiment ID: 20001554 Result: Down-regulated in Transcription
  misc_feature: MA Experiment 20001554 PARAMETER Experiment Name: At_Drought_Soil_Dry_P Parameter: Age (day) Value: 21
  misc_feature: MA Experiment 20001554 PARAMETER Experiment Name: At_Drought_Soil_Dry_P Parameter: Organism Value: A. thaliana
  misc_feature: MA Experiment 20001554 PARAMETER Experiment Name: At_Drought_Soil_Dry_P Parameter: Plant Line Value: WS
  misc_feature: MA Experiment 20001554 PARAMETER Experiment Name: At_Drought_Soil_Dry_P Parameter: Post Timepoint (hr) Value: None
  misc_feature: MA Experiment 20001554 PARAMETER Experiment Name: At_Drought_Soil_Dry_P Parameter: Post-Treatment Value: None
  misc_feature: MA Experiment 20001554 PARAMETER Experiment Name: At_Drought_Soil_Dry_P Parameter: Timepoint (day) Value: 7
  misc_feature: MA Experiment 20001554 PARAMETER Experiment Name: At_Drought_Soil_Dry_P Parameter: Treatment Value: Drought vs. No Drought
  misc_feature: MA Experiment ID: 20001555 Result: Down-regulated in Transcription
  misc_feature: MA Experiment 20001555 PARAMETER Experiment Name: At_Drought_Soil_Dry_P Parameter: Age (day) Value: 24
  misc_feature: MA Experiment 20001555 PARAMETER Experiment Name: At_Drought_Soil_Dry_P Parameter: Organism Value: A. thaliana
  misc_feature: MA Experiment 20001555 PARAMETER Experiment Name: At_Drought_Soil_Dry_P Parameter: Plant Line Value: WS
  misc_feature: MA Experiment 20001555 PARAMETER Experiment Name: At_Drought_Soil_Dry_P Parameter: Post Timepoint (hr) Value: None
  misc_feature: MA Experiment 20001555 PARAMETER Experiment Name: At_Drought_Soil_Dry_P Parameter: Post-Treatment Value: None
  misc_feature: MA Experiment 20001555 PARAMETER Experiment Name: At_Drought_Soil_Dry_P Parameter: Timepoint (day) Value: 10
  misc_feature: MA Experiment 20001555 PARAMETER Experiment Name: At_Drought_Soil_Dry_P Parameter: Treatment Value: Drought vs. No Drought
  misc_feature: MA Experiment ID: 20001556 Result: Down-regulated in Transcription
  misc_feature: MA Experiment 20001556 PARAMETER Experiment Name: At_Drought_Soil_Dry_P Parameter: Age (day) Value: 26
  misc_feature: MA Experiment 20001556 PARAMETER Experiment Name: At_Drought_Soil_Dry_P Parameter: Organism Value: A. thaliana
  misc_feature: MA Experiment 20001556 PARAMETER Experiment Name: At_Drought_Soil_Dry_P Parameter: Plant Line Value: WS
  misc_feature: MA Experiment 20001556 PARAMETER Experiment Name: At_Drought_Soil_Dry_P Parameter: Post Timepoint (hr) Value: None
  misc_feature: MA Experiment 20001556 PARAMETER Experiment Name: At_Drought_Soil_Dry_P Parameter: Post-Treatment Value: None
  misc_feature: MA Experiment 20001556 PARAMETER Experiment Name: At_Drought_Soil_Dry_P Parameter: Timepoint (day) Value: 12
  misc_feature: MA Experiment 20001556 PARAMETER Experiment Name: At_Drought_Soil_Dry_P Parameter: Treatment Value: Drought vs. No Drought
  misc_feature: MA Experiment ID: 20001557 Result: Down-regulated in Transcription
  misc_feature: MA Experiment 20001557 PARAMETER Experiment Name: At_Drought_Soil_Dry_P Parameter: Age (day) Value: 27
  misc_feature: MA Experiment 20001557 PARAMETER Experiment Name: At_Drought_Soil_Dry_P Parameter: Organism Value: A. thaliana
  misc_feature: MA Experiment 20001557 PARAMETER Experiment Name: At_Drought_Soil_Dry_P Parameter: Plant Line Value: WS
  misc_feature: MA Experiment 20001557 PARAMETER Experiment Name: At_Drought_Soil_Dry_P Parameter: Post Timepoint (hr) Value: 3
  misc_feature: MA Experiment 20001557 PARAMETER Experiment Name: At_Drought_Soil_Dry_P Parameter: Post-Treatment Value: Re-Water vs. No Drought
  misc_feature: MA Experiment 20001557 PARAMETER Experiment Name: At_Drought_Soil_Dry_P Parameter: Timepoint (day) Value: 13
  misc_feature: MA Experiment 20001557 PARAMETER Experiment Name: At_Drought_Soil_Dry_P Parameter: Treatment Value: Drought vs. No Drought
  misc_feature: MA Experiment ID: 20001559 Result: Down-regulated in Transcription
  misc_feature: MA Experiment 20001559 PARAMETER Experiment Name: At_Drought_Soil_Dry_P Parameter: Age (day) Value: 28
  misc_feature: MA Experiment 20001559 PARAMETER Experiment Name: At_Drought_Soil_Dry_P Parameter: Organism Value: A. thaliana
  misc_feature: MA Experiment 20001559 PARAMETER Experiment Name: At_Drought_Soil_Dry_P Parameter: Plant Line Value: WS
  misc_feature: MA Experiment 20001559 PARAMETER Experiment Name: At_Drought_Soil_Dry_P Parameter: Post Timepoint (hr) Value: 29
  misc_feature: MA Experiment 20001559 PARAMETER Experiment Name: At_Drought_Soil_Dry_P Parameter: Post-Treatment Value: Re-Water vs. No Drought
  misc_feature: MA Experiment 20001559 PARAMETER Experiment Name: At_Drought_Soil_Dry_P Parameter: Timepoint (day) Value: 14
  misc_feature: MA Experiment 20001559 PARAMETER Experiment Name: At_Drought_Soil_Dry_P Parameter: Treatment Value: Drought vs. No Drought
  misc_feature: MA Experiment ID: 20001904 Result: Down-regulated in Transcription
  misc_feature: MA Experiment 20001904 PARAMETER Experiment Name: At_Drought_Reproduction_P Parameter: Age (day) Value: 37
  misc_feature: MA Experiment 20001904 PARAMETER Experiment Name: At_Drought_Reproduction_P Parameter: Organism Value: A. thaliana
  misc_feature: MA Experiment 20001904 PARAMETER Experiment Name: At_Drought_Reproduction_P Parameter: Plant Line Value: WS
  misc_feature: MA Experiment 20001904 PARAMETER Experiment Name: At_Drought_Reproduction_P Parameter: Timepoint (day) Value: 7
  misc_feature: MA Experiment 20001904 PARAMETER Experiment Name: At_Drought_Reproduction_P Parameter: Tissue Value: Rosettes
  misc_feature: MA Experiment 20001904 PARAMETER Experiment Name: At_Drought_Reproduction_P Parameter: Treatment Value: Drought vs. No Drought
  misc_feature: MA Experiment ID: 20001910 Result: Down-regulated in Transcription
  misc_feature: MA Experiment 20001910 PARAMETER Experiment Name: At_Drought_Reproduction_P Parameter: Age (day) Value: 37
  misc_feature: MA Experiment 20001910 PARAMETER Experiment Name: At_Drought_Reproduction_P Parameter: Organism Value: A. thaliana
  misc_feature: MA Experiment 20001910 PARAMETER Experiment Name: At_Drought_Reproduction_P Parameter: Plant Line Value: WS
  misc_feature: MA Experiment 20001910 PARAMETER Experiment Name: At_Drought_Reproduction_P Parameter: Timepoint (day) Value: 7
  misc_feature: MA Experiment 20001910 PARAMETER Experiment Name: At_Drought_Reproduction_P Parameter: Tissue Value: Flowers
  misc_feature: MA Experiment 20001910 PARAMETER Experiment Name: At_Drought_Reproduction_P Parameter: Treatment Value: Drought vs. No Drought
atgaaggtgcatagtctgttcttgatggctattttcttctacctagcatatacgcagctggtcaaggcgcaacctcgcgatgattgccaaactagatgtggtgacgtcccaattgattacccttttggtatttctacaggttgttactaccccggagatgatagcttcaatattacctgtgaggaagataaaccaaatgtcttaagcaacattgaagtgctaaactttaatcatagcggccagctacgcggtctgattcctcgatccactgtttgctacgaccagcaaacaaataatgatttcgagtccctctggtttcggttggataatttatctttctcccccaataacaagtttactttagtaggctgtaacgcttgggcacttctaagcacttttggaatacaaaactactcaactggatgtatgtcattatgcgatactcccccgccgccaaatagtaaatgtaatggtgttggttgctgcagaacagaggtatctatccccttggatagccatagaattgaaactcaaccatctcgcttcgaaaacatgacttccgtggagcactttaatccttgcagctacgcttttttcgttgaagatggtatgtttaacttcagttctttagaagatcttaaggatctgcgaaatgtcacgaggttccctgtgttactagattggtctattggaaaccagacatgtgagcaagttgtaggtagaaacatatgtggtgggaacagcacatgttttgattctactcgtggaaagggttataactgcaagtgtttacaaggttttgatgggaatccatacctttcggacggttgccaagacatcaatgagtgtactacccgtatacataactgttcggataccagcacatgtgaaaacacacttggaagcttccattgtcagtgcccatctggttctgatttaaataccactactatgagctgcattgacacacctaaagaagagcctaagtacttaggatggactactgttcttcttggaaccaccatcggattcttaatcatcttgcttaccattagctatatacaacaaaaaatgaggcaccgaaaaaacaccgagctgcgacaacaattcttcgagcaaaatggtggtggcatgttgatacagcgactctcaggagcagggccatcaaatgtggatgtcaaaatctttactgaagaaggcatgaaggaagcaactgatggttataatgagagcagaatcctaggccagggaggacaaggaacagtctacaaagggatattgcaagataactccattgttgctataaagaaagctcgacttggagaccgtagccaagtagagcagttcatcaacgaagtgctagtgctttcacaaataaaccacaggaacgtggtcaaactcttgggctgttgtctagagactgaagttcccttgttggtctatgagttcatttccagtggcactctttttgatcacttgcacggttctatgtttgattcttcgcttacatgggaacaccgtctgaggatagccatagaagttgctggaactcttgcatatcttcactcctatgcttctattccaatcatccaccgagatgtcaagactgctaacattctcctcgatgaaaacttaactgcaaaagtagctgattttggtgcatcaaggctgataccgatggaccaagagcagctcacaactatggttcaaggaactcttggctatttagaccctgaatactacaatacagggcttctgaacgaaaagagcgatgtttatagctttggggtagtcctcatggaactgctctcaggtgaaaaggcattatgctttgaacggccacaaagctcaaaacatctagtgagttactttgtttctgccatgaaagaaaataggttgcatgagattattgacggtcaagttatgaacgagtataatcagagggagatccaggaatctgcaagaattgctgttgagtgtacaagaattatgggagaggaaaggccaagtatgaaagaagtagctgcagagttagaggccttgagagtcaaaacaaccaaacatcagtggtcagatcaatatcccaaggaggttgagcatttgcttggtgttcaaatcttatcgacgcaaggtgataccagtagcattggctatgacagcatccagaatgtaacaaggttggacattgaaactggccgctga

SEQ ID NO: 91851 - protein, 733 aa, Arabidopsis thaliana
  peptide (1)..(733): Ceres Seq. ID no. 12729756
  misc_feature (1)..(733): Homolog of NCBI NO: 18394970 NR Description: wall-associated kinase 1; protein id:
  misc_feature (1)..(733): Homolog of NCBI NO: 25751318 NR Description: probable serine/threonine-specific protein kinase
  misc_feature (1)..(733): Homolog of NCBI NO: 15218959 NR Description: wall-associated kinase 2; protein id: supported by cDNA: gi_17064909 [Arabidopsis thaliana]
  misc_feature (1)..(733): Homolog of NCBI NO: 25287666 NR Description: wall-associated serine/threonine kinase (EC
  misc_feature (6)..(733): Homolog of NCBI NO: 15218171 NR Description: wall-associated kinase 3; protein id: At1g21240.1
  misc_feature (284)..(733): Homolog of NCBI NO: 25287657 NR Description: F16F4.8 protein - Arabidopsis thaliana
  misc_feature (6)..(303): Homolog of NCBI NO: 25287657 NR Description: F16F4.8 protein - Arabidopsis thaliana
  misc_feature (1)..(733): Homolog of NCBI NO: 25287665 NR Description: hypothetical protein F16F4.10 [imported] -
  misc_feature (1)..(733): Homolog of NCBI NO: 15218167 NR Description: wall-associated kinase 4; protein id: At1g21210.1
  misc_feature (1)..(733): Homolog of NCBI NO: 3355308 NR Description: wall-associated kinase 4 [Arabidopsis thaliana]
MKVHSLFLMAIFFYLAYTQLVKAQPRDDCQTRCGDVPIDYPFGISTGCYYPGDDSFNITCEEDKPNVLSNIEVLNFNHSGQLRGLIPRSTVCYDQQTNNDFESLWFRLDNLSFSPNNKFTLVGCNAWALLSTFGIQNYSTGCMSLCDTPPPPNSKCNGVGCCRTEVSIPLDSHRIETQPSRFENMTSVEHFNPCSYAFFVEDGMFNFSSLEDLKDLRNVTRFPVLLDWSIGNQTCEQVVGRNICGGNSTCFDSTRGKGYNCKCLQGFDGNPYLSDGCQDINECTTRIHNCSDTSTCENTLGSFHCQCPSGSDLNTTTMSCIDTPKEEPKYLGWTTVLLGTTIGFLIILLTISYIQQKMRHRKNTELRQQFFEQNGGGMLIQRLSGAGPSNVDVKIFTEEGMKEATDGYNESRILGQGGQGTVYKGILQDNSIVAIKKARLGDRSQVEQFINEVLVLSQINHRNVVKLLGCCLETEVPLLVYEFISSGTLFDHLHGSMFDSSLTWEHRLRIAIEVAGTLAYLHSYASIPIIHRDVKTANILLDENLTAKVADFGASRLIPMDQEQLTTMVQGTLGYLDPEYYNTGLLNEKSDVYSFGVVLMELLSGEKALCFERPQSSKHLVSYFVSAMKENRLHEIIDGQVMNEYNQREIQESARIAVECTRIMGEERPSMKEVAAELEALRVKTTKHQWSDQYPKEVEHLLGVQILSTQGDTSSIGYDSIQNVTRLDIETGR

SEQ ID NO: 91852 - protein, 725 aa, Arabidopsis thaliana
  peptide (1)..(725): Ceres Seq. ID no. 12729757
  misc_feature (1)..(725): Homolog of NCBI NO: 18394970 NR Description: wall-associated kinase 1; protein id:
  misc_feature (1)..(725): Homolog of NCBI NO: 25751318 NR Description: probable serine/threonine-specific protein kinase
  misc_feature (1)..(725): Homolog of NCBI NO: 15218959 NR Description: wall-associated kinase 2; protein id: supported by cDNA: gi_17064909 [Arabidopsis thaliana]
  misc_feature (1)..(725): Homolog of NCBI NO: 25287666 NR Description: wall-associated serine/threonine kinase (EC
  misc_feature (1)..(725): Homolog of NCBI NO: 15218171 NR Description: wall-associated kinase 3; protein id: At1g21240.1
  misc_feature (276)..(725): Homolog of NCBI NO: 25287657 NR Description: F16F4.8 protein - Arabidopsis thaliana
  misc_feature (1)..(295): Homolog of NCBI NO: 25287657 NR Description: F16F4.8 protein - Arabidopsis thaliana
  misc_feature (1)..(725): Homolog of NCBI NO: 25287665 NR Description: hypothetical protein F16F4.10 [imported] -
  misc_feature (1)..(725): Homolog of NCBI NO: 15218167 NR Description: wall-associated kinase 4; protein id: At1g21210.1
  misc_feature (1)..(725): Homolog of NCBI NO: 3355308 NR Description: wall-associated kinase 4 [Arabidopsis thaliana]
MAIFFYLAYTQLVKAQPRDDCQTRCGDVPIDYPFGISTGCYYPGDDSFNITCEEDKPNVLSNIEVLNFNHSGQLRGLIPRSTVCYDQQTNNDFESLWFRLDNLSFSPNNKFTLVGCNAWALLSTFGIQNYSTGCMSLCDTPPPPNSKCNGVGCCRTEVSIPLDSHRIETQPSRFENMTSVEHFNPCSYAFFVEDGMFNFSSLEDLKDLRNVTRFPVLLDWSIGNQTCEQVVGRNICGGNSTCFDSTRGKGYNCKCLQGFDGNPYLSDGCQDINECTTRIHNCSDTSTCENTLGSFHCQCPSGSDLNTTTMSCIDTPKEEPKYLGWTTVLLGTTIGFLIILLTISYIQQKMRHRKNTELRQQFFEQNGGGMLIQRLSGAGPSNVDVKIFTEEGMKEATDGYNESRILGQGGQGTVYKGILQDNSIVAIKKARLGDRSQVEQFINEVLVLSQINHRNVVKLLGCCLETEVPLLVYEFISSGTLFDHLHGSMFDSSLTWEHRLRIAIEVAGTLAYLHSYASIPIIHRDVKTANILLDENLTAKVADFGASRLIPMDQEQLTTMVQGTLGYLDPEYYNTGLLNEKSDVYSFGVVLMELLSGEKALCFERPQSSKHLVSYFVSAMKENRLHEIIDGQVMNEYNQREIQESARIAVECTRIMGEERPSMKEVAAELEALRVKTTKHQWSDQYPKEVEHLLGVQILSTQGDTSSIGYDSIQNVTRLDIETGR

SEQ ID NO: 91853 - protein, 591 aa, Arabidopsis thaliana
  peptide (1)..(591): Ceres Seq. ID no. 12729758
  misc_feature (1)..(591): Homolog of NCBI NO: 18394970 NR Description: wall-associated kinase 1; protein id:
  misc_feature (1)..(591): Homolog of NCBI NO: 25751318 NR Description: probable serine/threonine-specific protein kinase
  misc_feature (1)..(591): Homolog of NCBI NO: 15218959 NR Description: wall-associated kinase 2; protein id: supported by cDNA: gi_17064909 [Arabidopsis thaliana]
  misc_feature (1)..(591): Homolog of NCBI NO: 25287666 NR Description: wall-associated serine/threonine kinase (EC
  misc_feature (1)..(591): Homolog of NCBI NO: 15218171 NR Description: wall-associated kinase 3; protein id: At1g21240.1
  misc_feature (142)..(591): Homolog of NCBI NO: 25287657 NR Description: F16F4.8 protein - Arabidopsis thaliana
  misc_feature (1)..(161): Homolog of NCBI NO: 25287657 NR Description: F16F4.8 protein - Arabidopsis thaliana
  misc_feature (1)..(591): Homolog of NCBI NO: 25287665 NR Description: hypothetical protein F16F4.10 [imported] -
  misc_feature (1)..(591): Homolog of NCBI NO: 15218167 NR Description: wall-associated kinase 4; protein id: At1g21210.1
  misc_feature (1)..(591): Homolog of NCBI NO: 3355308 NR Description: wall-associated kinase 4 [Arabidopsis thaliana]
MSLCDTPPPPNSKCNGVGCCRTEVSIPLDSHRIETQPSRFENMTSVEHFNPCSYAFFVEDGMFNFSSLEDLKDLRNVTRFPVLLDWSIGNQTCEQVVGRNICGGNSTCFDSTRGKGYNCKCLQGFDGNPYLSDGCQDINECTTRIHNCSDTSTCENTLGSFHCQCPSGSDLNTTTMSCIDTPKEEPKYLGWTTVLLGTTIGFLIILLTISYIQQKMRHRKNTELRQQFFEQNGGGMLIQRLSGAGPSNVDVKIFTEEGMKEATDGYNESRILGQGGQGTVYKGILQDNSIVAIKKARLGDRSQVEQFINEVLVLSQINHRNVVKLLGCCLETEVPLLVYEFISSGTLFDHLHGSMFDSSLTWEHRLRIAIEVAGTLAYLHSYASIPIIHRDVKTANILLDENLTAKVADFGASRLIPMDQEQLTTMVQGTLGYLDPEYYNTGLLNEKSDVYSFGVVLMELLSGEKALCFERPQSSKHLVSYFVSAMKENRLHEIIDGQVMNEYNQREIQESARIAVECTRIMGEERPSMKEVAAELEALRVKTTKHQWSDQYPKEVEHLLGVQILSTQGDTSSIGYDSIQNVTRLDIETGR

SEQ ID NO: 91854 - DNA, 2226 bp, Arabidopsis thaliana
  misc_feature (1)..(2226): Ceres Seq. ID no. 12729759
  misc_feature: MA Experiment ID: 20000315 Result: Down-regulated in Transcription
  misc_feature: MA Experiment 20000315 PARAMETER Experiment Name: At_14day_Shoots-Roots_Sub_P Parameter: Age (day) Value: 14
  misc_feature: MA Experiment 20000315 PARAMETER Experiment Name: At_14day_Shoots-Roots_Sub_P Parameter: Organism Value: A. thaliana
  misc_feature: MA Experiment 20000315 PARAMETER Experiment Name: At_14day_Shoots-Roots_Sub_P Parameter: Plant Line Value: WS
  misc_feature: MA Experiment 20000315 PARAMETER Experiment Name: At_14day_Shoots-Roots_Sub_P Parameter: Tissue Value: Shoots vs. Whole Plant
  misc_feature: MA Experiment ID: 20000327 Result: Down-regulated in Transcription
  misc_feature: MA Experiment 20000327 PARAMETER Experiment Name: At_42deg_Heat_Sub_P Parameter: Age (day) Value: 14
  misc_feature: MA Experiment 20000327 PARAMETER Experiment Name: At_42deg_Heat_Sub_P Parameter: Organism Value: A. thaliana
  misc_feature: MA Experiment 20000327 PARAMETER Experiment Name: At_42deg_Heat_Sub_P Parameter: Plant Line Value: WS
  misc_feature: MA Experiment 20000327 PARAMETER Experiment Name: At_42deg_Heat_Sub_P Parameter: Temperature (deg C) Value: 42 vs. 22
  misc_feature: MA Experiment 20000327 PARAMETER Experiment Name: At_42deg_Heat_Sub_P Parameter: Timepoint (hr) Value: 1
  misc_feature: MA Experiment 20000327 PARAMETER Experiment Name: At_42deg_Heat_Sub_P Parameter: Tissue Value: Aerial
  misc_feature: MA Experiment ID: 20000328 Result: Down-regulated in Transcription
  misc_feature: MA Experiment 20000328 PARAMETER Experiment Name: At_42deg_Heat_Sub_P Parameter: Age (day) Value: 14
  misc_feature: MA Experiment 20000328 PARAMETER Experiment Name: At_42deg_Heat_Sub_P Parameter: Organism Value: A. thaliana
  misc_feature: MA Experiment 20000328 PARAMETER Experiment Name: At_42deg_Heat_Sub_P Parameter: Plant Line Value: WS
  misc_feature: MA Experiment 20000328 PARAMETER Experiment Name: At_42deg_Heat_Sub_P Parameter: Temperature (deg C) Value: 42 vs. 22
  misc_feature: MA Experiment 20000328 PARAMETER Experiment Name: At_42deg_Heat_Sub_P Parameter: Timepoint (hr) Value: 6
  misc_feature: MA Experiment 20000328 PARAMETER Experiment Name: At_42deg_Heat_Sub_P Parameter: Tissue Value: Aerial
  misc_feature: MA Experiment ID: 20000329 Result: Up-regulated in Transcription
  misc_feature: MA Experiment 20000329 PARAMETER Experiment Name: At_4deg_Cold_Sub_P Parameter: Age (day) Value: 14
  misc_feature: MA Experiment 20000329 PARAMETER Experiment Name: At_4deg_Cold_Sub_P Parameter: Organism Value: A. thaliana
  misc_feature: MA Experiment 20000329 PARAMETER Experiment Name: At_4deg_Cold_Sub_P Parameter: Plant Line Value: WS
  misc_feature: MA Experiment 20000329 PARAMETER Experiment Name: At_4deg_Cold_Sub_P Parameter: Temperature (deg C) Value: 4 vs. 22
  misc_feature: MA Experiment 20000329 PARAMETER Experiment Name: At_4deg_Cold_Sub_P Parameter: Timepoint (hr) Value: 6
  misc_feature: MA Experiment 20000329 PARAMETER Experiment Name: At_4deg_Cold_Sub_P Parameter: Tissue Value: Aerial
  misc_feature: MA Experiment ID: 20000347 Result: Up-regulated in Transcription
  misc_feature: MA Experiment 20000347 PARAMETER Experiment Name: At_2mM_SA_Sub_P Parameter: Age (day) Value: 14
  misc_feature: MA Experiment 20000347 PARAMETER Experiment Name: At_2mM_SA_Sub_P Parameter: Organism Value: A. thaliana
  misc_feature: MA Experiment 20000347 PARAMETER Experiment Name: At_2mM_SA_Sub_P Parameter: Plant Line Value: WS
  misc_feature: MA Experiment 20000347 PARAMETER Experiment Name: At_2mM_SA_Sub_P Parameter: Timepoint (hr) Value: 6
  misc_feature: MA Experiment 20000347 PARAMETER Experiment Name: At_2mM_SA_Sub_P Parameter: Tissue Value: Aerial
  misc_feature: MA Experiment 20000347 PARAMETER Experiment Name: At_2mM_SA_Sub_P Parameter: Treatment Value: 2mM SA vs. No Treatment
  misc_feature: MA Experiment ID: 20000355 Result: Down-regulated in Transcription
  misc_feature: MA Experiment 20000355 PARAMETER Experiment Name: At_Siliques_Sub_P Parameter: Age (day) Value: 21
  misc_feature: MA Experiment 20000355 PARAMETER Experiment Name: At_Siliques_Sub_P Parameter: Organism Value: A. thaliana
  misc_feature: MA Experiment 20000355 PARAMETER Experiment Name: At_Siliques_Sub_P Parameter: Plant Line Value: WS
  misc_feature: MA Experiment 20000355 PARAMETER Experiment Name: At_Siliques_Sub_P Parameter: Tissue Value: Less Than 5mm Siliques vs. Whole Plant
  misc_feature: MA Experiment ID: 20000634 Result: Down-regulated in Transcription
  misc_feature: MA Experiment 20000634 PARAMETER Experiment Name: At_10percent_PEG_Sub_P Parameter: Age (day) Value: 12
  misc_feature: MA Experiment 20000634 PARAMETER Experiment Name: At_10percent_PEG_Sub_P Parameter: Organism Value: A. thaliana
  misc_feature: MA Experiment 20000634 PARAMETER Experiment Name: At_10percent_PEG_Sub_P Parameter: Plant Line Value: WS
  misc_feature: MA Experiment 20000634 PARAMETER Experiment Name: At_10percent_PEG_Sub_P Parameter: Timepoint (day) Value: 12
  misc_feature: MA Experiment 20000634 PARAMETER Experiment Name: At_10percent_PEG_Sub_P Parameter: Tissue Value: Whole Plant
  misc_feature: MA Experiment 20000634 PARAMETER Experiment Name: At_10percent_PEG_Sub_P Parameter: Treatment Value: 10% PEG vs. No Treatment
atgaagttccaggagggtgtgttcttggtggttattttcttccttgcatatactcagcttgtgaaggggcaacatcaacctcgcgaagattgtaaacttaaatgtggaaacgtcacaatagagtacccttttggtatttctacaggttgttactatcccggagatgataatttcaatctcacctgtgtcgtggaagagaagctactactctttggcatcattcaagtgaccaatatttctcacagtggccatgtaagtgtactgtttgaacgattctctgaatgctacgagcagaaaaatgagactaatggaactgccctcgggtatcagctgggtagtagtttctctctctcctccaacaacaagtttactttagtaggatgtaacgctttatcacttttgagcacttttggaaagcaaaactactcaactggatgcttgtcattatgcaattctcaaccagaggcaaatggaagatgtaatggtgtaggttgctgcacaacagaggacttctctgtcccgttcgatagcgatacattccaatttggctcagttcgcttgagaaaccaagttaataattccttagatctatttaatacttcggtatatcagtttaatccttgcacctacgcttttctcgttgaagatggtaagtttaacttcgattcttcaaaagatcttaagaatctgaggaatgtcacgaggttccctgtggcactagattggtctattggaaaccagacatgtgagcaagctggaagcacaagaatatgcggtaagaacagctcatgttacaattctactactagaaacgggtatatctgcaaatgtaatgaaggttatgatgggaatccataccgttcagagggttgcaaagacatcgatgagtgtattagtgatacacataactgttcggatccaaaaacctgtagaaacagggatggaggcttcgattgtaagtgtccatctggttacgacttaaactccagtatgagctgcacgaggcccgaatacaaacggactcgaatttttcttgtaatcataatcggcgtcttggtcctcctgcttgctgcgatctgtatacaacatgcaacgaagcaaaggaagtataccaagctccgacgacaattctttgagcaaaatggtggtggcatgttgatacagcgactttcaggagcagggttgtcaaacattgatttcaaaatctttactgaggaaggcatgaaagaggcaactaatggctatgatgagagcagaatcttgggccagggaggtcaaggaacagtctacaaagggatattgccggacaacactatcgttgctataaagaaagctcggcttgcagacagtagacaagtagatcagttcatccacgaagtgctcgtgctttcacaaattaaccacaggaacgtggtcaagatcttgggttgctgtctagagactgaagtccccttgttggtctatgaattcattaccaatggcacccttttcgatcacttgcacggttccatttttgattcttctcttacatgggaacaccgcctcagaatagcgatagaagtcgctggaactcttgcttatcttcactcctctgcttctattccaatcatccatcgcgatatcaaaactgcaaatattctcttggatgaaaacttaactgcaaaagtagccgactttggcgcttctaagcttataccaatggataaagagcagctcacaactatggtgcaaggcactctaggctatttagacccagaatactataccacagggcttctgaacgagaagagcgatgtgtatagctttggggtagtcctcatggaactgctctcaggtcaaaaggcattgtgctttgaacggccacaggcttcaaaacatttggtgagttactttgtttctgccacggaagagaataggttgcatgagattattgacgaccaagtgttgaacgaggataatctgaaggagatccaggaagctgcaagaattgctgcagagtgtacaaggctaatgggagaggaaaggccaaggatgaaagaagtagctgcaaagctagaagccttgagggtcgagaaaaccaaacataagtggtcggatcagtatcctgaggagaatgaacacttgattggtggtcacatcttgtctgcacaaggcgaaaccagtagcagcattggctatgatagcatcaaaaatgtagcaatattggacattgaaactggccgctga

SEQ ID NO: 91855 - protein, 741 aa, Arabidopsis thaliana
  peptide (1)..(741): Ceres Seq. ID no. 12729760
  misc_feature (1)..(741): Homolog of NCBI NO: 18394970 NR Description: wall-associated kinase 1; protein id:
  misc_feature (1)..(741): Homolog of NCBI NO: 25751318 NR Description: probable serine/threonine-specific protein kinase
  misc_feature (7)..(741): Homolog of NCBI NO: 15218170 NR Description: wall-associated kinase 5; protein id: At1g21230.1
  misc_feature (1)..(741): Homolog of NCBI NO: 15218959 NR Description: wall-associated kinase 2; protein id: supported by cDNA: gi_17064909 [Arabidopsis thaliana]
  misc_feature (1)..(741): Homolog of NCBI NO: 25287666 NR Description: wall-associated serine/threonine kinase (EC
  misc_feature (140)..(741): Homolog of NCBI NO: 166813 NR Description: serine threonine kinase
  misc_feature (1)..(741): Homolog of NCBI NO: 25287665 NR Description: hypothetical protein F16F4.10 [imported] -
  misc_feature (1)..(741): Homolog of NCBI NO: 15218167 NR Description: wall-associated kinase 4; protein id: At1g21210.1
  misc_feature (10)..(710): Homolog of NCBI NO: 34915126 NR Description: putative wall-associated kinase 2 [Oryza sativa
  misc_feature (291)..(695): Homolog of NCBI NO: 38567980 NR Description: OSJNBa0093F12.21 [Oryza sativa (japonica
MKFQEGVFLVVIFFLAYTQLVKGQHQPREDCKLKCGNVTIEYPFGISTGCYYPGDDNFNLTCVVEEKLLLFGIIQVTNISHSGHVSVLFERFSECYEQKNETNGTALGYQLGSSFSLSSNNKFTLVGCNALSLLSTFGKQNYSTGCLSLCNSQPEANGRCNGVGCCTTEDFSVPFDSDTFQFGSVRLRNQVNNSLDLFNTSVYQFNPCTYAFLVEDGKFNFDSSKDLKNLRNVTRFPVALDWSIGNQTCEQAGSTRICGKNSSCYNSTTRNGYICKCNEGYDGNPYRSEGCKDIDECISDTHNCSDPKTCRNRDGGFDCKCPSGYDLNSSMSCTRPEYKRTRIFLVIIIGVLVLLLAAICIQHATKQRKYTKLRRQFFEQNGGGMLIQRLSGAGLSNIDFKIFTEEGMKEATNGYDESRILGQGGQGTVYKGILPDNTIVAIKKARLADSRQVDQFIHEVLVLSQINHRNVVKILGCCLETEVPLLVYEFITNGTLFDHLHGSIFDSSLTWEHRLRIAIEVAGTLAYLHSSASIPIIHRDIKTANILLDENLTAKVADFGASKLIPMDKEQLTTMVQGTLGYLDPEYYTTGLLNEKSDVYSFGVVLMELLSGQKALCFERPQASKHLVSYFVSATEENRLHEIIDDQVLNEDNLKEIQEAARIAAECTRLMGEERPRMKEVAAKLEALRVEKTKHKWSDQYPEENEHLIGGHILSAQGETSSSIGYDSIKNVAILDIETGR

SEQ ID NO: 91856 - protein, 411 aa, Arabidopsis thaliana
  peptide (1)..(411): Ceres Seq. ID no. 12729761
  misc_feature (1)..(411): Homolog of NCBI NO: 18394970 NR Description: wall-associated kinase 1; protein id:
  misc_feature (1)..(411): Homolog of NCBI NO: 25751318 NR Description: probable serine/threonine-specific protein kinase
  misc_feature (1)..(411): Homolog of NCBI NO: 15218170 NR Description: wall-associated kinase 5; protein id: At1g21230.1
  misc_feature (1)..(411): Homolog of NCBI NO: 15218959 NR Description: wall-associated kinase 2; protein id: supported by cDNA: gi_17064909 [Arabidopsis thaliana]
  misc_feature (1)..(411): Homolog of NCBI NO: 25287666 NR Description: wall-associated serine/threonine kinase (EC
  misc_feature (1)..(411): Homolog of NCBI NO: 166813 NR Description: serine threonine kinase
  misc_feature (1)..(411): Homolog of NCBI NO: 25287665 NR Description: hypothetical protein F16F4.10 [imported] -
  misc_feature (1)..(411): Homolog of NCBI NO: 15218167 NR Description: wall-associated kinase 4; protein id: At1g21210.1
  misc_feature (1)..(380): Homolog of NCBI NO: 34915126 NR Description: putative wall-associated kinase 2 [Oryza sativa
  misc_feature (1)..(365): Homolog of NCBI NO: 38567980 NR Description: OSJNBa0093F12.21 [Oryza sativa (japonica
MSCTRPEYKRTRIFLVIIIGVLVLLLAAICIQHATKQRKYTKLRRQFFEQNGGGMLIQRLSGAGLSNIDFKIFTEEGMKEATNGYDESRILGQGGQGTVYKGILPDNTIVAIKKARLADSRQVDQFIHEVLVLSQINHRNVVKILGCCLETEVPLLVYEFITNGTLFDHLHGSIFDSSLTWEHRLRIAIEVAGTLAYLHSSASIPIIHRDIKTANILLDENLTAKVADFGASKLIPMDKEQLTTMVQGTLGYLDPEYYTTGLLNEKSDVYSFGVVLMELLSGQKALCFERPQASKHLVSYFVSATEENRLHEIIDDQVLNEDNLKEIQEAARIAAECTRLMGEERPRMKEVAAKLEALRVEKTKHKWSDQYPEENEHLIGGHILSAQGETSSSIGYDSIKNVAILDIETGR

SEQ ID NO: 91857 - DNA, 2552 bp, Arabidopsis thaliana
  misc_feature (1)..(2552): Ceres Seq. ID no. 12729762
  misc_feature: MA Experiment ID: 20000315 Result: Down-regulated in Transcription
  misc_feature: MA Experiment 20000315 PARAMETER Experiment Name: At_14day_Shoots-Roots_Sub_P Parameter: Age (day) Value: 14
  misc_feature: MA Experiment 20000315 PARAMETER Experiment Name: At_14day_Shoots-Roots_Sub_P Parameter: Organism Value: A. thaliana
  misc_feature: MA Experiment 20000315 PARAMETER Experiment Name: At_14day_Shoots-Roots_Sub_P Parameter: Plant Line Value: WS
  misc_feature: MA Experiment 20000315 PARAMETER Experiment Name: At_14day_Shoots-Roots_Sub_P Parameter: Tissue Value: Shoots vs. Whole Plant
  misc_feature: MA Experiment ID: 20000327 Result: Down-regulated in Transcription
  misc_feature: MA Experiment 20000327 PARAMETER Experiment Name: At_42deg_Heat_Sub_P Parameter: Age (day) Value: 14
  misc_feature: MA Experiment 20000327 PARAMETER Experiment Name: At_42deg_Heat_Sub_P Parameter: Organism Value: A. thaliana
  misc_feature: MA Experiment 20000327 PARAMETER Experiment Name: At_42deg_Heat_Sub_P Parameter: Plant Line Value: WS
  misc_feature: MA Experiment 20000327 PARAMETER Experiment Name: At_42deg_Heat_Sub_P Parameter: Temperature (deg C) Value: 42 vs. 22
  misc_feature: MA Experiment 20000327 PARAMETER Experiment Name: At_42deg_Heat_Sub_P Parameter: Timepoint (hr) Value: 1
  misc_feature: MA Experiment 20000327 PARAMETER Experiment Name: At_42deg_Heat_Sub_P Parameter: Tissue Value: Aerial
  misc_feature: MA Experiment ID: 20000328 Result: Down-regulated in Transcription
  misc_feature: MA Experiment 20000328 PARAMETER Experiment Name: At_42deg_Heat_Sub_P Parameter: Age (day) Value: 14
  misc_feature: MA Experiment 20000328 PARAMETER Experiment Name: At_42deg_Heat_Sub_P Parameter: Organism Value: A. thaliana
  misc_feature: MA Experiment 20000328 PARAMETER Experiment Name: At_42deg_Heat_Sub_P Parameter: Plant Line Value: WS
  misc_feature: MA Experiment 20000328 PARAMETER Experiment Name: At_42deg_Heat_Sub_P Parameter: Temperature (deg C) Value: 42 vs. 22
  misc_feature: MA Experiment 20000328 PARAMETER Experiment Name: At_42deg_Heat_Sub_P Parameter: Timepoint (hr) Value: 6
  misc_feature: MA Experiment 20000328 PARAMETER Experiment Name: At_42deg_Heat_Sub_P Parameter: Tissue Value: Aerial
  misc_feature: MA Experiment ID: 20000329 Result: Up-regulated in Transcription
  misc_feature: MA Experiment 20000329 PARAMETER Experiment Name: At_4deg_Cold_Sub_P Parameter: Age (day) Value: 14
  misc_feature: MA Experiment 20000329 PARAMETER Experiment Name: At_4deg_Cold_Sub_P Parameter: Organism Value: A. thaliana
  misc_feature: MA Experiment 20000329 PARAMETER Experiment Name: At_4deg_Cold_Sub_P Parameter: Plant Line Value: WS
  misc_feature: MA Experiment 20000329 PARAMETER Experiment Name: At_4deg_Cold_Sub_P Parameter: Temperature (deg C) Value: 4 vs. 22
  misc_feature: MA Experiment 20000329 PARAMETER Experiment Name: At_4deg_Cold_Sub_P Parameter: Timepoint (hr) Value: 6
  misc_feature: MA Experiment 20000329 PARAMETER Experiment Name: At_4deg_Cold_Sub_P Parameter: Tissue Value: Aerial
  misc_feature: MA Experiment ID: 20000347 Result: Up-regulated in Transcription
  misc_feature: MA Experiment 20000347 PARAMETER Experiment Name: At_2mM_SA_Sub_P Parameter: Age (day) Value: 14
  misc_feature: MA Experiment 20000347 PARAMETER Experiment Name: At_2mM_SA_Sub_P Parameter: Organism Value: A. thaliana
  misc_feature: MA Experiment 20000347 PARAMETER Experiment Name: At_2mM_SA_Sub_P Parameter: Plant Line Value: WS
  misc_feature: MA Experiment 20000347 PARAMETER Experiment Name: At_2mM_SA_Sub_P Parameter: Timepoint (hr) Value: 6
  misc_feature: MA Experiment 20000347 PARAMETER Experiment Name: At_2mM_SA_Sub_P Parameter: Tissue Value: Aerial
  misc_feature: MA Experiment 20000347 PARAMETER Experiment Name: At_2mM_SA_Sub_P Parameter: Treatment Value: 2mM SA vs. No Treatment
  misc_feature: MA Experiment ID: 20000355 Result: Down-regulated in Transcription
  misc_feature: MA Experiment 20000355 PARAMETER Experiment Name: At_Siliques_Sub_P Parameter: Age (day) Value: 21
  misc_feature: MA Experiment 20000355 PARAMETER Experiment Name: At_Siliques_Sub_P Parameter: Organism Value: A. thaliana
  misc_feature: MA Experiment 20000355 PARAMETER Experiment Name: At_Siliques_Sub_P Parameter: Plant Line Value: WS
  misc_feature: MA Experiment 20000355 PARAMETER Experiment Name: At_Siliques_Sub_P Parameter: Tissue Value: Less Than 5mm Siliques vs. Whole Plant
  misc_feature: MA Experiment ID: 20000634 Result: Down-regulated in Transcription
  misc_feature: MA Experiment 20000634 PARAMETER Experiment Name: At_10percent_PEG_Sub_P Parameter: Age (day) Value: 12
  misc_feature: MA Experiment 20000634 PARAMETER Experiment Name: At_10percent_PEG_Sub_P Parameter: Organism Value: A. thaliana
  misc_feature: MA Experiment 20000634 PARAMETER Experiment Name: At_10percent_PEG_Sub_P Parameter: Plant Line Value: WS
  misc_feature: MA Experiment 20000634 PARAMETER Experiment Name: At_10percent_PEG_Sub_P Parameter: Timepoint (day) Value: 12
  misc_feature: MA Experiment 20000634 PARAMETER Experiment Name: At_10percent_PEG_Sub_P Parameter: Tissue Value: Whole Plant
  misc_feature: MA Experiment 20000634 PARAMETER Experiment Name: At_10percent_PEG_Sub_P Parameter: Treatment Value: 10% PEG vs. No Treatment
atacaggaataagcagcagcgtacttaaacgtcctcttcactggttacgttggttgtgtagttgaattttagtcttcttgcaatttctgggaaaatgggaaggggcctgcgaaaatgagtgagagagaacatctcgtatacagttgtttcttataagaacaaggagattagcgaaaaaaactcaaaagaggaacagagttagagagagagagagagagagaaataaagagagaagagaggtagaagatgaaggtgcaggagggtttgttcttggtggctattttcttctcccttgcgtgtacgcagctggtgaaggggcaacatcaacctggtgagaattgccaaaataaatgtggcaacatcacaatagagtacccttttggcatttcttcaggttgttactatcccggaaatgaaagtttcagtatcacctgtaaggaagataggccacatgtcttaagcgacattgaagtggcaaactttaatcacagcggccagctacaagttctgcttaatcgatcctctacttgctacgacgagcaaggaaaaaaaactgaggaggacagttcttttacactggaaaatttatctctttccgccaacaacaagttaactgcagtaggctgtaacgctttatcacttctggacacttttggaatgcaaaactactcaactgcatgcttgtcattatgcgattctcccccagaggctgatggagaatgtaatggtagaggttgctgcagagtcgacgtttctgccccgttggatagctatacattcgaaactacatcaggtcgcatcaagcacatgacttcttttcacgactttagtccttgcacctacgcttttctcgttgaagatgataagttcaacttcagttctacagaagatcttctgaatctgcgaaatgtcatgaggttccctgtgttactagattggtctgttggaaatcagacatgcgagcaagttggaagcacaagcatatgcggtgggaacagcacttgtctcgattctactcctagaaacgggtatatctgcagatgcaatgaaggctttgatgggaatccatacctttcagctggttgccaagacgtcaatgagtgtactactagtagtactatccatagacataactgttcggatcccaaaacctgtagaaacaaggttggaggcttctattgtaagtgtcaatctggttaccgcttagataccaccactatgagctgcaagcgtaaagagtttgcatggactacaattcttcttgtaaccaccatcggcttcttggtcattctgcttggcgttgcctgtatacaacagagaatgaagcacctgaaggacaccaagctccgagaacaattcttcgagcaaaatggtggcggcatgttgacacaacgactctcaggagcagggccgtcaaatgttgatgtcaaaatctttactgaggatggcatgaagaaagcaacaaatggttatgctgagagcaggatcctgggtcagggtggccaaggaacagtgtacaaagggatattgccggacaactccatagttgctataaagaaagcccgacttggagacagtagccaagtagagcagttcatcaatgaagtgctcgtgctttcacaaatcaaccataggaacgtagtcaagctcttgggctgctgtctagagactgaagttcccttgttggtctatgagttcatcaccaatggcacccttttcgatcacttgcatggttccatgattgattcttcgcttacatgggaacaccgtctgaagatagcaatagaagtcgctggaactcttgcatatcttcactcctctgcttctattccaatcatccatcgggatatcaaaactgcaaatattcttctggatgtaaacttaactgcaaaagtagctgactttggtgcttcaaggctgataccaatggataaagaagagctcgaaactatggtgcaaggcactctaggttacctagacccagaatattacaacacagggttgttaaacgaaaagagcgatgtttatagttttggggtcgtcctaatggaactgctctcaggtcaaaaggcattgtgctttaaacggccacagtcctcaaaacatctggtgagttactttgcgactgccacaaaagagaataggttggatgagattattggcggcgaagtgatgaacgaggataatctgaaggagatccaggaagctgcaagaattgctgcagagtgtacaaggctaatgggagaggaaaggccaaggatgaaagaagtagctgcaaagctagaagccttgagggtcgaaaaaaccaaacataagtggtcggatcagtaccctgaggagaatgaacacttgattggtggtcacatcttgtcagcacaaggcgaaaccagtagcagcattggctatgacagcatcaagaatgtagcaatattggacattgaaactggccgctgatattacaaattcacatgtatttcttttgtttgtaagaaaaaaaaaactacctctttgttgcttcatcaataatgctttgcttcattaataatgatttg

SEQ ID NO: 91858 - protein, 735 aa, Arabidopsis thaliana
  peptide (1)..(735): Ceres Seq. ID no. 12729763
  misc_feature (1)..(735): Homolog of NCBI NO: 15218171 NR Description: wall-associated kinase 3; protein id: At1g21240.1
  misc_feature (1)..(735): Homolog of NCBI NO: 15218170 NR Description: wall-associated kinase 5; protein id: At1g21230.1
  misc_feature (277)..(735): Homolog of NCBI NO: 25287657 NR Description: F16F4.8 protein - Arabidopsis thaliana
  misc_feature (1)..(310): Homolog of NCBI NO: 25287657 NR Description: F16F4.8 protein - Arabidopsis thaliana
  misc_feature (1)..(735): Homolog of NCBI NO: 15218959 NR Description: wall-associated kinase 2; protein id: supported by cDNA: gi_17064909 [Arabidopsis thaliana]
  misc_feature (1)..(735): Homolog of NCBI NO: 25287666 NR Description: wall-associated serine/threonine kinase (EC
  misc_feature (1)..(735): Homolog of NCBI NO: 25287665 NR Description: hypothetical protein F16F4.10 [imported] -
  misc_feature (1)..(735): Homolog of NCBI NO: 15218167 NR Description: wall-associated kinase 4; protein id: At1g21210.1
  misc_feature (229)..(686): Homolog of NCBI NO: 38347179 NR Description: OSJNBa0024J22.5 [Oryza sativa (japonica
  misc_feature (32)..(280): Homolog of NCBI NO: 38347179 NR Description: OSJNBa0024J22.5 [Oryza sativa (japonica
MKVQEGLFLVAIFFSLACTQLVKGQHQPGENCQNKCGNITIEYPFGISSGCYYPGNESFSITCKEDRPHVLSDIEVANFNHSGQLQVLLNRSSTCYDEQGKKTEEDSSFTLENLSLSANNKLTAVGCNALSLLDTFGMQNYSTACLSLCDSPPEADGECNGRGCCRVDVSAPLDSYTFETTSGRIKHMTSFHDFSPCTYAFLVEDDKFNFSSTEDLLNLRNVMRFPVLLDWSVGNQTCEQVGSTSICGGNSTCLDSTPRNGYICRCNEGFDGNPYLSAGCQDVNECTTSSTIHRHNCSDPKTCRNKVGGFYCKCQSGYRLDTTTMSCKRKEFAWTTILLVTTIGFLVILLGVACIQQRMKHLKDTKLREQFFEQNGGGMLTQRLSGAGPSNVDVKIFTEDGMKKATNGYAESRILGQGGQGTVYKGILPDNSIVAIKKARLGDSSQVEQFINEVLVLSQINHRNVVKLLGCCLETEVPLLVYEFITNGTLFDHLHGSMIDSSLTWEHRLKIAIEVAGTLAYLHSSASIPIIHRDIKTANILLDVNLTAKVADFGASRLIPMDKEELETMVQGTLGYLDPEYYNTGLLNEKSDVYSFGVVLMELLSGQKALCFKRPQSSKHLVSYFATATKENRLDEIIGGEVMNEDNLKEIQEAARIAAECTRLMGEERPRMKEVAAKLEALRVEKTKHKWSDQYPEENEHLIGGHILSAQGETSSSIGYDSIKNVAILDIETGR

SEQ ID NO: 91859 - protein, 598 aa, Arabidopsis thaliana
  peptide (1)..(598): Ceres Seq. ID no. 12729764
  misc_feature (1)..(598): Homolog of NCBI NO: 15218171 NR Description: wall-associated kinase 3; protein id: At1g21240.1
  misc_feature (1)..(598): Homolog of NCBI NO: 15218170 NR Description: wall-associated kinase 5; protein id: At1g21230.1
  misc_feature (140)..(598): Homolog of NCBI NO: 25287657 NR Description: F16F4.8 protein - Arabidopsis thaliana
  misc_feature (1)..(173): Homolog of NCBI NO: 25287657 NR Description: F16F4.8 protein - Arabidopsis thaliana
  misc_feature (1)..(598): Homolog of NCBI NO: 15218959 NR Description: wall-associated kinase 2; protein id: supported by cDNA: gi_17064909 [Arabidopsis thaliana]
  misc_feature (1)..(598): Homolog of NCBI NO: 25287666 NR Description: wall-associated serine/threonine kinase (EC
  misc_feature (1)..(598): Homolog of NCBI NO: 25287665 NR Description: hypothetical protein F16F4.10 [imported] -
  misc_feature (1)..(598): Homolog of NCBI NO: 15218167 NR Description: wall-associated kinase 4; protein id: At1g21210.1
  misc_feature (92)..(549): Homolog of NCBI NO: 38347179 NR Description: OSJNBa0024J22.5 [Oryza sativa (japonica
  misc_feature (1)..(143): Homolog of NCBI NO: 38347179 NR Description: OSJNBa0024J22.5 [Oryza sativa (japonica
MQNYSTACLSLCDSPPEADGECNGRGCCRVDVSAPLDSYTFETTSGRIKHMTSFHDFSPCTYAFLVEDDKFNFSSTEDLLNLRNVMRFPVLLDWSVGNQTCEQVGSTSICGGNSTCLDSTPRNGYICRCNEGFDGNPYLSAGCQDVNECTTSSTIHRHNCSDPKTCRNKVGGFYCKCQSGYRLDTTTMSCKRKEFAWTTILLVTTIGFLVILLGVACIQQRMKHLKDTKLREQFFEQNGGGMLTQRLSGAGPSNVDVKIFTEDGMKKATNGYAESRILGQGGQGTVYKGILPDNSIVAIKKARLGDSSQVEQFINEVLVLSQINHRNVVKLLGCCLETEVPLLVYEFITNGTLFDHLHGSMIDSSLTWEHRLKIAIEVAGTLAYLHSSASIPIIHRDIKTANILLDVNLTAKVADFGASRLIPMDKEELETMVQGTLGYLDPEYYNTGLLNEKSDVYSFGVVLMELLSGQKALCFKRPQSSKHLVSYFATATKENRLDEIIGGEVMNEDNLKEIQEAARIAAECTRLMGEERPRMKEVAAKLEALRVEKTKHKWSDQYPEENEHLIGGHILSAQGETSSSIGYDSIKNVAILDIETGR

SEQ ID NO: 91860 - protein, 548 aa, Arabidopsis thaliana
  peptide (1)..(548): Ceres Seq. ID no. 12729765
  misc_feature (1)..(548): Homolog of NCBI NO: 15218171 NR Description: wall-associated kinase 3; protein id: At1g21240.1
  misc_feature (1)..(548): Homolog of NCBI NO: 15218170 NR Description: wall-associated kinase 5; protein id: At1g21230.1
  misc_feature (90)..(548): Homolog of NCBI NO: 25287657 NR Description: F16F4.8 protein - Arabidopsis thaliana
  misc_feature (1)..(123): Homolog of NCBI NO: 25287657 NR Description: F16F4.8 protein - Arabidopsis thaliana
  misc_feature (1)..(548): Homolog of NCBI NO: 15218959 NR Description: wall-associated kinase 2; protein id: supported by cDNA: gi_17064909 [Arabidopsis thaliana]
  misc_feature (1)..(548): Homolog of NCBI NO: 25287666 NR Description: wall-associated serine/threonine kinase (EC
  misc_feature (1)..(548): Homolog of NCBI NO: 25287665 NR Description: hypothetical protein F16F4.10 [imported] -
  misc_feature (1)..(548): Homolog of NCBI NO: 15218167 NR Description: wall-associated kinase 4; protein id: At1g21210.1
  misc_feature (42)..(499): Homolog of NCBI NO: 38347179 NR Description: OSJNBa0024J22.5 [Oryza sativa (japonica
  misc_feature (1)..(93): Homolog of NCBI NO: 38347179 NR Description: OSJNBa0024J22.5 [Oryza sativa (japonica
MTSFHDFSPCTYAFLVEDDKFNFSSTEDLLNLRNVMRFPVLLDWSVGNQTCEQVGSTSICGGNSTCLDSTPRNGYICRCNEGFDGNPYLSAGCQDVNECTTSSTIHRHNCSDPKTCRNKVGGFYCKCQSGYRLDTTTMSCKRKEFAWTTILLVTTIGFLVILLGVACIQQRMKHLKDTKLREQFFEQNGGGMLTQRLSGAGPSNVDVKIFTEDGMKKATNGYAESRILGQGGQGTVYKGILPDNSIVAIKKARLGDSSQVEQFINEVLVLSQINHRNVVKLLGCCLETEVPLLVYEFITNGTLFDHLHGSMIDSSLTWEHRLKIAIEVAGTLAYLHSSASIPIIHRDIKTANILLDVNLTAKVADFGASRLIPMDKEELETMVQGTLGYLDPEYYNTGLLNEKSDVYSFGVVLMELLSGQKALCFKRPQSSKHLVSYFATATKENRLDEIIGGEVMNEDNLKEIQEAARIAAECTRLMGEERPRMKEVAAKLEALRVEKTKHKWSDQYPEENEHLIGGHILSAQGETSSSIGYDSIKNVAILDIETGR

SEQ ID NO: 91861 - DNA, 2614 bp, Arabidopsis thaliana
  misc_feature (1)..(2614): Ceres Seq. ID no. 12729802
  misc_feature: MA Experiment ID: 20000315 Result: Down-regulated in Transcription
  misc_feature: MA Experiment 20000315 PARAMETER Experiment Name: At_14day_Shoots-Roots_Sub_P Parameter: Age (day) Value: 14
  misc_feature: MA Experiment 20000315 PARAMETER Experiment Name: At_14day_Shoots-Roots_Sub_P Parameter: Organism Value: A. thaliana
  misc_feature: MA Experiment 20000315 PARAMETER Experiment Name: At_14day_Shoots-Roots_Sub_P Parameter: Plant Line Value: WS
  misc_feature: MA Experiment 20000315 PARAMETER Experiment Name: At_14day_Shoots-Roots_Sub_P Parameter: Tissue Value: Shoots vs. Whole Plant
  misc_feature: MA Experiment ID: 20000327 Result: Down-regulated in Transcription
  misc_feature: MA Experiment 20000327 PARAMETER Experiment Name: At_42deg_Heat_Sub_P Parameter: Age (day) Value: 14
  misc_feature: MA Experiment 20000327 PARAMETER Experiment Name: At_42deg_Heat_Sub_P Parameter: Organism Value: A. thaliana
  misc_feature: MA Experiment 20000327 PARAMETER Experiment Name: At_42deg_Heat_Sub_P Parameter: Plant Line Value: WS
  misc_feature: MA Experiment 20000327 PARAMETER Experiment Name: At_42deg_Heat_Sub_P Parameter: Temperature (deg C) Value: 42 vs. 22
  misc_feature: MA Experiment 20000327 PARAMETER Experiment Name: At_42deg_Heat_Sub_P Parameter: Timepoint (hr) Value: 1
  misc_feature: MA Experiment 20000327 PARAMETER Experiment Name: At_42deg_Heat_Sub_P Parameter: Tissue Value: Aerial
  misc_feature: MA Experiment ID: 20000328 Result: Down-regulated in Transcription
  misc_feature: MA Experiment 20000328 PARAMETER Experiment Name: At_42deg_Heat_Sub_P Parameter: Age (day) Value: 14
  misc_feature: MA Experiment 20000328 PARAMETER Experiment Name: At_42deg_Heat_Sub_P Parameter: Organism Value: A. thaliana
  misc_feature: MA Experiment 20000328 PARAMETER Experiment Name: At_42deg_Heat_Sub_P Parameter: Plant Line Value: WS
  misc_feature: MA Experiment 20000328 PARAMETER Experiment Name: At_42deg_Heat_Sub_P Parameter: Temperature (deg C) Value: 42 vs. 22
  misc_feature: MA Experiment 20000328 PARAMETER Experiment Name: At_42deg_Heat_Sub_P Parameter: Timepoint (hr) Value: 6
  misc_feature: MA Experiment 20000328 PARAMETER Experiment Name: At_42deg_Heat_Sub_P Parameter: Tissue Value: Aerial
atgtctgctcctccattcttactcttctctctttctcagaagctgcaaaaccagagagtgagagagaatagagattcacttttgtgagcgttgcgatgattttgtgcctcgtggaatcatcacactacaacgtattcacctgaaattcagacaaaacagtttgaggaaactgggaagtgataagataagagagtgatagagagagagatgacggaaaacggcgtcgttacaggaggaggccatactgttatggtgggcgtaaagttcgatgagtcgagcaatgagctacttgattgggctttggttaaggttgctgaaccgggtgatactgtaatcgctcttcatgtactcggcaatgagatcgttgaccgagcagacaactcttctctcgtctccattgttaaaaactttgattctgttcttgaagtttatgaaggtttctgcaaattgaaacagttggaattgaagctaaaattatcccggggttcttctactcgaaagattctagttaaagaagcaaaaatgtgttctgcgtccaaagttgtagttgggatctccagacgtttccatacaattcattcatctgtctccgtggctaagtacttagctaggaaagtagcaaaagattgctgggttctggctgttgacaatggaaaagtcatgtttcagaaagatggttcctcatcgatcattcatcactctaaaggtaaaagtgatgctcgtaggaacactttgtctagtttctttcagatgcctgtcacattgagaaagaataccaaagtagtaaaccattctgaggtggaagaggaagaggcagaggaagatcattccaatggtcagagtcttcggcggtctttagtgtatgcatgccttgggaattgctcggttcgtgatatgaattccttgcctacgcctggaaatttatctcgatcgtctagctgtaatggtgatcaagatgataatgctgatttgcacaaggcaatggcacttgttcctgcaaaatttccagaagatttgaccccattcattacaatgctggtaaaagaactgcctgaatttagaccaggttggcctttgctttgtcgtgtagcttcttcagatgtattagcttctgctccgagaagttcttcgttccgaaagataccagttgtgcagtgggtgctgaagctgcccgctaggaccaattctgttgttggaagctcagacacaaagcagattggttttgattcttctgaatctgaagaaaatgataagttgtctagctcaaacgttgaaaggcaagcaattgttcctgatgaatctatgatcgtgaaatgttctcttgatcatagctcaggtagatttccagagaatgtagagggtcttcaggcaaggatctccacatcttgccagttttttacgtataaggaacttgtgtcggtgacatccaatttctgtgctgataatttcatcggaaaaggaggcagcagccgggtttttagaggttatctgccaaatggaagagaggttgcagtgaaaattctcaaacgaaccgaatgtgtcttgaaggattttgtggcagagattgacattatcacaaccttacaccataagaacgttatttcccttttaggttattgctttgaaaacaataacctgttactagtatataattatctctcaagaggaagccttgaagagaatcttcacggcaacaaaaaagacctggttgcatttcgttggaacgagagatataaggtggccgtgggaatagctgaagcgttggactatctgcataacgatgctccacaacctgttattcacagagatgttaagtcatctaacatattattgtctgatgattttgaaccacaactttctgactttgggcttgcaaagtgggcgtcggaatccacaactcagataatctgctccgatgtcgcaggcacctttggctacttagctccagagtactttatgtatggtaagatgaacaataagatagatgtctatgcttacggcgttgtactcctcgaacttctttctggaagaaaaccggttaatagcgaatctccaaaggctcaagacagtcttgttatgtgggcgaagccaattctggatgataaagaatattcacagctattggactcgagtttgcaagatgacaacaatagtgaccagatggagaagatggcgttagcagccactctttgtataagacataaccctcaaactaggccaacgatgggaatggtcttagagcttcttaaaggtgacgtagagatgctaaaatgggcaaagctacaagttagtaacccgttagaggattcaatgctactcaaggacgagaaattgcggaggtctaatctgcagtcacatctaaacctagcattccttgacatggaagatgactctctttccatgggaagcatggagcaaggcatctccgtggaggagtatcttaaaggcaggacaagccgttcatcaagcttcaactgagccattatttttgttcactacaacaaatcacaattgcaatactcaacaatgtgagatggtgaaaaaaaagagttctcctgtgtgtgagtgagtgtaaagtgtatatttaagaaaatgtgtttcttttcattgtcat

SEQ ID NO: 91862 - protein, 756 aa, Arabidopsis thaliana
  peptide (1)..(756): Ceres Seq. ID no. 12729803
  misc_feature (11)..(145): Pfam Name: Universal stress protein family Pfam Description: Universal stress protein family
  misc_feature (3)..(357): Homolog of NCBI NO: 15223890 NR Description: hypothetical protein; protein id: At1g77280.1
  misc_feature (381)..(645): Homolog of NCBI NO: 15223890 NR Description: hypothetical protein; protein id: At1g77280.1
  misc_feature (626)..(756): Homolog of NCBI NO: 15223890 NR Description: hypothetical protein; protein id: At1g77280.1
  misc_feature (240)..(756): Homolog of NCBI NO: 15237563 NR Description: putative protein; protein id: At5g63940.1, by cDNA: gi_20260317 [Arabidopsis thaliana] contains similarity to protein kinase~gene_id:MBM17.4
  misc_feature (5)..(155): Homolog of NCBI NO: 15237563 NR Description: putative protein; protein id: At5g63940.1, by cDNA: gi_20260317 [Arabidopsis thaliana] contains similarity to protein kinase~gene_id:MBM17.4
  misc_feature (287)..(756): Homolog of NCBI NO: 28376688 NR Description: putative serine/threonine kinase [Oryza sativa
  misc_feature (1)..(166): Homolog of NCBI NO: 28376688 NR Description: putative serine/threonine kinase [Oryza sativa
  misc_feature (395)..(737): Homolog of NCBI NO: 15227291 NR Description: putative protein kinase; protein id: At2g16750.1
  misc_feature (395)..(737): Homolog of NCBI NO: 15236248 NR Description: protein kinase - like; protein id: At4g35030.1
  misc_feature (371)..(688): Homolog of NCBI NO: 40253745 NR Description: SERK1 protein-like [Oryza sativa (japonica
MTENGVVTGGGHTVMVGVKFDESSNELLDWALVKVAEPGDTVIALHVLGNEIVDRADNSSLVSIVKNFDSVLEVYEGFCKLKQLELKLKLSRGSSTRKILVKEAKMCSASKVVVGISRRFHTIHSSVSVAKYLARKVAKDCWVLAVDNGKVMFQKDGSSSIIHHSKGKSDARRNTLSSFFQMPVTLRKNTKVVNHSEVEEEEAEEDHSNGQSLRRSLVYACLGNCSVRDMNSLPTPGNLSRSSSCNGDQDDNADLHKAMALVPAKFPEDLTPFITMLVKELPEFRPGWPLLCRVASSDVLASAPRSSSFRKIPVVQWVLKLPARTNSVVGSSDTKQIGFDSSESEENDKLSSSNVERQAIVPDESMIVKCSLDHSSGRFPENVEGLQARISTSCQFFTYKELVSVTSNFCADNFIGKGGSSRVFRGYLPNGREVAVKILKRTECVLKDFVAEIDIITTLHHKNVISLLGYCFENNNLLLVYNYLSRGSLEENLHGNKKDLVAFRWNERYKVAVGIAEALDYLHNDAPQPVIHRDVKSSNILLSDDFEPQLSDFGLAKWASESTTQIICSDVAGTFGYLAPEYFMYGKMNNKIDVYAYGVVLLELLSGRKPVNSESPKAQDSLVMWAKPILDDKEYSQLLDSSLQDDNNSDQMEKMALAATLCIRHNPQTRPTMGMVLELLKGDVEMLKWAKLQVSNPLEDSMLLKDEKLRRSNLQSHLNLAFLDMEDDSLSMGSMEQGISVEEYLKGRTSRSSSFN

SEQ ID NO: 91863 - protein, 742 aa, Arabidopsis thaliana
  peptide (1)..(742): Ceres Seq. ID no. 12729804
  misc_feature (1)..(131): Pfam Name: Universal stress protein family Pfam Description: Universal stress protein family
  misc_feature (1)..(343): Homolog of NCBI NO: 15223890 NR Description: hypothetical protein; protein id: At1g77280.1
  misc_feature (367)..(631): Homolog of NCBI NO: 15223890 NR Description: hypothetical protein; protein id: At1g77280.1
  misc_feature (612)..(742): Homolog of NCBI NO: 15223890 NR Description: hypothetical protein; protein id: At1g77280.1
  misc_feature (226)..(742): Homolog of NCBI NO: 15237563 NR Description: putative protein; protein id: At5g63940.1, by cDNA: gi_20260317 [Arabidopsis thaliana] contains similarity to protein kinase~gene_id:MBM17.4
  misc_feature (1)..(141): Homolog of NCBI NO: 15237563 NR Description: putative protein; protein id: At5g63940.1, by cDNA: gi_20260317 [Arabidopsis thaliana] contains similarity to protein kinase~gene_id:MBM17.4
  misc_feature (273)..(742): Homolog of NCBI NO: 28376688 NR Description: putative serine/threonine kinase [Oryza sativa
  misc_feature (1)..(152): Homolog of NCBI NO: 28376688 NR Description: putative serine/threonine kinase [Oryza sativa
  misc_feature (381)..(723): Homolog of NCBI NO: 15227291 NR Description: putative protein kinase; protein id: At2g16750.1
  misc_feature (381)..(723): Homolog of NCBI NO: 15236248 NR Description: protein kinase - like; protein id: At4g35030.1
  misc_feature (357)..(674): Homolog of NCBI NO: 40253745 NR Description: SERK1 protein-like [Oryza sativa (japonica
MVGVKFDESSNELLDWALVKVAEPGDTVIALHVLGNEIVDRADNSSLVSIVKNFDSVLEVYEGFCKLKQLELKLKLSRGSSTRKILVKEAKMCSASKVVVGISRRFHTIHSSVSVAKYLARKVAKDCWVLAVDNGKVMFQKDGSSSIIHHSKGKSDARRNTLSSFFQMPVTLRKNTKVVNHSEVEEEEAEEDHSNGQSLRRSLVYACLGNCSVRDMNSLPTPGNLSRSSSCNGDQDDNADLHKAMALVPAKFPEDLTPFITMLVKELPEFRPGWPLLCRVASSDVLASAPRSSSFRKIPVVQWVLKLPARTNSVVGSSDTKQIGFDSSESEENDKLSSSNVERQAIVPDESMIVKCSLDHSSGRFPENVEGLQARISTSCQFFTYKELVSVTSNFCADNFIGKGGSSRVFRGYLPNGREVAVKILKRTECVLKDFVAEIDIITTLHHKNVISLLGYCFENNNLLLVYNYLSRGSLEENLHGNKKDLVAFRWNERYKVAVGIAEALDYLHNDAPQPVIHRDVKSSNILLSDDFEPQLSDFGLAKWASESTTQIICSDVAGTFGYLAPEYFMYGKMNNKIDVYAYGVVLLELLSGRKPVNSESPKAQDSLVMWAKPILDDKEYSQLLDSSLQDDNNSDQMEKMALAATLCIRHNPQTRPTMGMVLELLKGDVEMLKWAKLQVSNPLEDSMLLKDEKLRRSNLQSHLNLAFLDMEDDSLSMGSMEQGISVEEYLKGRTSRSSSFN

SEQ ID NO: 91864 - protein, 651 aa, Arabidopsis thaliana
  peptide (1)..(651): Ceres Seq. ID no. 12729805
  misc_feature (1)..(252): Homolog of NCBI NO: 15223890 NR Description: hypothetical protein; protein id: At1g77280.1
  misc_feature (276)..(540): Homolog of NCBI NO: 15223890 NR Description: hypothetical protein; protein id: At1g77280.1
  misc_feature (521)..(651): Homolog of NCBI NO: 15223890 NR Description: hypothetical protein; protein id: At1g77280.1
  misc_feature (135)..(651): Homolog of NCBI NO: 15237563 NR Description: putative protein; protein id: At5g63940.1, by cDNA: gi_20260317 [Arabidopsis thaliana] contains similarity to protein kinase~gene_id:MBM17.4
  misc_feature (1)..(50): Homolog of NCBI NO: 15237563 NR Description: putative protein; protein id: At5g63940.1, by cDNA: gi_20260317 [Arabidopsis thaliana] contains similarity to protein kinase~gene_id:MBM17.4
  misc_feature (182)..(651): Homolog of NCBI NO: 28376688 NR Description: putative serine/threonine kinase [Oryza sativa
  misc_feature (1)..(61): Homolog of NCBI NO: 28376688 NR Description: putative serine/threonine kinase [Oryza sativa
  misc_feature (290)..(632): Homolog of NCBI NO: 15227291 NR Description: putative protein kinase; protein id: At2g16750.1
  misc_feature (290)..(632): Homolog of NCBI NO: 15236248 NR Description: protein kinase - like; protein id: At4g35030.1
  misc_feature (266)..(583): Homolog of NCBI NO: 40253745 NR Description: SERK1 protein-like [Oryza sativa (japonica
MCSASKVVVGISRRFHTIHSSVSVAKYLARKVAKDCWVLAVDNGKVMFQKDGSSSIIHHSKGKSDARRNTLSSFFQMPVTLRKNTKVVNHSEVEEEEAEEDHSNGQSLRRSLVYACLGNCSVRDMNSLPTPGNLSRSSSCNGDQDDNADLHKAMALVPAKFPEDLTPFITMLVKELPEFRPGWPLLCRVASSDVLASAPRSSSFRKIPVVQWVLKLPARTNSVVGSSDTKQIGFDSSESEENDKLSSSNVERQAIVPDESMIVKCSLDHSSGRFPENVEGLQARISTSCQFFTYKELVSVTSNFCADNFIGKGGSSRVFRGYLPNGREVAVKILKRTECVLKDFVAEIDIITTLHHKNVISLLGYCFENNNLLLVYNYLSRGSLEENLHGNKKDLVAFRWNERYKVAVGIAEALDYLHNDAPQPVIHRDVKSSNILLSDDFEPQLSDFGLAKWASESTTQIICSDVAGTFGYLAPEYFMYGKMNNKIDVYAYGVVLLELLSGRKPVNSESPKAQDSLVMWAKPILDDKEYSQLLDSSLQDDNNSDQMEKMALAATLCIRHNPQTRPTMGMVLELLKGDVEMLKWAKLQVSNPLEDSMLLKDEKLRRSNLQSHLNLAFLDMEDDSLSMGSMEQGISVEEYLKGRTSRSSSFN

SEQ ID NO: 91865 - DNA, 3260 bp, Arabidopsis thaliana
  misc_feature (1)..(3260): Ceres Seq. ID no. 12729806
  misc_feature: MA Experiment ID: 20001558 Result: Down-regulated in Transcription
  misc_feature: MA Experiment 20001558 PARAMETER Experiment Name: At_Drought_Soil_Dry_P Parameter: Age (day) Value: 27
  misc_feature: MA Experiment 20001558 PARAMETER Experiment Name: At_Drought_Soil_Dry_P Parameter: Organism Value: A. thaliana
  misc_feature: MA Experiment 20001558 PARAMETER Experiment Name: At_Drought_Soil_Dry_P Parameter: Plant Line Value: WS
  misc_feature: MA Experiment 20001558 PARAMETER Experiment Name: At_Drought_Soil_Dry_P Parameter: Post Timepoint (hr) Value: 6
  misc_feature: MA Experiment 20001558 PARAMETER Experiment Name: At_Drought_Soil_Dry_P Parameter: Post-Treatment Value: Re-Water vs. No Drought
  misc_feature: MA Experiment 20001558 PARAMETER Experiment Name: At_Drought_Soil_Dry_P Parameter: Timepoint (day) Value: 13
  misc_feature: MA Experiment 20001558 PARAMETER Experiment Name: At_Drought_Soil_Dry_P Parameter: Treatment Value: Drought vs. No Drought
  misc_feature: MA Experiment ID: 20001560 Result: Down-regulated in Transcription
  misc_feature: MA Experiment 20001560 PARAMETER Experiment Name: At_Drought_Soil_Dry_P Parameter: Age (day) Value: 28
  misc_feature: MA Experiment 20001560 PARAMETER Experiment Name: At_Drought_Soil_Dry_P Parameter: Organism Value: A. thaliana
  misc_feature: MA Experiment 20001560 PARAMETER Experiment Name: At_Drought_Soil_Dry_P Parameter: Plant Line Value: WS
  misc_feature: MA Experiment 20001560 PARAMETER Experiment Name: At_Drought_Soil_Dry_P Parameter: Post Timepoint (hr) Value: None
  misc_feature: MA Experiment 20001560 PARAMETER Experiment Name: At_Drought_Soil_Dry_P Parameter: Post-Treatment Value: None
  misc_feature: MA Experiment 20001560 PARAMETER Experiment Name: At_Drought_Soil_Dry_P Parameter: Timepoint (day) Value: 14
  misc_feature: MA Experiment 20001560 PARAMETER Experiment Name: At_Drought_Soil_Dry_P Parameter: Treatment Value: Drought vs. No Drought
aaattcctgcaaacttccaaaacaccatctcaaatatccacattctccgccattaccctgaaccgtttctcgagttgtttctctcatgttcctatgcttttgcccttgccacgtacctatcatgagtcgcctttctccggccaccggaatctcttcccgcctccgcttctccattggtttgagttccgatggacgattaattcccttcggattccggtttcggagaaacgatgtcccgtttaaacgccgcttgagatttgtgatcagagcgcagctctctgaagctttttctcccgatttaggtttggattctcaggctgtgaaatcccgcgatacatcaaacttgccttggattggtccagttccaggggacattgctgaggttgaggcgtattgtagaatttttagatcagctgagcgactacatggagcgttgatggagacactatgcaaccctgtgactggtgaatgtcgagtaccgtatgatttctcaccggaggaaaaaccattgttggaggacaaaatagtatcagtgcttggttgtatattatctcttttaaacaaaggaaggaaagaaattctctctgggaggtcatcttctatgaattcatttaatttggatgatgttggggttgcagaggagtcgcttccaccacttgctgttttcaggggtgaaatgaaacggtgttgtgaaagcttacacattgctcttgagaattatctgacgccggatgatgagagaagtggaattgtttggaggaaattacagaagcttaaaaatgtctgctacgacgctggttttccacgcagtgataactatccttgtcaaacactttttgcgaattgggaccctatttactcgtcaaatacgaaagaggatattgattcctacgagtctgagattgcattttggaggggaggacaggtaacccaagaaggattgaagtggttgatagaaaacggatttaaaacaattgttgacctgagagctgaaatcgttaaggatacattctaccagacggcacttgatgatgcaatttcccttgggaaaattacagtggtgcaaattccaattgatgtcaggatggctcctaaagctgagcaggtcgagctgtttgcttctattgtatcagatagcagcaaaagaccgatatatgttcacagtaaagaaggtgtttggagaacttctgcgatggtttctaggtggaagcagtacatgacacgaccgatcacgaaagaaattccagtttcagaagagtcaaagcgtcgggaggtttctgaaactaagcttggatcaaatgctgtagtatctggtaagggtgtacctgatgagcagactgataaagtctctgaaatcaatgaggttgatagtagatctgcttcaagccagagcaaggaatctggaaggtttgagggagatacatctgcatcagaatttaatatggtgagcgatcctcttaaatctcaagttccaccaggcaatattttttcaagaaaagaaatgtctaaattcctgaagagcaaaagtattgctcctgctggttatcttactaatccgtccaaaatattgggaacagtgccaactccacaattttcatatactggtgtgacaaacggaaatcagattgttgataaagattcgataagaagacttgcggagacaggaaactccaatgggacccttctacctacaagttctcaaagtttagattttggcaacgggaagttttcaaatggaaatgtgcatgcgtctgataacaccaacaaaagtatatcggacaacaggggaaatggcttctctgcagcccctattgctgtgcctcctagtgataacttaagtcgcgctgtaggatcccattcggttcgagagtctcagactcagagaaataatagtggttcctcctcggattccagtgatgatgaagctggagctattgagggaaatatgtgtgcttctgccactggtgtagtaagggtgcagtcgagaaagaaagcagagatgttcttagtccgaactgatggagtgtcttgtacaagggaaaaggtgacagaatcctctctggccttcacacatccaagtactcaacagcagatgcttctttggaaaactaccccaaaaactgtcttactgctgaagaagctcgggcaagaactgatggaggaagctaaagaggctgcctctttcttgtatcaccaagagaatatgaatgttctggttgaacctgaggtgcatgatgtatttgccaggattccagggtttggctttgtccagaccttctacattcaggacacgagcgatctccatgaaagggttgattttgtggcatgcttagggggggatggggtgatattacatgcatcaaacttgttcaaaggagccgtccctcccgttgtttcatttaatctggggtctcttggatttctcacttcacatccatttgaggacttcaggcaagacctcaaacgagtcatccatgggaataacacgctagatggggtttatataactcttcgaatgcgtcttcgttgcgaaatctatcgtaaaggcaaagcaatgcctggtaaagtgtttgatgttctgaacgagattgttgttgatcgaggatccaacccatacctttctaagatcgaatgttatgagcacgaccgtcttatcacgaaggtacaaggcgatggagttatagtagccactcctacaggaagtactgcttattctacagcagcaggaggttccatggtgcatccaaacgttccttgcatgctgttcactccaatctgcccacattccctgtcgttcagaccagttatacttccagattctgcaaaactcgagttaaagattccagatgatgctcgaagcaatgcatgggtttcgtttgatggaaagagaagacaacaactttcaaggggagattcggtgagaatatacatgagccaacatccactcccaactgtcaacaaatctgatcaaaccggtgattggtttagaagcttaatccgttgcttaaactggaacgagcgtcttgatcaaaaggctctctgatgattgattggttcattttagtaaaaagcatcaacaaatacataaacatagggtcacaggtctgtttgtagtatccagccctccctctttactgtacagattcataatctctataattcactacaaagggaaaccattactgaagaaaatattcatctttttcttccttttatcagtttttcccctcaggtaataaaattgattacagtgtgtatac

SEQ ID NO: 91866 - protein, 985 aa, Arabidopsis thaliana
  peptide (1)..(985): Ceres Seq. ID no. 12729807
  misc_feature (642)..(822): Homolog of NCBI NO: 37589440 NR Description: Unknown (protein for MGC:68997) [Xenopus laevis]
  misc_feature (829)..(982): Homolog of NCBI NO: 37589440 NR Description: Unknown (protein for MGC:68997) [Xenopus laevis]
  misc_feature (669)..(834): Homolog of NCBI NO: 8480400 NR Description: Putative inorganic polyphosphate/ATP-NAD kinase
  misc_feature (669)..(834): Homolog of NCBI NO: 10434887 NR Description: unnamed protein product [Homo sapiens]
  misc_feature (669)..(834): Homolog of NCBI NO: 12804579 NR Description: Similar to hypothetical protein FLJ13052 [Homo
  misc_feature (829)..(982): Homolog of NCBI NO: 8480400 NR Description: Putative inorganic polyphosphate/ATP-NAD kinase
  misc_feature (829)..(982): Homolog of NCBI NO: 10434887 NR Description: unnamed protein product [Homo sapiens]
  misc_feature (829)..(982): Homolog of NCBI NO: 12804579 NR Description: Similar to hypothetical protein FLJ13052 [Homo
  misc_feature (829)..(982): Homolog of NCBI NO: 20070326 NR Description: NAD kinase [Homo sapiens]
  misc_feature (701)..(834): Homolog of NCBI NO: 20070326 NR Description: NAD kinase [Homo sapiens]
MFLCFCPCHVPIMSRLSPATGISSRLRFSIGLSSDGRLIPFGFRFRRNDVPFKRRLRFVIRAQLSEAFSPDLGLDSQAVKSRDTSNLPWIGPVPGDIAEVEAYCRIFRSAERLHGALMETLCNPVTGECRVPYDFSPEEKPLLEDKIVSVLGCILSLLNKGRKEILSGRSSSMNSFNLDDVGVAEESLPPLAVFRGEMKRCCESLHIALENYLTPDDERSGIVWRKLQKLKNVCYDAGFPRSDNYPCQTLFANWDPIYSSNTKEDIDSYESEIAFWRGGQVTQEGLKWLIENGFKTIVDLRAEIVKDTFYQTALDDAISLGKITVVQIPIDVRMAPKAEQVELFASIVSDSSKRPIYVHSKEGVWRTSAMVSRWKQYMTRPITKEIPVSEESKRREVSETKLGSNAVVSGKGVPDEQTDKVSEINEVDSRSASSQSKESGRFEGDTSASEFNMVSDPLKSQVPPGNIFSRKEMSKFLKSKSIAPAGYLTNPSKILGTVPTPQFSYTGVTNGNQIVDKDSIRRLAETGNSNGTLLPTSSQSLDFGNGKFSNGNVHASDNTNKSISDNRGNGFSAAPIAVPPSDNLSRAVGSHSVRESQTQRNNSGSSSDSSDDEAGAIEGNMCASATGVVRVQSRKKAEMFLVRTDGVSCTREKVTESSLAFTHPSTQQQMLLWKTTPKTVLLLKKLGQELMEEAKEAASFLYHQENMNVLVEPEVHDVFARIPGFGFVQTFYIQDTSDLHERVDFVACLGGDGVILHASNLFKGAVPPVVSFNLGSLGFLTSHPFEDFRQDLKRVIHGNNTLDGVYITLRMRLRCEIYRKGKAMPGKVFDVLNEIVVDRGSNPYLSKIECYEHDRLITKVQGDGVIVATPTGSTAYSTAAGGSMVHPNVPCMLFTPICPHSLSFRPVILPDSAKLELKIPDDARSNAWVSFDGKRRQQLSRGDSVRIYMSQHPLPTVNKSDQTGDWFRSLIRCLNWNERLDQKAL

SEQ ID NO: 91867 - protein, 973 aa, Arabidopsis thaliana
  peptide (1)..(973): Ceres Seq. ID no. 12729808
  misc_feature (630)..(810): Homolog of NCBI NO: 37589440 NR Description: Unknown (protein for MGC:68997) [Xenopus laevis]
  misc_feature (817)..(970): Homolog of NCBI NO: 37589440 NR Description: Unknown (protein for MGC:68997) [Xenopus laevis]
  misc_feature (657)..(822): Homolog of NCBI NO: 8480400 NR Description: Putative inorganic polyphosphate/ATP-NAD kinase
  misc_feature (657)..(822): Homolog of NCBI NO: 10434887 NR Description: unnamed protein product [Homo sapiens]
  misc_feature (657)..(822): Homolog of NCBI NO: 12804579 NR Description: Similar to hypothetical protein FLJ13052 [Homo
  misc_feature (817)..(970): Homolog of NCBI NO: 8480400 NR Description: Putative inorganic polyphosphate/ATP-NAD kinase
  misc_feature (817)..(970): Homolog of NCBI NO: 10434887 NR Description: unnamed protein product [Homo sapiens]
  misc_feature (817)..(970): Homolog of NCBI NO: 12804579 NR Description: Similar to hypothetical protein FLJ13052 [Homo
  misc_feature (817)..(970): Homolog of NCBI NO: 20070326 NR Description: NAD kinase [Homo sapiens]
  misc_feature (689)..(822): Homolog of NCBI NO: 20070326 NR Description: NAD kinase [Homo sapiens]
MSRLSPATGISSRLRFSIGLSSDGRLIPFGFRFRRNDVPFKRRLRFVIRAQLSEAFSPDLGLDSQAVKSRDTSNLPWIGPVPGDIAEVEAYCRIFRSAERLHGALMETLCNPVTGECRVPYDFSPEEKPLLEDKIVSVLGCILSLLNKGRKEILSGRSSSMNSFNLDDVGVAEESLPPLAVFRGEMKRCCESLHIALENYLTPDDERSGIVWRKLQKLKNVCYDAGFPRSDNYPCQTLFANWDPIYSSNTKEDIDSYESEIAFWRGGQVTQEGLKWLIENGFKTIVDLRAEIVKDTFYQTALDDAISLGKITVVQIPIDVRMAPKAEQVELFASIVSDSSKRPIYVHSKEGVWRTSAMVSRWKQYMTRPITKEIPVSEESKRREVSETKLGSNAVVSGKGVPDEQTDKVSEINEVDSRSASSQSKESGRFEGDTSASEFNMVSDPLKSQVPPGNIFSRKEMSKFLKSKSIAPAGYLTNPSKILGTVPTPQFSYTGVTNGNQIVDKDSIRRLAETGNSNGTLLPTSSQSLDFGNGKFSNGNVHASDNTNKSISDNRGNGFSAAPIAVPPSDNLSRAVGSHSVRESQTQRNNSGSSSDSSDDEAGAIEGNMCASATGVVRVQSRKKAEMFLVRTDGVSCTREKVTESSLAFTHPSTQQQMLLWKTTPKTVLLLKKLGQELMEEAKEAASFLYHQENMNVLVEPEVHDVFARIPGFGFVQTFYIQDTSDLHERVDFVACLGGDGVILHASNLFKGAVPPVVSFNLGSLGFLTSHPFEDFRQDLKRVIHGNNTLDGVYITLRMRLRCEIYRKGKAMPGKVFDVLNEIVVDRGSNPYLSKIECYEHDRLITKVQGDGVIVATPTGSTAYSTAAGGSMVHPNVPCMLFTPICPHSLSFRPVILPDSAKLELKIPDDARSNAWVSFDGKRRQQLSRGDSVRIYMSQHPLPTVNKSDQTGDWFRSLIRCLNWNERLDQKAL

SEQ ID NO: 91868 - protein, 868 aa, Arabidopsis thaliana
  peptide (1)..(868): Ceres Seq. ID no. 12729809
  misc_feature (525)..(705): Homolog of NCBI NO: 37589440 NR Description: Unknown (protein for MGC:68997) [Xenopus laevis]
  misc_feature (712)..(865): Homolog of NCBI NO: 37589440 NR Description: Unknown (protein for MGC:68997) [Xenopus laevis]
  misc_feature (552)..(717): Homolog of NCBI NO: 8480400 NR Description: Putative inorganic polyphosphate/ATP-NAD kinase
  misc_feature (552)..(717): Homolog of NCBI NO: 12804579 NR Description: Similar to hypothetical protein FLJ13052 [Homo
  misc_feature (552)..(717): Homolog of NCBI NO: 10434887 NR Description: unnamed protein product [Homo sapiens]
  misc_feature (712)..(865): Homolog of NCBI NO: 8480400 NR Description: Putative inorganic polyphosphate/ATP-NAD kinase
  misc_feature (712)..(865): Homolog of NCBI NO: 10434887 NR Description: unnamed protein product [Homo sapiens]
  misc_feature (712)..(865): Homolog of NCBI NO: 12804579 NR Description: Similar to hypothetical protein FLJ13052 [Homo
  misc_feature (712)..(865): Homolog of NCBI NO: 20070326 NR Description: NAD kinase [Homo sapiens]
  misc_feature (584)..(717): Homolog of NCBI NO: 20070326 NR Description: NAD kinase [Homo sapiens]
METLCNPVTGECRVPYDFSPEEKPLLEDKIVSVLGCILSLLNKGRKEILSGRSSSMNSFNLDDVGVAEESLPPLAVFRGEMKRCCESLHIALENYLTPDDERSGIVWRKLQKLKNVCYDAGFPRSDNYPCQTLFANWDPIYSSNTKEDIDSYESEIAFWRGGQVTQEGLKWLIENGFKTIVDLRAEIVKDTFYQTALDDAISLGKITVVQIPIDVRMAPKAEQVELFASIVSDSSKRPIYVHSKEGVWRTSAMVSRWKQYMTRPITKEIPVSEESKRREVSETKLGSNAVVSGKGVPDEQTDKVSEINEVDSRSASSQSKESGRFEGDTSASEFNMVSDPLKSQVPPGNIFSRKEMSKFLKSKSIAPAGYLTNPSKILGTVPTPQFSYTGVTNGNQIVDKDSIRRLAETGNSNGTLLPTSSQSLDFGNGKFSNGNVHASDNTNKSISDNRGNGFSAAPIAVPPSDNLSRAVGSHSVRESQTQRNNSGSSSDSSDDEAGAIEGNMCASATGVVRVQSRKKAEMFLVRTDGVSCTREKVTESSLAFTHPSTQQQMLLWKTTPKTVLLLKKLGQELMEEAKEAASFLYHQENMNVLVEPEVHDVFARIPGFGFVQTFYIQDTSDLHERVDFVACLGGDGVILHASNLFKGAVPPVVSFNLGSLGFLTSHPFEDFRQDLKRVIHGNNTLDGVYITLRMRLRCEIYRKGKAMPGKVFDVLNEIVVDRGSNPYLSKIECYEHDRLITKVQGDGVIVATPTGSTAYSTAAGGSMVHPNVPCMLFTPICPHSLSFRPVILPDSAKLELKIPDDARSNAWVSFDGKRRQQLSRGDSVRIYMSQHPLPTVNKSDQTGDWFRSLIRCLNWNERLDQKAL

SEQ ID NO: 91869 - DNA, 792 bp, Arabidopsis thaliana
  misc_feature (1)..(792): Ceres Seq. ID no. 12729830
  misc_feature: MA Experiment ID: 20000264 Result: Up-regulated in Transcription
  misc_feature: MA Experiment 20000264 PARAMETER Experiment Name: At_Open_Flower_P Parameter: Age (day) Value: 21
  misc_feature: MA Experiment 20000264 PARAMETER Experiment Name: At_Open_Flower_P Parameter: Plant Line Value: WS
  misc_feature: MA Experiment 20000264 PARAMETER Experiment Name: At_Open_Flower_P Parameter: Tissue Value: Open Flower vs. Whole Plant
  misc_feature: MA Experiment ID: 20000265 Result: Up-regulated in Transcription
  misc_feature: MA Experiment 20000265 PARAMETER Experiment Name: At_Open_Flower_P Parameter: Age (day) Value: 21
  misc_feature: MA Experiment 20000265 PARAMETER Experiment Name: At_Open_Flower_P Parameter: Plant Line Value: WS
  misc_feature: MA Experiment 20000265 PARAMETER Experiment Name: At_Open_Flower_P Parameter: Tissue Value: Closed Flower vs. Whole Plant
  misc_feature: MA Experiment ID: 20000286 Result: Up-regulated in Transcription
  misc_feature: MA Experiment 20000286 PARAMETER Experiment Name: At_Open_Flower_P Parameter: Age (day) Value: 21
  misc_feature: MA Experiment 20000286 PARAMETER Experiment Name: At_Open_Flower_P Parameter: Plant Line Value: WS
  misc_feature: MA Experiment 20000286 PARAMETER Experiment Name: At_Open_Flower_P Parameter: Tissue Value: Half Open vs. Whole Plant
  misc_feature: MA Experiment ID: 20000794 Result: Up-regulated in Transcription
  misc_feature: MA Experiment 20000794 PARAMETER Experiment Name: At_Petals_P Parameter: Age (day) Value: 23-25 days
  misc_feature: MA Experiment 20000794 PARAMETER Experiment Name: At_Petals_P Parameter: Plant Line Value: WS
  misc_feature: MA Experiment 20000794 PARAMETER Experiment Name: At_Petals_P Parameter: Tissue Value: Petals vs. Whole plant
  misc_feature: MA Experiment ID: 20001910 Result: Up-regulated in Transcription
  misc_feature: MA Experiment 20001910 PARAMETER Experiment Name: At_Drought_Reproduction_P Parameter: Age (day) Value: 37
  misc_feature: MA Experiment 20001910 PARAMETER Experiment Name: At_Drought_Reproduction_P Parameter: Organism Value: A. thaliana
  misc_feature: MA Experiment 20001910 PARAMETER Experiment Name: At_Drought_Reproduction_P Parameter: Plant Line Value: WS
  misc_feature: MA Experiment 20001910 PARAMETER Experiment Name: At_Drought_Reproduction_P Parameter: Timepoint (day) Value: 7
  misc_feature: MA Experiment 20001910 PARAMETER Experiment Name: At_Drought_Reproduction_P Parameter: Tissue Value: Flowers
  misc_feature: MA Experiment 20001910 PARAMETER Experiment Name: At_Drought_Reproduction_P Parameter: Treatment Value: Drought vs. No Drought
  misc_feature: MA Experiment ID: 20001911 Result: Up-regulated in Transcription
  misc_feature: MA Experiment 20001911 PARAMETER Experiment Name: At_Drought_Reproduction_P Parameter: Age (day) Value: 40
  misc_feature: MA Experiment 20001911 PARAMETER Experiment Name: At_Drought_Reproduction_P Parameter: Organism Value: A. thaliana
  misc_feature: MA Experiment 20001911 PARAMETER Experiment Name: At_Drought_Reproduction_P Parameter: Plant Line Value: WS
  misc_feature: MA Experiment 20001911 PARAMETER Experiment Name: At_Drought_Reproduction_P Parameter: Timepoint (day) Value: 10
  misc_feature: MA Experiment 20001911 PARAMETER Experiment Name: At_Drought_Reproduction_P Parameter: Tissue Value: Flowers
  misc_feature: MA Experiment 20001911 PARAMETER Experiment Name: At_Drought_Reproduction_P Parameter: Treatment Value: Drought vs. No Drought
atgtttgggtttttcaaatctccggggaacaataaacttcccaatgaatcatcaaacaacaaaggaggaacaatcactgcaggaagaaggacttcttcagaaccaatcctgataacaccagatttcgacgatgacgacaaatacaagaacggtttcaacgattctggtggtctgcagagccaaacgacagaagaattagaaaaatatgcagtttataaagctgaagaaacaaccaaaggtgttaataattgtcttaagatcgctgaagatataagatcagatggtgcaagaacgctcgaaatgttgcatcagcaaggtgaacaaatcaacaggactcatgaaatggctgttgatatggataaagatctcagtcggggggagaagcttttgaacaacttaggaggaatgttttcaaagccatggaaaccaaagaagactaaaaatatcacaggacctatgatcacaccagataaaccgtcgaagaagagcgagaatcacaaggaagagcgggagaaacttggtttgggtgcaaaaggacgatcgagcagtcaaccagcattagatcaaccaacaaatgcgttgcagaaagttgagcaagagaaggcaaagcaagacgatggactttcagatttaagtgacatattgggtgatcttaagagcatggccgttgatatgggatctgagatcgacaagcaaaacaaagctcttgatcatctcggcgacgatgttgatgagcttaactctcgtgttcaaggagctaatcaacgggcacgtcacttgctttccaaataa

SEQ ID NO: 91870 - protein, 263 aa, Arabidopsis thaliana
  peptide (1)..(263): Ceres Seq. ID no. 12729831
  misc_feature (203)..(263): Pfam Name: SNARE domain Pfam Description: SNARE domain
  misc_feature (1)..(263): Homolog of NCBI NO: 15222976 NR Description: synaptosomal associated protein (SNAP25A), protein id: At1g13890.1 [Arabidopsis thaliana]
  misc_feature (16)..(263): Homolog of NCBI NO: 15240163 NR Description: syntaxin SNAP33; protein id: At5g61210.1, by cDNA: 14562., supported by cDNA: gi_16323046 [Arabidopsis >gi|27805727|sp|Q9S7P9|SN33_ARATH SNAP25 homologous protein
  misc_feature (16)..(263): Homolog of NCBI NO: 21553460 NR Description: snap25a [Arabidopsis thaliana]
  misc_feature (13)..(263): Homolog of NCBI NO: 32308074 NR Description: SNAP-34 [Hordeum vulgare subsp. vulgare]
  misc_feature (30)..(263): Homolog of NCBI NO: 15241436 NR Description: SNAP25 - like protein; protein id: At5g07880.1 thaliana] >gi|27805728|sp|Q9SD96|SN29_ARATH SNAP25 homologous
  misc_feature (64)..(261): Homolog of NCBI NO: 6755588 NR Description: synaptosomal-associated protein;
  misc_feature (64)..(261): Homolog of NCBI NO: 18765733 NR Description: synaptosomal-associated protein 25 isoform
  misc_feature (66)..(263): Homolog of NCBI NO: 29378329 NR Description: synaptosomal-associated 25 protein isoform A
  misc_feature (54)..(261): Homolog of NCBI NO: 40555928 NR Description: synaptosomal-associated protein 25 [Lateolabrax
  misc_feature (64)..(261): Homolog of NCBI NO: 17737875 NR Description: Synapse protein 24 CG9474-PA [Drosophila
MFGFFKSPGNNKLPNESSNNKGGTITAGRRTSSEPILITPDFDDDDKYKNGFNDSGGLQSQTTEELEKYAVYKAEETTKGVNNCLKIAEDIRSDGARTLEMLHQQGEQINRTHEMAVDMDKDLSRGEKLLNNLGGMFSKPWKPKKTKNITGPMITPDKPSKKSENHKEEREKLGLGAKGRSSSQPALDQPTNALQKVEQEKAKQDDGLSDLSDILGDLKSMAVDMGSEIDKQNKALDHLGDDVDELNSRVQGANQRARHLLSK

SEQ ID NO: 91871 - protein, 163 aa, Arabidopsis thaliana
  peptide (1)..(163): Ceres Seq. ID no. 12729832
  misc_feature (103)..(163): Pfam Name: SNARE domain Pfam Description: SNARE domain
  misc_feature (1)..(163): Homolog of NCBI NO: 15222976 NR Description: synaptosomal associated protein (SNAP25A), protein id: At1g13890.1 [Arabidopsis thaliana]
  misc_feature (1)..(163): Homolog of NCBI NO: 15240163 NR Description: syntaxin SNAP33; protein id: At5g61210.1, by cDNA: 14562., supported by cDNA: gi_16323046 [Arabidopsis >gi|27805727|sp|Q9S7P9|SN33_ARATH SNAP25 homologous protein
  misc_feature (1)..(163): Homolog of NCBI NO: 21553460 NR Description: snap25a [Arabidopsis thaliana]
  misc_feature (1)..(163): Homolog of NCBI NO: 32308074 NR Description: SNAP-34 [Hordeum vulgare subsp. vulgare]
  misc_feature (1)..(163): Homolog of NCBI NO: 15241436 NR Description: SNAP25 - like protein; protein id: At5g07880.1 thaliana] >gi|27805728|sp|Q9SD96|SN29_ARATH SNAP25 homologous
  misc_feature (1)..(161): Homolog of NCBI NO: 6755588 NR Description: synaptosomal-associated protein;
  misc_feature (1)..(161): Homolog of NCBI NO: 18765733 NR Description: synaptosomal-associated protein 25 isoform
  misc_feature (1)..(163): Homolog of NCBI NO: 29378329 NR Description: synaptosomal-associated 25 protein isoform A
  misc_feature (1)..(161): Homolog of NCBI NO: 40555928 NR Description: synaptosomal-associated protein 25 [Lateolabrax
  misc_feature (1)..(161): Homolog of NCBI NO: 17737875 NR Description: Synapse protein 24 CG9474-PA [Drosophila
MLHQQGEQINRTHEMAVDMDKDLSRGEKLLNNLGGMFSKPWKPKKTKNITGPMITPDKPSKKSENHKEEREKLGLGAKGRSSSQPALDQPTNALQKVEQEKAKQDDGLSDLSDILGDLKSMAVDMGSEIDKQNKALDHLGDDVDELNSRVQGANQRARHLLSK

SEQ ID NO: 91872 - protein, 149 aa, Arabidopsis thaliana
  peptide (1)..(149): Ceres Seq. ID no. 12729833
  misc_feature (89)..(149): Pfam Name: SNARE domain Pfam Description: SNARE domain
  misc_feature (1)..(149): Homolog of NCBI NO: 15222976 NR Description: synaptosomal associated protein (SNAP25A), protein id: At1g13890.1 [Arabidopsis thaliana]
  misc_feature (1)..(149): Homolog of NCBI NO: 15240163 NR Description: syntaxin SNAP33; protein id: At5g61210.1, by cDNA: 14562., supported by cDNA: gi_16323046 [Arabidopsis >gi|27805727|sp|Q9S7P9|SN33_ARATH SNAP25 homologous protein
  misc_feature (1)..(149): Homolog of NCBI NO: 21553460 NR Description: snap25a [Arabidopsis thaliana]
  misc_feature (1)..(149): Homolog of NCBI NO: 32308074 NR Description: SNAP-34 [Hordeum vulgare subsp. vulgare]
  misc_feature (1)..(149): Homolog of NCBI NO: 15241436 NR Description: SNAP25 - like protein; protein id: At5g07880.1 thaliana] >gi|27805728|sp|Q9SD96|SN29_ARATH SNAP25 homologous
  misc_feature (1)..(147): Homolog of NCBI NO: 6755588 NR Description: synaptosomal-associated protein;
  misc_feature (1)..(147): Homolog of NCBI NO: 18765733 NR Description: synaptosomal-associated protein 25 isoform
  misc_feature (1)..(149): Homolog of NCBI NO: 29378329 NR Description: synaptosomal-associated 25 protein isoform A
  misc_feature (1)..(147): Homolog of NCBI NO: 40555928 NR Description: synaptosomal-associated protein 25 [Lateolabrax
  misc_feature (1)..(147): Homolog of NCBI NO: 17737875 NR Description: Synapse protein 24 CG9474-PA [Drosophila
MAVDMDKDLSRGEKLLNNLGGMFSKPWKPKKTKNITGPMITPDKPSKKSENHKEEREKLGLGAKGRSSSQPALDQPTNALQKVEQEKAKQDDGLSDLSDILGDLKSMAVDMGSEIDKQNKALDHLGDDVDELNSRVQGANQRARHLLSK

SEQ ID NO: 91873 - DNA, 705 bp, Arabidopsis thaliana
  misc_feature (1)..(705): Ceres Seq. ID no. 12729850
  misc_feature: MA Experiment ID: 20000286 Result: Down-regulated in Transcription
  misc_feature: MA Experiment 20000286 PARAMETER Experiment Name: At_Open_Flower_P Parameter: Age (day) Value: 21
  misc_feature: MA Experiment 20000286 PARAMETER Experiment Name: At_Open_Flower_P Parameter: Plant Line Value: WS
  misc_feature: MA Experiment 20000286 PARAMETER Experiment Name: At_Open_Flower_P Parameter: Tissue Value: Half Open vs. Whole Plant
  misc_feature: MA Experiment ID: 20000794 Result: Down-regulated in Transcription
  misc_feature: MA Experiment 20000794 PARAMETER Experiment Name: At_Petals_P Parameter: Age (day) Value: 23-25 days
  misc_feature: MA Experiment 20000794 PARAMETER Experiment Name: At_Petals_P Parameter: Plant Line Value: WS
  misc_feature: MA Experiment 20000794 PARAMETER Experiment Name: At_Petals_P Parameter: Tissue Value: Petals vs. Whole plant
  misc_feature: MA Experiment ID: 20001451 Result: Up-regulated in Transcription
  misc_feature: MA Experiment 20001451 PARAMETER Experiment Name: At_Far-red-induction_P Parameter: Age (day) Value: 7
  misc_feature: MA Experiment 20001451 PARAMETER Experiment Name: At_Far-red-induction_P Parameter: Light Value: Far-red vs. White
  misc_feature: MA Experiment 20001451 PARAMETER Experiment Name: At_Far-red-induction_P Parameter: Organism Value: A. thaliana
  misc_feature: MA Experiment 20001451 PARAMETER Experiment Name: At_Far-red-induction_P Parameter: Plant Line Value: Columbia
  misc_feature: MA Experiment 20001451 PARAMETER Experiment Name: At_Far-red-induction_P Parameter: Timepoint (hr) Value: 24
  misc_feature: MA Experiment 20001451 PARAMETER Experiment Name: At_Far-red-induction_P Parameter: Tissue Value: Whole Plant
  misc_feature: MA Experiment ID: 20001905 Result: Down-regulated in Transcription
  misc_feature: MA Experiment 20001905 PARAMETER Experiment Name: At_Drought_Reproduction_P Parameter: Age (day) Value: 40
  misc_feature: MA Experiment 20001905 PARAMETER Experiment Name: At_Drought_Reproduction_P Parameter: Organism Value: A. thaliana
  misc_feature: MA Experiment 20001905 PARAMETER Experiment Name: At_Drought_Reproduction_P Parameter: Plant Line Value: WS
  misc_feature: MA Experiment 20001905 PARAMETER Experiment Name: At_Drought_Reproduction_P Parameter: Timepoint (day) Value: 10
  misc_feature: MA Experiment 20001905 PARAMETER Experiment Name: At_Drought_Reproduction_P Parameter: Tissue Value: Rosettes
  misc_feature: MA Experiment 20001905 PARAMETER Experiment Name: At_Drought_Reproduction_P Parameter: Treatment Value: Drought vs. No Drought
ctgttaccaaaaaatctgtaccgcaaaatcctcgtcgaagctcgctgctgcaaccatgtccgacgaggagcatcactttgagtccagtgacgccggagcgtccaaaacctaccctcaacaagctggaaccatccgtaagaatggttacatcgtcatcaaaaatcgtccctgcaaggttgttgaggtttcaacctcgaagactggcaagcatggtcatgctaaatgtcattttgtagctattgatatcttcaccagcaagaaactcgaagatattgttccttcttcccacaattgtgatgttcctcatgtcaaccgtactgattatcagctgattgacatttctgaagatggatatgtcagtttgttgactgataacggtagtaccaaggatgaccttaagctccctaatgatgacactctgctccaacagatcaagagtgggtttgatgatggaaaagatctagtggtgagtgtgatgtcagctatgggagaggaacagatcaatgctcttaaggacatcggtcccaagtgagactaacaaagcctcccctttgttatgagattcttcttcttcttctgtaggcttccattactcatcggagattatcttgtttttgggtgactcctattttggatatttaaacttttgttaataatgccatcttcttcaaccttttccttctagatggtttttatacttcttct

SEQ ID NO: 91874 - protein, 176 aa, Arabidopsis thaliana
  peptide (1)..(176): Ceres Seq. ID no. 12729851
  misc_feature (102)..(171): Pfam Name: Eukaryotic initiation factor 5A hypusine, Pfam Description: Eukaryotic initiation factor 5A hypusine,
  misc_feature (19)..(176): Homolog of NCBI NO: 15223002 NR Description: initiation factor 5A-4; protein id: At1g13950.1, by cDNA: gi_12407784, supported by cDNA: gi_17380799 [Arabidopsis
  misc_feature (59)..(176): Homolog of NCBI NO: 8778393 NR Description: F16A14.17 [Arabidopsis thaliana]
  misc_feature (19)..(59): Homolog of NCBI NO: 8778393 NR Description: F16A14.17 [Arabidopsis thaliana]
  misc_feature (19)..(176): Homolog of NCBI NO: 20138664 NR Description: Eukaryotic translation initiation factor 5A-2
  misc_feature (19)..(176): Homolog of NCBI NO: 3024021 NR Description: Eukaryotic translation initiation factor 5A-4
  misc_feature (19)..(176): Homolog of NCBI NO: 20138706 NR Description: Eukaryotic translation initiation factor 5A-3
  misc_feature (19)..(176): Homolog of NCBI NO: 33325117 NR Description: eukaryotic translation initiation factor 5A
  misc_feature (19)..(176): Homolog of NCBI NO: 3024022 NR Description: Eukaryotic translation initiation factor 5A-5
  misc_feature (19)..(176): Homolog of NCBI NO: 20138705 NR Description: Eukaryotic translation initiation factor 5A-4
  misc_feature (19)..(176): Homolog of NCBI NO: 15222317 NR Description: Eukaryotic initiation factor 5A , putative; id: At1g69410.1, supported by cDNA: 30884., supported by cDNA: supported by cDNA: gi_16974502 [Arabidopsis thaliana] putative
CYQKICTAKSSSKLAAATMSDEEHHFESSDAGASKTYPQQAGTIRKNGYIVIKNRPCKVVEVSTSKTGKHGHAKCHFVAIDIFTSKKLEDIVPSSHNCDVPHVNRTDYQLIDISEDGYVSLLTDNGSTKDDLKLPNDDTLLQQIKSGFDDGKDLVVSVMSAMGEEQINALKDIGPK

SEQ ID NO: 91875 - protein, 158 aa, Arabidopsis thaliana
  peptide (1)..(158): Ceres Seq. ID no. 12729852
  misc_feature (84)..(153): Pfam Name: Eukaryotic initiation factor 5A hypusine, Pfam Description: Eukaryotic initiation factor 5A hypusine,
  misc_feature (1)..(158): Homolog of NCBI NO: 15223002 NR Description: initiation factor 5A-4; protein id: At1g13950.1, by cDNA: gi_12407784, supported by cDNA: gi_17380799 [Arabidopsis
  misc_feature (41)..(158): Homolog of NCBI NO: 8778393 NR Description: F16A14.17 [Arabidopsis thaliana]
  misc_feature (1)..(41): Homolog of NCBI NO: 8778393 NR Description: F16A14.17 [Arabidopsis thaliana]
  misc_feature (1)..(158): Homolog of NCBI NO: 20138664 NR Description: Eukaryotic translation initiation factor 5A-2
  misc_feature (1)..(158): Homolog of NCBI NO: 3024021 NR Description: Eukaryotic translation initiation factor 5A-4
  misc_feature (1)..(158): Homolog of NCBI NO: 20138706 NR Description: Eukaryotic translation initiation factor 5A-3
  misc_feature (1)..(158): Homolog of NCBI NO: 33325117 NR Description: eukaryotic translation initiation factor 5A
  misc_feature (1)..(158): Homolog of NCBI NO: 3024022 NR Description: Eukaryotic translation initiation factor 5A-5
  misc_feature (1)..(158): Homolog of NCBI NO: 20138705 NR Description: Eukaryotic translation initiation factor 5A-4
  misc_feature (1)..(158): Homolog of NCBI NO: 15222317 NR Description: Eukaryotic initiation factor 5A , putative; id: At1g69410.1, supported by cDNA: 30884., supported by cDNA: supported by cDNA: gi_16974502 [Arabidopsis thaliana] putative
MSDEEHHFESSDAGASKTYPQQAGTIRKNGYIVIKNRPCKVVEVSTSKTGKHGHAKCHFVAIDIFTSKKLEDIVPSSHNCDVPHVNRTDYQLIDISEDGYVSLLTDNGSTKDDLKLPNDDTLLQQIKSGFDDGKDLVVSVMSAMGEEQINALKDIGPK

SEQ ID NO: 91876 - DNA, 1467 bp, Arabidopsis thaliana
  misc_feature (1)..(1467): Ceres Seq. ID no. 12729861
  misc_feature: MA Experiment ID: 20000173 Result: Down-regulated in Transcription
  misc_feature: MA Experiment 20000173 PARAMETER Experiment Name: At_42deg_Heat_P Parameter: Age (day) Value: 14
  misc_feature: MA Experiment 20000173 PARAMETER Experiment Name: At_42deg_Heat_P Parameter: Organism Value: A. thaliana
  misc_feature: MA Experiment 20000173 PARAMETER Experiment Name: At_42deg_Heat_P Parameter: Plant Line Value: WS
  misc_feature: MA Experiment 20000173 PARAMETER Experiment Name: At_42deg_Heat_P Parameter: Temperature (deg C) Value: 42 vs. 22
  misc_feature: MA Experiment 20000173 PARAMETER Experiment Name: At_42deg_Heat_P Parameter: Timepoint (hr) Value: 6
  misc_feature: MA Experiment 20000173 PARAMETER Experiment Name: At_42deg_Heat_P Parameter: Tissue Value: Aerial
  misc_feature: MA Experiment ID: 20000180 Result: Up-regulated in Transcription
  misc_feature: MA Experiment 20000180 PARAMETER Experiment Name: At_Germinating_Seeds_P Parameter: Age (hr) Value: 24 vs. 0
  misc_feature: MA Experiment 20000180 PARAMETER Experiment Name: At_Germinating_Seeds_P Parameter: Tissue Value: Germinating Seeds
  misc_feature: MA Experiment ID: 20000182 Result: Up-regulated in Transcription
  misc_feature: MA Experiment 20000182 PARAMETER Experiment Name: At_2mM_SA_P Parameter: Age (day) Value: 14
  misc_feature: MA Experiment 20000182 PARAMETER Experiment Name: At_2mM_SA_P Parameter: Organism Value: A. thaliana
  misc_feature: MA Experiment 20000182 PARAMETER Experiment Name: At_2mM_SA_P Parameter: Plant Line Value: WS
  misc_feature: MA Experiment 20000182 PARAMETER Experiment Name: At_2mM_SA_P Parameter: Timepoint (hr) Value: 6
  misc_feature: MA Experiment 20000182 PARAMETER Experiment Name: At_2mM_SA_P Parameter: Tissue Value: Aerial
  misc_feature: MA Experiment 20000182 PARAMETER Experiment Name: At_2mM_SA_P Parameter: Treatment Value: 2mM SA vs. No Treatment
  misc_feature: MA Experiment ID: 20000184 Result: Down-regulated in Transcription
  misc_feature: MA Experiment 20000184 PARAMETER Experiment Name: At_Shoots__P Parameter: Age (day) Value: 7
  misc_feature: MA Experiment 20000184 PARAMETER Experiment Name: At_Shoots__P Parameter: Tissue Value: Shoots vs. Whole Plant
  misc_feature: MA Experiment ID: 20000185 Result: Up-regulated in Transcription
  misc_feature: MA Experiment 20000185 PARAMETER Experiment Name: At_Roots__P Parameter: Age (day) Value: 7 vs. 21
  misc_feature: MA Experiment 20000185 PARAMETER Experiment Name: At_Roots__P Parameter: Organism Value: A. thaliana
  misc_feature: MA Experiment 20000185 PARAMETER Experiment Name: At_Roots__P Parameter: Tissue Value: Roots vs. Whole Plant
  misc_feature: MA Experiment ID: 20000438 Result: Down-regulated in Transcription
  misc_feature: MA Experiment 20000438 PARAMETER Experiment Name: At_Shoots__P Parameter: Age (day) Value: 14
  misc_feature: MA Experiment 20000438 PARAMETER Experiment Name: At_Shoots__P Parameter: Tissue Value: Shoots vs. Whole Plant
  misc_feature: MA Experiment ID: 20000439 Result: Up-regulated in Transcription
  misc_feature: MA Experiment 20000439 PARAMETER Experiment Name: At_Roots__P Parameter: Age (day) Value: 14 vs. 21
  misc_feature: MA Experiment 20000439 PARAMETER Experiment Name: At_Roots__P Parameter: Organism Value: A. thaliana
  misc_feature: MA Experiment 20000439 PARAMETER Experiment Name: At_Roots__P Parameter: Tissue Value: Roots vs. Whole Plant
  misc_feature: MA Experiment ID: 20000453 Result: Up-regulated in Transcription
  misc_feature: MA Experiment 20000453 PARAMETER Experiment Name: At_100uM_ABA_P Parameter: Age (day) Value: 15
  misc_feature: MA Experiment 20000453 PARAMETER Experiment Name: At_100uM_ABA_P Parameter: Organism Value: A. thaliana
  misc_feature: MA Experiment 20000453 PARAMETER Experiment Name: At_100uM_ABA_P Parameter: Plant Line Value: WS
  misc_feature: MA Experiment 20000453 PARAMETER Experiment Name: At_100uM_ABA_P Parameter: Timepoint (hr) Value: 24
  misc_feature: MA Experiment 20000453 PARAMETER Experiment Name: At_100uM_ABA_P Parameter: Tissue Value: Aerial
  misc_feature: MA Experiment 20000453 PARAMETER Experiment Name: At_100uM_ABA_P Parameter: Treatment Value: 100uM ABA vs. No Treatment
  misc_feature: MA Experiment ID: 20000527 Result: Down-regulated in Transcription
  misc_feature: MA Experiment 20000527 PARAMETER Experiment Name: At_10percent_PEG_P Parameter: Age (day) Value: 20
  misc_feature: MA Experiment 20000527 PARAMETER Experiment Name: At_10percent_PEG_P Parameter: Organism Value: A. thaliana
  misc_feature: MA Experiment 20000527 PARAMETER Experiment Name: At_10percent_PEG_P Parameter: Plant Line Value: WS
  misc_feature: MA Experiment 20000527 PARAMETER Experiment Name: At_10percent_PEG_P Parameter: Timepoint (day) Value: 20
  misc_feature: MA Experiment 20000527 PARAMETER Experiment Name: At_10percent_PEG_P Parameter: Tissue Value: Whole Plant
  misc_feature: MA Experiment 20000527 PARAMETER Experiment Name: At_10percent_PEG_P Parameter: Treatment Value: 10percent PEG vs. No Treatment
  misc_feature: MA Experiment ID: 20000574 Result: Up-regulated in Transcription
  misc_feature: MA Experiment 20000574 PARAMETER Experiment Name: At_100uM_ABA_Mutants__P Parameter: Organism Value: A. thaliana
  misc_feature: MA Experiment 20000574 PARAMETER Experiment Name: At_100uM_ABA_Mutants__P Parameter: Plant Line Value: CS23 vs. Ler wt
  misc_feature: MA Experiment 20000574 PARAMETER Experiment Name: At_100uM_ABA_Mutants__P Parameter: Timepoint (hr) Value: N/A
  misc_feature: MA Experiment 20000574 PARAMETER Experiment Name: At_100uM_ABA_Mutants__P Parameter: Tissue Value: Whole Plant
  misc_feature: MA Experiment 20000574 PARAMETER Experiment Name: At_100uM_ABA_Mutants__P Parameter: Treatment Value: None
  misc_feature: MA Experiment ID: 20001248 Result: Down-regulated in Transcription
  misc_feature: MA Experiment 20001248 PARAMETER Experiment Name: At_Far-red-induction_P Parameter: Age (day) Value: 7
  misc_feature: MA Experiment 20001248 PARAMETER Experiment Name: At_Far-red-induction_P Parameter: Light Value: Far-red vs. White
  misc_feature: MA Experiment 20001248 PARAMETER Experiment Name: At_Far-red-induction_P Parameter: Organism Value: A. thaliana
  misc_feature: MA Experiment 20001248 PARAMETER Experiment Name: At_Far-red-induction_P Parameter: Plant Line Value: Columbia
  misc_feature: MA Experiment 20001248 PARAMETER Experiment Name: At_Far-red-induction_P Parameter: Timepoint (hr) Value: 4
  misc_feature: MA Experiment 20001248 PARAMETER Experiment Name: At_Far-red-induction_P Parameter: Tissue Value: Whole Plant
  misc_feature: MA Experiment ID: 20001450 Result: Down-regulated in Transcription
  misc_feature: MA Experiment 20001450 PARAMETER Experiment Name: At_Far-red-induction_P Parameter: Age (day) Value: 7
  misc_feature: MA Experiment 20001450 PARAMETER Experiment Name: At_Far-red-induction_P Parameter: Light Value: Far-red vs. White
  misc_feature: MA Experiment 20001450 PARAMETER Experiment Name: At_Far-red-induction_P Parameter: Organism Value: A. thaliana
  misc_feature: MA Experiment 20001450 PARAMETER Experiment Name: At_Far-red-induction_P Parameter: Plant Line Value: Columbia
  misc_feature: MA Experiment 20001450 PARAMETER Experiment Name: At_Far-red-induction_P Parameter: Timepoint (hr) Value: 8
  misc_feature: MA Experiment 20001450 PARAMETER Experiment Name: At_Far-red-induction_P Parameter: Tissue Value: Whole Plant
  misc_feature: MA Experiment ID: 20001451 Result: Down-regulated in Transcription
  misc_feature: MA Experiment 20001451 PARAMETER Experiment Name: At_Far-red-induction_P Parameter: Age (day) Value: 7
  misc_feature: MA Experiment 20001451 PARAMETER Experiment Name: At_Far-red-induction_P Parameter: Light Value: Far-red vs. White
  misc_feature: MA Experiment 20001451 PARAMETER Experiment Name: At_Far-red-induction_P Parameter: Organism Value: A. thaliana
  misc_feature: MA Experiment 20001451 PARAMETER Experiment Name: At_Far-red-induction_P Parameter: Plant Line Value: Columbia
  misc_feature: MA Experiment 20001451 PARAMETER Experiment Name: At_Far-red-induction_P Parameter: Timepoint (hr) Value: 24
  misc_feature: MA Experiment 20001451 PARAMETER Experiment Name: At_Far-red-induction_P Parameter: Tissue Value: Whole Plant
  misc_feature: MA Experiment ID: 20001554 Result: Up-regulated in Transcription
  misc_feature: MA Experiment 20001554 PARAMETER Experiment Name: At_Drought_Soil_Dry_P Parameter: Age (day) Value: 21
  misc_feature: MA Experiment 20001554 PARAMETER Experiment Name: At_Drought_Soil_Dry_P Parameter: Organism Value: A. thaliana
  misc_feature: MA Experiment 20001554 PARAMETER Experiment Name: At_Drought_Soil_Dry_P Parameter: Plant Line Value: WS
  misc_feature: MA Experiment 20001554 PARAMETER Experiment Name: At_Drought_Soil_Dry_P Parameter: Post Timepoint (hr) Value: None
  misc_feature: MA Experiment 20001554 PARAMETER Experiment Name: At_Drought_Soil_Dry_P Parameter: Post-Treatment Value: None
  misc_feature: MA Experiment 20001554 PARAMETER Experiment Name: At_Drought_Soil_Dry_P Parameter: Timepoint (day) Value: 7
  misc_feature: MA Experiment 20001554 PARAMETER Experiment Name: At_Drought_Soil_Dry_P Parameter: Treatment Value: Drought vs. No Drought
  misc_feature: MA Experiment ID: 20001558 Result: Down-regulated in Transcription
  misc_feature: MA Experiment 20001558 PARAMETER Experiment Name: At_Drought_Soil_Dry_P Parameter: Age (day) Value: 27
  misc_feature: MA Experiment 20001558 PARAMETER Experiment Name: At_Drought_Soil_Dry_P Parameter: Organism Value: A. thaliana
  misc_feature: MA Experiment 20001558 PARAMETER Experiment Name: At_Drought_Soil_Dry_P Parameter: Plant Line Value: WS
  misc_feature: MA Experiment 20001558 PARAMETER Experiment Name: At_Drought_Soil_Dry_P Parameter: Post Timepoint (hr) Value: 6
  misc_feature: MA Experiment 20001558 PARAMETER Experiment Name: At_Drought_Soil_Dry_P Parameter: Post-Treatment Value: Re-Water vs. No Drought
  misc_feature: MA Experiment 20001558 PARAMETER Experiment Name: At_Drought_Soil_Dry_P Parameter: Timepoint (day) Value: 13
  misc_feature: MA Experiment 20001558 PARAMETER Experiment Name: At_Drought_Soil_Dry_P Parameter: Treatment Value: Drought vs. No Drought
atgcggaggatagctgccggaatccaccggctcgggatccgccacggagacgtcgtaatgcttctcctcccgaactcgccggagtttgctctgtcttttcttgccgttgcttaccttggagccgtttccactaccgcgaatccgttctacactcagccggagatcgctaaacaggctaaagcctccgccgcgaagatgatcatcacgaagaaatgtttagtcgataaactaacaaacctcaaaaacgacggcgttttgatcgtttgcctagacgatgacggtgacaacggcgttgtttcgtcgagtgatgatggttgcgtgagtttcacggaactgactcaagcggacgaaacagaacttctaaaacctaaaatatcgccggaagacacggtggcgatgccgtactcttccggaacaacgggacttccaaagggagtgatgattactcacaagggtttagttacaagcatcgctcagaaagtcgacggagaaaaccctaaccttaacttcacggccaatgacgtcatcctctgttttctcccaatgtttcacatttacgctctcgacgcgttgatgctttcggcgatgagaaccggtgcagcgttactgatcgtgccgaggttcgagttgaatctggtgatggagctgattcaaaggtacaaagtcacggttgtgccggtggctcctccggtggttttagcattcattaaatcccctgagacggagagatacgacttgagctcggtgagaattatgctatcaggtgcagctacactaaagaaggagcttgaagacgccgtgcgactcaagtttcctaatgccatttttggtcagggttatggaatgaccgagtccggaacggtagctaagtcattagcgtttgcaaagaacccatttaaaaccaagtccggtgcatgtgggactgtgatcagaaacgccgagatgaaagtggtcgataccgaaaccggaatctccttgccgcgcaacaaatctggcgagatctgcgtccgaggtcatcagctcatgaaaggttatttgaatgatccggaagctactgcacgaaccatagacaaagacgggtggttacatacaggagatattgggtttgtggatgatgatgatgagatcttcattgttgatcggttgaaggaactgatcaaattcaaaggctaccaagtggctccagctgagcttgaagcattgcttatttctcatccttctatcgatgatgccgcagttgttgcaatgaaggatgaagtagctgatgaggttccagtagcatttgtagcaagatctcaagggtctcagttaactgaagatgatgtcaagagttacgtaaacaaacaggtggttcactacaagcggattaagatggtgtttttcatagaagttataccaaaagcagtttcgggcaagattctgaggaaggatctgcgagctaaattggaaaccatgtgctctaaatag

SEQ ID NO: 91877 - protein, 488 aa, Arabidopsis thaliana
  peptide (1)..(488): Ceres Seq. ID no. 12729862
  misc_feature (1)..(413): Pfam Name: AMP-binding enzyme Pfam Description: AMP-binding enzyme
  misc_feature (1)..(488): Homolog of NCBI NO: 9280225 NR Description: 4-coumarate:CoA ligase [Arabidopsis thaliana]
  misc_feature (1)..(488): Homolog of NCBI NO: 22331239 NR Description: putative 4-coumarate:CoA ligase 2; protein id: supported by cDNA: gi_20465257 [Arabidopsis thaliana]
  misc_feature (1)..(488): Homolog of NCBI NO: 29888158 NR Description: 4-coumarate-CoA ligase-like protein [Arabidopsis
  misc_feature (2)..(482): Homolog of NCBI NO: 15218002 NR Description: 4-coumarate:CoA ligase 1; protein id: supported by cDNA: gi_20466561, supported by cDNA: gi_609339
  misc_feature (2)..(482): Homolog of NCBI NO: 15232507 NR Description: putative 4-coumarate:CoA ligase 2; protein id: supported by cDNA: gi_20466457, supported by cDNA: gi_5702187
  misc_feature (2)..(482): Homolog of NCBI NO: 12229665 NR Description: 4-coumarate--CoA ligase 2 (4CL 2)
  misc_feature (2)..(482): Homolog of NCBI NO: 12229632 NR Description: 4-coumarate--CoA ligase 2 (4CL 2)
  misc_feature (2)..(482): Homolog of NCBI NO: 9651915 NR Description: 4-coumarate:coA ligase 2 [Rubus idaeus]
  misc_feature (2)..(482): Homolog of NCBI NO: 12229631 NR Description: 4-coumarate--CoA ligase 1 (4CL 1)
  misc_feature (2)..(482): Homolog of NCBI NO: 18032806 NR Description: 4-coumarate:CoA ligase [Populus tomentosa]
MRRIAAGIHRLGIRHGDVVMLLLPNSPEFALSFLAVAYLGAVSTTANPFYTQPEIAKQAKASAAKMIITKKCLVDKLTNLKNDGVLIVCLDDDGDNGVVSSSDDGCVSFTELTQADETELLKPKISPEDTVAMPYSSGTTGLPKGVMITHKGLVTSIAQKVDGENPNLNFTANDVILCFLPMFHIYALDALMLSAMRTGAALLIVPRFELNLVMELIQRYKVTVVPVAPPVVLAFIKSPETERYDLSSVRIMLSGAATLKKELEDAVRLKFPNAIFGQGYGMTESGTVAKSLAFAKNPFKTKSGACGTVIRNAEMKVVDTETGISLPRNKSGEICVRGHQLMKGYLNDPEATARTIDKDGWLHTGDIGFVDDDDEIFIVDRLKELIKFKGYQVAPAELEALLISHPSIDDAAVVAMKDEVADEVPVAFVARSQGSQLTEDDVKSYVNKQVVHYKRIKMVFFIEVIPKAVSGKILRKDLRAKLETMCSK

SEQ ID NO: 91878 - protein, 469 aa, Arabidopsis thaliana
  peptide (1)..(469): Ceres Seq. ID no. 12729863
  misc_feature (1)..(394): Pfam Name: AMP-binding enzyme Pfam Description: AMP-binding enzyme
  misc_feature (1)..(469): Homolog of NCBI NO: 9280225 NR Description: 4-coumarate:CoA ligase [Arabidopsis thaliana]
  misc_feature (1)..(469): Homolog of NCBI NO: 22331239 NR Description: putative 4-coumarate:CoA ligase 2; protein id: supported by cDNA: gi_20465257 [Arabidopsis thaliana]
  misc_feature (1)..(469): Homolog of NCBI NO: 29888158 NR Description: 4-coumarate-CoA ligase-like protein [Arabidopsis
  misc_feature (1)..(463): Homolog of NCBI NO: 15218002 NR Description: 4-coumarate:CoA ligase 1; protein id: supported by cDNA: gi_20466561, supported by cDNA: gi_609339
  misc_feature (1)..(463): Homolog of NCBI NO: 15232507 NR Description: putative 4-coumarate:CoA ligase 2; protein id: supported by cDNA: gi_20466457, supported by cDNA: gi_5702187
  misc_feature (1)..(463): Homolog of NCBI NO: 12229665 NR Description: 4-coumarate--CoA ligase 2 (4CL 2)
  misc_feature (1)..(463): Homolog of NCBI NO: 12229632 NR Description: 4-coumarate--CoA ligase 2 (4CL 2)
  misc_feature (1)..(463): Homolog of NCBI NO: 9651915 NR Description: 4-coumarate:coA ligase 2 [Rubus idaeus]
  misc_feature (1)..(463): Homolog of NCBI NO: 12229631 NR Description: 4-coumarate--CoA ligase 1 (4CL 1)
  misc_feature (1)..(463): Homolog of NCBI NO: 18032806 NR Description: 4-coumarate:CoA ligase [Populus tomentosa]
MLLLPNSPEFALSFLAVAYLGAVSTTANPFYTQPEIAKQAKASAAKMIITKKCLVDKLTNLKNDGVLIVCLDDDGDNGVVSSSDDGCVSFTELTQADETELLKPKISPEDTVAMPYSSGTTGLPKGVMITHKGLVTSIAQKVDGENPNLNFTANDVILCFLPMFHIYALDALMLSAMRTGAALLIVPRFELNLVMELIQRYKVTVVPVAPPVVLAFIKSPETERYDLSSVRIMLSGAATLKKELEDAVRLKFPNAIFGQGYGMTESGTVAKSLAFAKNPFKTKSGACGTVIRNAEMKVVDTETGISLPRNKSGEICVRGHQLMKGYLNDPEATARTIDKDGWLHTGDIGFVDDDDEIFIVDRLKELIKFKGYQVAPAELEALLISHPSIDDAAVVAMKDEVADEVPVAFVARSQGSQLTEDDVKSYVNKQVVHYKRIKMVFFIEVIPKAVSGKILRKDLRAKLETMCSK

SEQ ID NO: 91879 - protein, 423 aa, Arabidopsis thaliana
  peptide (1)..(423): Ceres Seq. ID no. 12729864
  misc_feature (1)..(348): Pfam Name: AMP-binding enzyme Pfam Description: AMP-binding enzyme
  misc_feature (1)..(423): Homolog of NCBI NO: 9280225 NR Description: 4-coumarate:CoA ligase [Arabidopsis thaliana]
  misc_feature (1)..(423): Homolog of NCBI NO: 22331239 NR Description: putative 4-coumarate:CoA ligase 2; protein id: supported by cDNA: gi_20465257 [Arabidopsis thaliana]
  misc_feature (1)..(423): Homolog of NCBI NO: 29888158 NR Description: 4-coumarate-CoA ligase-like protein [Arabidopsis
  misc_feature (1)..(417): Homolog of NCBI NO: 15218002 NR Description: 4-coumarate:CoA ligase 1; protein id: supported by cDNA: gi_20466561, supported by cDNA: gi_609339
  misc_feature (1)..(417): Homolog of NCBI NO: 15232507 NR Description: putative 4-coumarate:CoA ligase 2; protein id: supported by cDNA: gi_20466457, supported by cDNA: gi_5702187
  misc_feature (1)..(417): Homolog of NCBI NO: 12229665 NR Description: 4-coumarate--CoA ligase 2 (4CL 2)
  misc_feature (1)..(417): Homolog of NCBI NO: 12229632 NR Description: 4-coumarate--CoA ligase 2 (4CL 2)
  misc_feature (1)..(417): Homolog of NCBI NO: 9651915 NR Description: 4-coumarate:coA ligase 2 [Rubus idaeus]
  misc_feature (1)..(417): Homolog of NCBI NO: 12229631 NR Description: 4-coumarate--CoA ligase 1 (4CL 1)
  misc_feature (1)..(417): Homolog of NCBI NO: 18032806 NR Description: 4-coumarate:CoA ligase [Populus tomentosa]
MIITKKCLVDKLTNLKNDGVLIVCLDDDGDNGVVSSSDDGCVSFTELTQADETELLKPKISPEDTVAMPYSSGTTGLPKGVMITHKGLVTSIAQKVDGENPNLNFTANDVILCFLPMFHIYALDALMLSAMRTGAALLIVPRFELNLVMELIQRYKVTVVPVAPPVVLAFIKSPETERYDLSSVRIMLSGAATLKKELEDAVRLKFPNAIFGQGYGMTESGTVAKSLAFAKNPFKTKSGACGTVIRNAEMKVVDTETGISLPRNKSGEICVRGHQLMKGYLNDPEATARTIDKDGWLHTGDIGFVDDDDEIFIVDRLKELIKFKGYQVAPAELEALLISHPSIDDAAVVAMKDEVADEVPVAFVARSQGSQLTEDDVKSYVNKQVVHYKRIKMVFFIEVIPKAVSGKILRKDLRAKLETMCSK

SEQ ID NO: 91880 - DNA, 1943 bp, Arabidopsis thaliana
  misc_feature (1)..(1943): Ceres Seq. ID no. 12729865
  misc_feature: MA Experiment ID: 20000185 Result: Up-regulated in Transcription
  misc_feature: MA Experiment 20000185 PARAMETER Experiment Name: At_Roots__P Parameter: Age (day) Value: 7 vs. 21
  misc_feature: MA Experiment 20000185 PARAMETER Experiment Name: At_Roots__P Parameter: Organism Value: A. thaliana
  misc_feature: MA Experiment 20000185 PARAMETER Experiment Name: At_Roots__P Parameter: Tissue Value: Roots vs. Whole Plant
  misc_feature: MA Experiment ID: 20000439 Result: Up-regulated in Transcription
  misc_feature: MA Experiment 20000439 PARAMETER Experiment Name: At_Roots__P Parameter: Age (day) Value: 14 vs. 21
  misc_feature: MA Experiment 20000439 PARAMETER Experiment Name: At_Roots__P Parameter: Organism Value: A. thaliana
  misc_feature: MA Experiment 20000439 PARAMETER Experiment Name: At_Roots__P Parameter: Tissue Value: Roots vs. Whole Plant
  misc_feature: MA Experiment ID: 20001248 Result: Down-regulated in Transcription
  misc_feature: MA Experiment 20001248 PARAMETER Experiment Name: At_Far-red-induction_P Parameter: Age (day) Value: 7
  misc_feature: MA Experiment 20001248 PARAMETER Experiment Name: At_Far-red-induction_P Parameter: Light Value: Far-red vs. White
  misc_feature: MA Experiment 20001248 PARAMETER Experiment Name: At_Far-red-induction_P Parameter: Organism Value: A. thaliana
  misc_feature: MA Experiment 20001248 PARAMETER Experiment Name: At_Far-red-induction_P Parameter: Plant Line Value: Columbia
  misc_feature: MA Experiment 20001248 PARAMETER Experiment Name: At_Far-red-induction_P Parameter: Timepoint (hr) Value: 4
  misc_feature: MA Experiment 20001248 PARAMETER Experiment Name: At_Far-red-induction_P Parameter: Tissue Value: Whole Plant
caaacgttactttccaaaacaatcttttcagttttagataaaaatttgatattaacttctgattcatgacgacacaagatgtgatagtcaatgatcagaatgatcagaaacagtgtagtaatgacgtcattttccgatcgagattgcctgatatatacatccctaaccacctcccactccacgactacatcttcgaaaatatctcagagttcgccgctaagccatgcttgatcaacggtcccaccggcgaagtatacacctacgccgatgtccacgtaacatctcggaaactcgccgccggtcttcataacctcggcgtgaagcaacacgacgttgtaatgatcctcctcccgaactctcctgaagtagtcctcactttccttgccgcctccttcatcggcgcaatcaccacctccgcgaacccgttcttcactccggcggagatttctaaacaagccaaagcctccgcggcgaaactcatcgtcactcaatcccgttacgtcgataaaatcaagaacctccaaaacgacggcgttttgatcgtcaccaccgactccgacgccatccccgaaaactgcctccgtttctccgagttaactcagtccgaagaaccacgagtggactcaataccggagaagatttcgccagaagacgtcgtggcgcttcctttctcatccggcacgacgggtctccccaaaggagtgatgctaacacacaaaggtctagtcacgagcgtggcgcagcaagtcgacggcgagaatccgaatctttacttcaacagagacgacgtgatcctctgtgtcttgcctatgttccatatatacgctctcaactccatcatgctctgtagtctcagagttggtgccacgatcttgataatgcctaagttcgaaatcactctcttgttagagcagatacaaaggtgtaaagtcacggtggctatggtcgtgccaccgatcgttttagctatcgcgaagtcgccggagacggagaagtatgatctgagctcggttaggatggttaagtctggagcagctcctcttggtaaggagcttgaagatgctattagtgctaagtttcctaacgccaagcttggtcagggctatgggatgacagaagcaggtccggtgctagcaatgtcgttagggtttgctaaagagccgtttccagtgaagtcaggagcatgtggtacggtggtgaggaacgccgagatgaagatacttgatccagacacaggagattctttgcctaggaacaaacccggcgaaatatgcatccgtggcaaccaaatcatgaaaggctatctcaatgaccccttggccacggcatcgacgatcgataaagatggttggcttcacactggagacgtcggatttatcgatgatgacgacgagcttttcattgtggatagattgaaagaactcatcaagtacaaaggatttcaagtggctccagctgagctagagtctctcctcataggtcatccagaaatcaatgatgttgctgtcgtcgccatgaaggaagaagatgctggtgaggttcctgttgcgtttgtggtgagatcgaaagattcaaatatatccgaagatgaaatcaagcaattcgtgtcaaaacaggttgtgttttataagagaatcaacaaagtgttcttcactgactctattcctaaagctccatcagggaagatattgaggaaggatctaagagcaagactagcaaatggattaatgaactaggttttatatgatccacgtatatgaatgcaatcttatcagaaaaatgaaacaaaatttcgttttgtgaacaaaggaattaaacttacacgtaaaagaataatatttgtgctttttcctttatgtgtatgtaatggataaatagttgtatcttttgtttggtgggaatgatgtaacctttccatattgtggcatattgctcgaatataa

SEQ ID NO: 91881 - protein, 556 aa, Arabidopsis thaliana
  peptide (1)..(556): Ceres Seq. ID no. 12729866
  misc_feature (65)..(481): Pfam Name: AMP-binding enzyme Pfam Description: AMP-binding enzyme
  misc_feature (1)..(556): Homolog of NCBI NO: 15232507 NR Description: putative 4-coumarate:CoA ligase 2; protein id: supported by cDNA: gi_20466457, supported by cDNA: gi_5702187
  misc_feature (1)..(556): Homolog of NCBI NO: 12229665 NR Description: 4-coumarate--CoA ligase 2 (4CL 2)
  misc_feature (1)..(554): Homolog of NCBI NO: 15218002 NR Description: 4-coumarate:CoA ligase 1; protein id: supported by cDNA: gi_20466561, supported by cDNA: gi_609339
  misc_feature (11)..(556): Homolog of NCBI NO: 12229632 NR Description: 4-coumarate--CoA ligase 2 (4CL 2)
  misc_feature (13)..(556): Homolog of NCBI NO: 9651915 NR Description: 4-coumarate:coA ligase 2 [Rubus idaeus]
  misc_feature (11)..(553): Homolog of NCBI NO: 7437854 NR Description: 4-coumarate-CoA ligase (EC 6.2.1.12) 1
  misc_feature (13)..(556): Homolog of NCBI NO: 12229631 NR Description: 4-coumarate--CoA ligase 1 (4CL 1)
  misc_feature (13)..(556): Homolog of NCBI NO: 398963 NR Description: 4-coumarate--CoA ligase 1 (4CL 1)
  misc_feature (13)..(556): Homolog of NCBI NO: 398965 NR Description: 4-coumarate--CoA ligase 2 (4CL 2)
  misc_feature (11)..(556): Homolog of NCBI NO: 7428495 NR Description: 4-coumarate-CoA ligase (EC 6.2.1.12) - common
MTTQDVIVNDQNDQKQCSNDVIFRSRLPDIYIPNHLPLHDYIFENISEFAAKPCLINGPTGEVYTYADVHVTSRKLAAGLHNLGVKQHDVVMILLPNSPEVVLTFLAASFIGAITTSANPFFTPAEISKQAKASAAKLIVTQSRYVDKIKNLQNDGVLIVTTDSDAIPENCLRFSELTQSEEPRVDSIPEKISPEDVVALPFSSGTTGLPKGVMLTHKGLVTSVAQQVDGENPNLYFNRDDVILCVLPMFHIYALNSIMLCSLRVGATILIMPKFEITLLLEQIQRCKVTVAMVVPPIVLAIAKSPETEKYDLSSVRMVKSGAAPLGKELEDAISAKFPNAKLGQGYGMTEAGPVLAMSLGFAKEPFPVKSGACGTVVRNAEMKILDPDTGDSLPRNKPGEICIRGNQIMKGYLNDPLATASTIDKDGWLHTGDVGFIDDDDELFIVDRLKELIKYKGFQVAPAELESLLIGHPEINDVAVVAMKEEDAGEVPVAFVVRSKDSNISEDEIKQFVSKQVVFYKRINKVFFTDSIPKAPSGKILRKDLRARLANGLMN

SEQ ID NO: 91882 - protein, 465 aa, Arabidopsis thaliana
  peptide (1)..(465): Ceres Seq. ID no. 12729867
  misc_feature (1)..(390): Pfam Name: AMP-binding enzyme Pfam Description: AMP-binding enzyme
  misc_feature (1)..(465): Homolog of NCBI NO: 15232507 NR Description: putative 4-coumarate:CoA ligase 2; protein id: supported by cDNA: gi_20466457, supported by cDNA: gi_5702187
  misc_feature (1)..(465): Homolog of NCBI NO: 12229665 NR Description: 4-coumarate--CoA ligase 2 (4CL 2)
  misc_feature (1)..(463): Homolog of NCBI NO: 15218002 NR Description: 4-coumarate:CoA ligase 1; protein id: supported by cDNA: gi_20466561, supported by cDNA: gi_609339
  misc_feature (1)..(465): Homolog of NCBI NO: 12229632 NR Description: 4-coumarate--CoA ligase 2 (4CL 2)
  misc_feature (1)..(465): Homolog of NCBI NO: 9651915 NR Description: 4-coumarate:coA ligase 2 [Rubus idaeus]
  misc_feature (1)..(462): Homolog of NCBI NO: 7437854 NR Description: 4-coumarate-CoA ligase (EC 6.2.1.12) 1
  misc_feature (1)..(465): Homolog of NCBI NO: 12229631 NR Description: 4-coumarate--CoA ligase 1 (4CL 1)
  misc_feature (1)..(465): Homolog of NCBI NO: 398963 NR Description: 4-coumarate--CoA ligase 1 (4CL 1)
  misc_feature (1)..(465): Homolog of NCBI NO: 398965 NR Description: 4-coumarate--CoA ligase 2 (4CL 2)
  misc_feature (1)..(465): Homolog of NCBI NO: 7428495 NR Description: 4-coumarate-CoA ligase (EC 6.2.1.12) - common
MILLPNSPEVVLTFLAASFIGAITTSANPFFTPAEISKQAKASAAKLIVTQSRYVDKIKNLQNDGVLIVTTDSDAIPENCLRFSELTQSEEPRVDSIPEKISPEDVVALPFSSGTTGLPKGVMLTHKGLVTSVAQQVDGENPNLYFNRDDVILCVLPMFHIYALNSIMLCSLRVGATILIMPKFEITLLLEQIQRCKVTVAMVVPPIVLAIAKSPETEKYDLSSVRMVKSGAAPLGKELEDAISAKFPNAKLGQGYGMTEAGPVLAMSLGFAKEPFPVKSGACGTVVRNAEMKILDPDTGDSLPRNKPGEICIRGNQIMKGYLNDPLATASTIDKDGWLHTGDVGFIDDDDELFIVDRLKELIKYKGFQVAPAELESLLIGHPEINDVAVVAMKEEDAGEVPVAFVVRSKDSNISEDEIKQFVSKQVVFYKRINKVFFTDSIPKAPSGKILRKDLRARLANGLMN

SEQ ID NO: 91883 - protein, 343 aa, Arabidopsis thaliana
  peptide (1)..(343): Ceres Seq. ID no. 12729868
  misc_feature (1)..(268): Pfam Name: AMP-binding enzyme Pfam Description: AMP-binding enzyme
  misc_feature (1)..(343): Homolog of NCBI NO: 15232507 NR Description: putative 4-coumarate:CoA ligase 2; protein id: supported by cDNA: gi_20466457, supported by cDNA: gi_5702187
  misc_feature (1)..(343): Homolog of NCBI NO: 12229665 NR Description: 4-coumarate--CoA ligase 2 (4CL 2)
  misc_feature (1)..(341): Homolog of NCBI NO: 15218002 NR Description: 4-coumarate:CoA ligase 1; protein id: supported by cDNA: gi_20466561, supported by cDNA: gi_609339
  misc_feature (1)..(343): Homolog of NCBI NO: 12229632 NR Description: 4-coumarate--CoA ligase 2 (4CL 2)
  misc_feature (1)..(343): Homolog of NCBI NO: 9651915 NR Description: 4-coumarate:coA ligase 2 [Rubus idaeus]
  misc_feature (1)..(340): Homolog of NCBI NO: 7437854 NR Description: 4-coumarate-CoA ligase (EC 6.2.1.12) 1
  misc_feature (1)..(343): Homolog of NCBI NO: 12229631 NR Description: 4-coumarate--CoA ligase 1 (4CL 1)
  misc_feature (1)..(343): Homolog of NCBI NO: 398963 NR Description: 4-coumarate--CoA ligase 1 (4CL 1)
  misc_feature (1)..(343): Homolog of NCBI NO: 398965 NR Description: 4-coumarate--CoA ligase 2 (4CL 2)
  misc_feature (1)..(343): Homolog of NCBI NO: 7428495 NR Description: 4-coumarate-CoA ligase (EC 6.2.1.12) - common
MLTHKGLVTSVAQQVDGENPNLYFNRDDVILCVLPMFHIYALNSIMLCSLRVGATILIMPKFEITLLLEQIQRCKVTVAMVVPPIVLAIAKSPETEKYDLSSVRMVKSGAAPLGKELEDAISAKFPNAKLGQGYGMTEAGPVLAMSLGFAKEPFPVKSGACGTVVRNAEMKILDPDTGDSLPRNKPGEICIRGNQIMKGYLNDPLATASTIDKDGWLHTGDVGFIDDDDELFIVDRLKELIKYKGFQVAPAELESLLIGHPEINDVAVVAMKEEDAGEVPVAFVVRSKDSNISEDEIKQFVSKQVVFYKRINKVFFTDSIPKAPSGKILRKDLRARLANGLMN

SEQ ID NO: 91884 - DNA, 1889 bp, Arabidopsis thaliana
  misc_feature (1)..(1889): Ceres Seq. ID no. 12729881
  misc_feature: MA Experiment ID: 20000179 Result: Down-regulated in Transcription
  misc_feature: MA Experiment 20000179 PARAMETER Experiment Name: At_Germinating_Seeds_P Parameter: Age (hr) Value: 6 vs. 0
  misc_feature: MA Experiment 20000179 PARAMETER Experiment Name: At_Germinating_Seeds_P Parameter: Tissue Value: Germinating Seeds
  misc_feature: MA Experiment ID: 20000180 Result: Down-regulated in Transcription
  misc_feature: MA Experiment 20000180 PARAMETER Experiment Name: At_Germinating_Seeds_P Parameter: Age (hr) Value: 24 vs. 0
  misc_feature: MA Experiment 20000180 PARAMETER Experiment Name: At_Germinating_Seeds_P Parameter: Tissue Value: Germinating Seeds
  misc_feature: MA Experiment ID: 20000437 Result: Up-regulated in Transcription
  misc_feature: MA Experiment 20000437 PARAMETER Experiment Name: At_Drought_P Parameter: Age (day) Value: 8
  misc_feature: MA Experiment 20000437 PARAMETER Experiment Name: At_Drought_P Parameter: Organism Value: A. thaliana
  misc_feature: MA Experiment 20000437 PARAMETER Experiment Name: At_Drought_P Parameter: Plant Line Value: WS
  misc_feature: MA Experiment 20000437 PARAMETER Experiment Name: At_Drought_P Parameter: Timepoint (hr) Value: 24
  misc_feature: MA Experiment 20000437 PARAMETER Experiment Name: At_Drought_P Parameter: Tissue Value: Whole Plant
  misc_feature: MA Experiment 20000437 PARAMETER Experiment Name: At_Drought_P Parameter: Treatment Value: Drought vs. No Drought
aacatagtcttccactttgttttgaactttttgaccaaaaacacactcgtgagcttataaaaaaaaatcaacaatgaagattcctctcttggggttacttttactaataagtcttgtcggctctccgacaagggctgaagaaggacctgtttgcccgaagaccgaaactcttagccgtgcaagttttccggagggctttatgtttggtaccgcaaccgcagcctttcaggtggaaggtgcagtaaatgaaggttgcagaggtccaagcctgtgggacatctacaccaagaaatttccacatagagttaagaatcacaatgctgacgaggccgtcgatttctaccatcgctacaaggaggatatccagttgatgaaaaagctgaacactgatggttttagactttctatttcgtggccaagaatatttcctcatgggaggatggagaaaggaataagcaaagaaggagttcaattttaccacgatcttattgatgagctccttaaaaatgacataacaccattagtaacggtttttcattgggatactcccgccgatttggaagatgaatacggtggctttttaagcgaacgtattgtgcctgattttgtggagtatgcaaacttcacgttccacgagtatggggacaaagtgaaaaactggattacgttcaacgagccatgggtctttagccgttcgggctacgacgttgggaagaaagcaccaggacgttgttctccttacgtcaaagagtttggaaagctttgtcaagatggacggtcaggattcgaaccttatgttgtcagtcacaatttactcgtgggtcatgctgaagctgttgatgctttccgaaaatgcgaaaagtgcaaaggtggtaaaatcggaatcgctcatagtccagcttggtttgaacccgaagatgtggaaggaggtcaagcgactgtaaaccgtgtgcttgatttcgtcattggctggcatttggatcctaccacgttcggggactatcctcagtctatgaaagacgcggttggatctcggttgccaagatttaccaaagcccaaaaggcaaaactgaaagattcgacagacttcgtgggaataaactattacacttccttctttgcaaaggctgaccagaaggttgatagtcggaacccgacttgggctacagatgctctagtcgaatttgaaccgaagactgtggatggatccattaaaattggtagccagcccaacactgctaagatggctgtctacgctaagggtttgaggaagctcatgaaatacattaaggacagatacaacagccctgagatcataatcactgagaatggctacggggaggaccttggcgataaagatacagatcttagcgttgctctcaacgaccacaacaggaaatactatctccagaggcatcttttggcactgaatgaagctatatgtgaagacaaggtgaatgttacatcgtatttcttgtggtctttaatggacaacttcgagtggcaagacgggtacacagctaggttcggagtttactacatagacttcaagaacaacttgactcgtatggagaaagaatccgcaaaatggctttctgaattcctcaaaccaggcctgaaaccatctaagtcctcaaagctacacgaggagctctgagtcgagtttctttgcaagatcttaaagcaaaagcttcaatcccgcggacaataaaagaaggacgacgagtttgtctttggtttcttcttatgttgtatagtttctgctgcagtgtagttaagacatgtttagaataaggaaatgggttactatgtacccacatatatgtatccaaaatatgtacagtgttgttgttgcctctaaattcgaaatccaaagctttgatttatgc

SEQ ID NO: 91885 - protein, 527 aa, Arabidopsis thaliana
  peptide (1)..(527): Ceres Seq. ID no. 12729882
  misc_feature (1)..(527): Homolog of NCBI NO: 22331243 NR Description: glycosyl hydrolase family 1; protein id: supported by cDNA: gi_16604492, supported by cDNA: gi_17381179,
  misc_feature (1)..(527): Homolog of NCBI NO: 16604493 NR Description: AT3g21370/MHC9_5 [Arabidopsis thaliana]
  misc_feature (1)..(504): Homolog of NCBI NO: 1076442 NR Description: beta-glucosidase (EC 3.2.1.21) - rape
  misc_feature (5)..(527): Homolog of NCBI NO: 12043529 NR Description: beta-glucosidase 1 [Arabidopsis thaliana]
  misc_feature (5)..(527): Homolog of NCBI NO: 15218992 NR Description: glycosyl hydrolase family 1, beta-glucosidase protein id: At1g52400.1, supported by cDNA: gi_14532461,
  misc_feature (5)..(527): Homolog of NCBI NO: 12229686 NR Description: Beta-glucosidase homolog precursor
  misc_feature (5)..(527): Homolog of NCBI NO: 23397037 NR Description: putative beta-glucosidase [Arabidopsis thaliana]
  misc_feature (2)..(516): Homolog of NCBI NO: 25289457 NR Description: probable beta-glucosidase (EC 3.2.1.21) ATA27 - Arabidopsis thaliana >gi|2746341|gb|AAC39504.1| ATA27
  misc_feature (2)..(516): Homolog of NCBI NO: 15222905 NR Description: glycosyl hydrolase family 1, protein id: At1g75940.1, supported by cDNA: gi_2746340
  misc_feature (2)..(516): Homolog of NCBI NO: 25404995 NR Description: protein T4O12.15 [imported] - Arabidopsis >gi|8778810|gb|AAF26759.2|AC007396_8 T4O12.15 [Arabidopsis
MKIPLLGLLLLISLVGSPTRAEEGPVCPKTETLSRASFPEGFMFGTATAAFQVEGAVNEGCRGPSLWDIYTKKFPHRVKNHNADEAVDFYHRYKEDIQLMKKLNTDGFRLSISWPRIFPHGRMEKGISKEGVQFYHDLIDELLKNDITPLVTVFHWDTPADLEDEYGGFLSERIVPDFVEYANFTFHEYGDKVKNWITFNEPWVFSRSGYDVGKKAPGRCSPYVKEFGKLCQDGRSGFEPYVVSHNLLVGHAEAVDAFRKCEKCKGGKIGIAHSPAWFEPEDVEGGQATVNRVLDFVIGWHLDPTTFGDYPQSMKDAVGSRLPRFTKAQKAKLKDSTDFVGINYYTSFFAKADQKVDSRNPTWATDALVEFEPKTVDGSIKIGSQPNTAKMAVYAKGLRKLMKYIKDRYNSPEIIITENGYGEDLGDKDTDLSVALNDHNRKYYLQRHLLALNEAICEDKVNVTSYFLWSLMDNFEWQDGYTARFGVYYIDFKNNLTRMEKESAKWLSEFLKPGLKPSKSSKLHEEL

SEQ ID NO: 91886 - protein, 485 aa, Arabidopsis thaliana
  peptide (1)..(485): Ceres Seq. ID no. 12729883
  misc_feature (1)..(485): Homolog of NCBI NO: 22331243 NR Description: glycosyl hydrolase family 1; protein id: supported by cDNA: gi_16604492, supported by cDNA: gi_17381179,
  misc_feature (1)..(485): Homolog of NCBI NO: 16604493 NR Description: AT3g21370/MHC9_5 [Arabidopsis thaliana]
  misc_feature (1)..(462): Homolog of NCBI NO: 1076442 NR Description: beta-glucosidase (EC 3.2.1.21) - rape
  misc_feature (1)..(485): Homolog of NCBI NO: 12043529 NR Description: beta-glucosidase 1 [Arabidopsis thaliana]
  misc_feature (1)..(485): Homolog of NCBI NO: 15218992 NR Description: glycosyl hydrolase family 1, beta-glucosidase protein id: At1g52400.1, supported by cDNA: gi_14532461,
  misc_feature (1)..(485): Homolog of NCBI NO: 12229686 NR Description: Beta-glucosidase homolog precursor
  misc_feature (1)..(485): Homolog of NCBI NO: 23397037 NR Description: putative beta-glucosidase [Arabidopsis thaliana]
  misc_feature (1)..(474): Homolog of NCBI NO: 25289457 NR Description: probable beta-glucosidase (EC 3.2.1.21) ATA27 - Arabidopsis thaliana >gi|2746341|gb|AAC39504.1| ATA27
  misc_feature (1)..(474): Homolog of NCBI NO: 15222905 NR Description: glycosyl hydrolase family 1, protein id: At1g75940.1, supported by cDNA: gi_2746340
  misc_feature (1)..(474): Homolog of NCBI NO: 25404995 NR Description: protein T4O12.15 [imported] - Arabidopsis >gi|8778810|gb|AAF26759.2|AC007396_8 T4O12.15 [Arabidopsis
MFGTATAAFQVEGAVNEGCRGPSLWDIYTKKFPHRVKNHNADEAVDFYHRYKEDIQLMKKLNTDGFRLSISWPRIFPHGRMEKGISKEGVQFYHDLIDELLKNDITPLVTVFHWDTPADLEDEYGGFLSERIVPDFVEYANFTFHEYGDKVKNWITFNEPWVFSRSGYDVGKKAPGRCSPYVKEFGKLCQDGRSGFEPYVVSHNLLVGHAEAVDAFRKCEKCKGGKIGIAHSPAWFEPEDVEGGQATVNRVLDFVIGWHLDPTTFGDYPQSMKDAVGSRLPRFTKAQKAKLKDSTDFVGINYYTSFFAKADQKVDSRNPTWATDALVEFEPKTVDGSIKIGSQPNTAKMAVYAKGLRKLMKYIKDRYNSPEIIITENGYGEDLGDKDTDLSVALNDHNRKYYLQRHLLALNEAICEDKVNVTSYFLWSLMDNFEWQDGYTARFGVYYIDFKNNLTRMEKESAKWLSEFLKPGLKPSKSSKLHEEL

SEQ ID NO: 91887 - protein, 428 aa, Arabidopsis thaliana
  peptide (1)..(428): Ceres Seq. ID no. 12729884
  misc_feature (1)..(428): Homolog of NCBI NO: 22331243 NR Description: glycosyl hydrolase family 1; protein id: supported by cDNA: gi_16604492, supported by cDNA: gi_17381179,
  misc_feature (1)..(428): Homolog of NCBI NO: 16604493 NR Description: AT3g21370/MHC9_5 [Arabidopsis thaliana]
  misc_feature (1)..(405): Homolog of NCBI NO: 1076442 NR Description: beta-glucosidase (EC 3.2.1.21) - rape
  misc_feature (1)..(428): Homolog of NCBI NO: 12043529 NR Description: beta-glucosidase 1 [Arabidopsis thaliana]
  misc_feature (1)..(428): Homolog of NCBI NO: 15218992 NR Description: glycosyl hydrolase family 1, beta-glucosidase protein id: At1g52400.1, supported by cDNA: gi_14532461,
  misc_feature (1)..(428): Homolog of NCBI NO: 12229686 NR Description: Beta-glucosidase homolog precursor
  misc_feature (1)..(428): Homolog of NCBI NO: 23397037 NR Description: putative beta-glucosidase [Arabidopsis thaliana]
  misc_feature (1)..(417): Homolog of NCBI NO: 25289457 NR Description: probable beta-glucosidase (EC 3.2.1.21) ATA27 - Arabidopsis thaliana >gi|2746341|gb|AAC39504.1| ATA27
  misc_feature (1)..(417): Homolog of NCBI NO: 15222905 NR Description: glycosyl hydrolase family 1, protein id: At1g75940.1, supported by cDNA: gi_2746340
  misc_feature (1)..(417): Homolog of NCBI NO: 25404995 NR Description: protein T4O12.15 [imported] - Arabidopsis >gi|8778810|gb|AAF26759.2|AC007396_8 T4O12.15 [Arabidopsis
MKKLNTDGFRLSISWPRIFPHGRMEKGISKEGVQFYHDLIDELLKNDITPLVTVFHWDTPADLEDEYGGFLSERIVPDFVEYANFTFHEYGDKVKNWITFNEPWVFSRSGYDVGKKAPGRCSPYVKEFGKLCQDGRSGFEPYVVSHNLLVGHAEAVDAFRKCEKCKGGKIGIAHSPAWFEPEDVEGGQATVNRVLDFVIGWHLDPTTFGDYPQSMKDAVGSRLPRFTKAQKAKLKDSTDFVGINYYTSFFAKADQKVDSRNPTWATDALVEFEPKTVDGSIKIGSQPNTAKMAVYAKGLRKLMKYIKDRYNSPEIIITENGYGEDLGDKDTDLSVALNDHNRKYYLQRHLLALNEAICEDKVNVTSYFLWSLMDNFEWQDGYTARFGVYYIDFKNNLTRMEKESAKWLSEFLKPGLKPSKSSKLHEEL

SEQ ID NO: 91888 - DNA, 2271 bp, Arabidopsis thaliana
  misc_feature (1)..(2271): Ceres Seq. ID no. 12729920
  misc_feature: MA Experiment ID: 20000171 Result: Up-regulated in Transcription
  misc_feature: MA Experiment 20000171 PARAMETER Experiment Name: At_42deg_Heat_P Parameter: Age (day) Value: 14
  misc_feature: MA Experiment 20000171 PARAMETER Experiment Name: At_42deg_Heat_P Parameter: Organism Value: A. thaliana
  misc_feature: MA Experiment 20000171 PARAMETER Experiment Name: At_42deg_Heat_P Parameter: Plant Line Value: WS
  misc_feature: MA Experiment 20000171 PARAMETER Experiment Name: At_42deg_Heat_P Parameter: Temperature (deg C) Value: 42 vs. 22
  misc_feature: MA Experiment 20000171 PARAMETER Experiment Name: At_42deg_Heat_P Parameter: Timepoint (hr) Value: 1
  misc_feature: MA Experiment 20000171 PARAMETER Experiment Name: At_42deg_Heat_P Parameter: Tissue Value: Aerial
  misc_feature: MA Experiment ID: 20000173 Result: Up-regulated in Transcription
  misc_feature: MA Experiment 20000173 PARAMETER Experiment Name: At_42deg_Heat_P Parameter: Age (day) Value: 14
  misc_feature: MA Experiment 20000173 PARAMETER Experiment Name: At_42deg_Heat_P Parameter: Organism Value: A. thaliana
  misc_feature: MA Experiment 20000173 PARAMETER Experiment Name: At_42deg_Heat_P Parameter: Plant Line Value: WS
  misc_feature: MA Experiment 20000173 PARAMETER Experiment Name: At_42deg_Heat_P Parameter: Temperature (deg C) Value: 42 vs. 22
  misc_feature: MA Experiment 20000173 PARAMETER Experiment Name: At_42deg_Heat_P Parameter: Timepoint (hr) Value: 6
  misc_feature: MA Experiment 20000173 PARAMETER Experiment Name: At_42deg_Heat_P Parameter: Tissue Value: Aerial
  misc_feature: MA Experiment ID: 20000185 Result: Up-regulated in Transcription
  misc_feature: MA Experiment 20000185 PARAMETER Experiment Name: At_Roots__P Parameter: Age (day) Value: 7 vs. 21
  misc_feature: MA Experiment 20000185 PARAMETER Experiment Name: At_Roots__P Parameter: Organism Value: A. thaliana
  misc_feature: MA Experiment 20000185 PARAMETER Experiment Name: At_Roots__P Parameter: Tissue Value: Roots vs. Whole Plant
  misc_feature: MA Experiment ID: 20000439 Result: Up-regulated in Transcription
  misc_feature: MA Experiment 20000439 PARAMETER Experiment Name: At_Roots__P Parameter: Age (day) Value: 14 vs. 21
  misc_feature: MA Experiment 20000439 PARAMETER Experiment Name: At_Roots__P Parameter: Organism Value: A. thaliana
  misc_feature: MA Experiment 20000439 PARAMETER Experiment Name: At_Roots__P Parameter: Tissue Value: Roots vs. Whole Plant
atggcgacactaaccgatatcggagtcgcagcaacgatcaatattctaaccgcatttgctttcttcattgcctttgcgatacttagacttcaaccagttaacgacagagtctatttccctaaatggtatctcaagggtttaagaagtagtcctataaaaacaggtggctttgctagcaagtttgtcaatttggattttcgatcttacatcagattcttgaattggatgcctcaagctttgagaatgcctgagcctgaacttattgatcatgctggtttggattctgttgtctatctcaggatttacttactcgggttgaagatcttttttcctatagcatgtattgctttcactgtaatggtaccggttaattggactaactcgacgttggatcagttaaagaatctaacttttagtgatattgataaactctctatatcgaatataccaactggatcatccaggttttgggtgcatttgtgtatggcttatgttattaccttttggacttgctttgtcctacaacgagagtacaagcatattgcttccatgaggctacagtttcttgcttctgagcataggagacctgaccagtttactgttcttgtaaggaacattcctccagatcctgatgaatcagtaagtgagctcgttgagcatttctttaaggtcaaccatccagactactacctcacttaccaggcggtctacaacgcaaacaagctgtcggaactggtacagaagaggatgaaattgcagaattggcttgattactatcaaaacaaacactctaggaatccatctaaaaggcctttaataaagattggtttccttggctgttggggtgaagaagttgatgcaattgatcactacatagaaaaaatcgagggtctaacgagaaaaataagtgaagagaaagagacagtaatgagcagcacaaaatcactcgtacctgcagcttttgtatccttcaaaaagcgttggggcgctgttgtttgctctcaaactcaacagtctcgaaacccgacagagtggctaaccgagtgggctccagagccgcgagacatatactgggacaatctagcattaccatatgttcagctcacaatccggagactagtaatagctgtagctttcttcttcctcactttcttcttcatgatccctatagctttcgtacagacactcgccaatatcgaaggcatcgaaaaggctgttccgttcttgaaaccgcttatcgaagtgaaaactgtaaagtcatttatccaaggttttcttccgggtatcgcattgaagatattcctcattgtcctcccaagtatactaatgctaatgtcgaagttcgaaggcttcataagcaaatcttcactagaaagaaggtgtgcaagcagatactacatgttccagttcatcaacgttttcctctgtagcataatcgcgggaactgcgcttcaacaacttgacagcttcctaaaccaatctgcaaccgaaataccgaagacaattggtgtctcgataccaatgaaagccactttctttatcacctacataatggtagacggatgggctggtgttgctggagagatactgaggttaaagccattgataatatatcatctcaagaacttcttccttgtgaaaacagagaaggacagagaagaagcaatggatcctggaaccataggtttcaatactggtgaacctcagatacaactctacttcattcttggtctagtttacgccgctgttagccccattctccttccttttatcctcgtcttcttcgccttagcttacgtggtttaccgtcatcagattataaatgtgtataaccaagagtatgagagtgctgcagcgttctggccagatgttcatagacgtgtagtgattgcactgatcgtatctcagcttcttttgatgggattgcttagcacgaaaaaagctgctcgttcgactccattgcttttcatacttcctgtgttaaccattggattccacaaattctgtcaaggacgttaccaacctatatttgtcacataccctttacaggatgcaatggttaaagatacgttggaacgcatgagagaaccgaatttaaacttgaaaacgtttcttcaaaacgcgtatgcacatccggtgtttaaagctgcagataatctagctaatgagatggttgtggaggagccagcgcccgataagacgccggatttagtggcgactaaacgtggctcaaggaggtttaatagcggctctgctgaaacctttacttag

SEQ ID NO: 91889 - protein, 756 aa, Arabidopsis thaliana
  peptide (1)..(756): Ceres Seq. ID no. 12729921
  misc_feature (302)..(733): Pfam Name: Domain of unknown function DUF221 Pfam Description: Domain of unknown function DUF221
  misc_feature (1)..(746): Homolog of NCBI NO: 15233476 NR Description: unknown protein; protein id: At4g04340.1, by cDNA: gi_15810532, supported by cDNA: gi_20260619 [Arabidopsis >gi|25407261|pir||H85054 hypothetical protein AT4g04340
  misc_feature (1)..(746): Homolog of NCBI NO: 15810533 NR Description: unknown protein [Arabidopsis thaliana]
  misc_feature (1)..(752): Homolog of NCBI NO: 25404887 NR Description: protein F24O1.4 [imported] - Arabidopsis thaliana
  misc_feature (1)..(752): Homolog of NCBI NO: 15220762 NR Description: hypothetical protein; protein id: At1g62320.1
  misc_feature (1)..(756): Homolog of NCBI NO: 15236212 NR Description: hypothetical protein; protein id: At4g02900.1
  misc_feature (1)..(718): Homolog of NCBI NO: 25402694 NR Description: hypothetical protein [imported] - Arabidopsis >gi|3157932|gb|AAC17615.1| Similar to hypothetical protein HYP1
  misc_feature (203)..(746): Homolog of NCBI NO: 15234725 NR Description: putative protein; protein id: At4g22120.1
  misc_feature (1)..(201): Homolog of NCBI NO: 15234725 NR Description: putative protein; protein id: At4g22120.1
  misc_feature (301)..(727): Homolog of NCBI NO: 7485199 NR Description: hypothetical protein - Arabidopsis thaliana hypothetical protein [Arabidopsis thaliana]
  misc_feature (1)..(159): Homolog of NCBI NO: 7485199 NR Description: hypothetical protein - Arabidopsis thaliana hypothetical protein [Arabidopsis thaliana]
MATLTDIGVAATINILTAFAFFIAFAILRLQPVNDRVYFPKWYLKGLRSSPIKTGGFASKFVNLDFRSYIRFLNWMPQALRMPEPELIDHAGLDSVVYLRIYLLGLKIFFPIACIAFTVMVPVNWTNSTLDQLKNLTFSDIDKLSISNIPTGSSRFWVHLCMAYVITFWTCFVLQREYKHIASMRLQFLASEHRRPDQFTVLVRNIPPDPDESVSELVEHFFKVNHPDYYLTYQAVYNANKLSELVQKRMKLQNWLDYYQNKHSRNPSKRPLIKIGFLGCWGEEVDAIDHYIEKIEGLTRKISEEKETVMSSTKSLVPAAFVSFKKRWGAVVCSQTQQSRNPTEWLTEWAPEPRDIYWDNLALPYVQLTIRRLVIAVAFFFLTFFFMIPIAFVQTLANIEGIEKAVPFLKPLIEVKTVKSFIQGFLPGIALKIFLIVLPSILMLMSKFEGFISKSSLERRCASRYYMFQFINVFLCSIIAGTALQQLDSFLNQSATEIPKTIGVSIPMKATFFITYIMVDGWAGVAGEILRLKPLIIYHLKNFFLVKTEKDREEAMDPGTIGFNTGEPQIQLYFILGLVYAAVSPILLPFILVFFALAYVVYRHQIINVYNQEYESAAAFWPDVHRRVVIALIVSQLLLMGLLSTKKAARSTPLLFILPVLTIGFHKFCQGRYQPIFVTYPLQDAMVKDTLERMREPNLNLKTFLQNAYAHPVFKAADNLANEMVVEEPAPDKTPDLVATKRGSRRFNSGSAETFT

SEQ ID NO: 91890 - protein, 681 aa, Arabidopsis thaliana
  peptide (1)..(681): Ceres Seq. ID no. 12729922
  misc_feature (227)..(658): Pfam Name: Domain of unknown function DUF221 Pfam Description: Domain of unknown function DUF221
  misc_feature (1)..(671): Homolog of NCBI NO: 15233476 NR Description: unknown protein; protein id: At4g04340.1, by cDNA: gi_15810532, supported by cDNA: gi_20260619 [Arabidopsis >gi|25407261|pir||H85054 hypothetical protein AT4g04340
  misc_feature (1)..(671): Homolog of NCBI NO: 15810533 NR Description: unknown protein [Arabidopsis thaliana]
  misc_feature (1)..(677): Homolog of NCBI NO: 25404887 NR Description: protein F24O1.4 [imported] - Arabidopsis thaliana
  misc_feature (1)..(677): Homolog of NCBI NO: 15220762 NR Description: hypothetical protein; protein id: At1g62320.1
  misc_feature (1)..(681): Homolog of NCBI NO: 15236212 NR Description: hypothetical protein; protein id: At4g02900.1
  misc_feature (1)..(643): Homolog of NCBI NO: 25402694 NR Description: hypothetical protein [imported] - Arabidopsis >gi|3157932|gb|AAC17615.1| Similar to hypothetical protein HYP1
  misc_feature (128)..(671): Homolog of NCBI NO: 15234725 NR Description: putative protein; protein id: At4g22120.1
  misc_feature (1)..(126): Homolog of NCBI NO: 15234725 NR Description: putative protein; protein id: At4g22120.1
  misc_feature (226)..(652): Homolog of NCBI NO: 7485199 NR Description: hypothetical protein - Arabidopsis thaliana hypothetical protein [Arabidopsis thaliana]
  misc_feature (1)..(84): Homolog of NCBI NO: 7485199 NR Description: hypothetical protein - Arabidopsis thaliana hypothetical protein [Arabidopsis thaliana]
MPQALRMPEPELIDHAGLDSVVYLRIYLLGLKIFFPIACIAFTVMVPVNWTNSTLDQLKNLTFSDIDKLSISNIPTGSSRFWVHLCMAYVITFWTCFVLQREYKHIASMRLQFLASEHRRPDQFTVLVRNIPPDPDESVSELVEHFFKVNHPDYYLTYQAVYNANKLSELVQKRMKLQNWLDYYQNKHSRNPSKRPLIKIGFLGCWGEEVDAIDHYIEKIEGLTRKISEEKETVMSSTKSLVPAAFVSFKKRWGAVVCSQTQQSRNPTEWLTEWAPEPRDIYWDNLALPYVQLTIRRLVIAVAFFFLTFFFMIPIAFVQTLANIEGIEKAVPFLKPLIEVKTVKSFIQGFLPGIALKIFLIVLPSILMLMSKFEGFISKSSLERRCASRYYMFQFINVFLCSIIAGTALQQLDSFLNQSATEIPKTIGVSIPMKATFFITYIMVDGWAGVAGEILRLKPLIIYHLKNFFLVKTEKDREEAMDPGTIGFNTGEPQIQLYFILGLVYAAVSPILLPFILVFFALAYVVYRHQIINVYNQEYESAAAFWPDVHRRVVIALIVSQLLLMGLLSTKKAARSTPLLFILPVLTIGFHKFCQGRYQPIFVTYPLQDAMVKDTLERMREPNLNLKTFLQNAYAHPVFKAADNLANEMVVEEPAPDKTPDLVATKRGSRRFNSGSAETFT

SEQ ID NO: 91891 - protein, 675 aa, Arabidopsis thaliana
  peptide (1)..(675): Ceres Seq. ID no. 12729923
  misc_feature (221)..(652): Pfam Name: Domain of unknown function DUF221 Pfam Description: Domain of unknown function DUF221
  misc_feature (1)..(665): Homolog of NCBI NO: 15233476 NR Description: unknown protein; protein id: At4g04340.1, by cDNA: gi_15810532, supported by cDNA: gi_20260619 [Arabidopsis >gi|25407261|pir||H85054 hypothetical protein AT4g04340
  misc_feature (1)..(665): Homolog of NCBI NO: 15810533 NR Description: unknown protein [Arabidopsis thaliana]
  misc_feature (1)..(671): Homolog of NCBI NO: 25404887 NR Description: protein F24O1.4 [imported] - Arabidopsis thaliana
  misc_feature (1)..(671): Homolog of NCBI NO: 15220762 NR Description: hypothetical protein; protein id: At1g62320.1
  misc_feature (1)..(675): Homolog of NCBI NO: 15236212 NR Description: hypothetical protein; protein id: At4g02900.1
  misc_feature (1)..(637): Homolog of NCBI NO: 25402694 NR Description: hypothetical protein [imported] - Arabidopsis >gi|3157932|gb|AAC17615.1| Similar to hypothetical protein HYP1
  misc_feature (122)..(665): Homolog of NCBI NO: 15234725 NR Description: putative protein; protein id: At4g22120.1
  misc_feature (1)..(120): Homolog of NCBI NO: 15234725 NR Description: putative protein; protein id: At4g22120.1
  misc_feature (220)..(646): Homolog of NCBI NO: 7485199 NR Description: hypothetical protein - Arabidopsis thaliana hypothetical protein [Arabidopsis thaliana]
  misc_feature (1)..(78): Homolog of NCBI NO: 7485199 NR Description: hypothetical protein - Arabidopsis thaliana hypothetical protein [Arabidopsis thaliana]
MPEPELIDHAGLDSVVYLRIYLLGLKIFFPIACIAFTVMVPVNWTNSTLDQLKNLTFSDIDKLSISNIPTGSSRFWVHLCMAYVITFWTCFVLQREYKHIASMRLQFLASEHRRPDQFTVLVRNIPPDPDESVSELVEHFFKVNHPDYYLTYQAVYNANKLSELVQKRMKLQNWLDYYQNKHSRNPSKRPLIKIGFLGCWGEEVDAIDHYIEKIEGLTRKISEEKETVMSSTKSLVPAAFVSFKKRWGAVVCSQTQQSRNPTEWLTEWAPEPRDIYWDNLALPYVQLTIRRLVIAVAFFFLTFFFMIPIAFVQTLANIEGIEKAVPFLKPLIEVKTVKSFIQGFLPGIALKIFLIVLPSILMLMSKFEGFISKSSLERRCASRYYMFQFINVFLCSIIAGTALQQLDSFLNQSATEIPKTIGVSIPMKATFFITYIMVDGWAGVAGEILRLKPLIIYHLKNFFLVKTEKDREEAMDPGTIGFNTGEPQIQLYFILGLVYAAVSPILLPFILVFFALAYVVYRHQIINVYNQEYESAAAFWPDVHRRVVIALIVSQLLLMGLLSTKKAARSTPLLFILPVLTIGFHKFCQGRYQPIFVTYPLQDAMVKDTLERMREPNLNLKTFLQNAYAHPVFKAADNLANEMVVEEPAPDKTPDLVATKRGSRRFNSGSAETFT

SEQ ID NO: 91892 - DNA, 1614 bp, Arabidopsis thaliana
  misc_feature (1)..(1614): Ceres Seq. ID no. 12729924
  misc_feature: MA Experiment ID: 108434 Result: Down-regulated in Transcription
  misc_feature: MA Experiment 108434 PARAMETER Experiment Name: At_Root_Tips_cDNA_P Parameter: Tissue Value: Root Tips
  misc_feature: MA Experiment ID: 108585 Result: Up-regulated in Transcription
  misc_feature: MA Experiment 108585 PARAMETER Experiment Name: At_5mM_NaNP_cDNA_P Parameter: Timepoint (hr) Value: 6
  misc_feature: MA Experiment 108585 PARAMETER Experiment Name: At_5mM_NaNP_cDNA_P Parameter: Tissue Value: Aerial
  misc_feature: MA Experiment 108585 PARAMETER Experiment Name: At_5mM_NaNP_cDNA_P Parameter: Treatment Value: null
  misc_feature: MA Experiment ID: 108668 Result: Up-regulated in Transcription
  misc_feature: MA Experiment 108668 PARAMETER Experiment Name: At_2mM_SA_cDNA_P Parameter: Plant Line Value: WS
  misc_feature: MA Experiment 108668 PARAMETER Experiment Name: At_2mM_SA_cDNA_P Parameter: Timepoint (hr) Value: 6
  misc_feature: MA Experiment 108668 PARAMETER Experiment Name: At_2mM_SA_cDNA_P Parameter: Treatment Value: 2mM SA vs. No Treatment
atgggctctagggttcttgtacctttcccttgcgaatgtcaacctggtgatttcctagggcacaatttcagctacagtgttcgacaggaagatacttacgaaagagtcgcgattagtaattacgcgaatctcacgacgatggagtcgttacaggcgaggaatccttttccggcgactaacatacctctctctgcgacgcttaatgtattggtgaattgttcttgtggtgatgagagtgtttcgaaagattttggtttgtttgttacgtatccgcttcgtcctgaagacagtctcagttctattgcgagatcttccggtgtatcggcggatattctgcagagatataatcccggtgttaattttaactccgggaatggaatcgtttatgtgcctggaagagatccaaatggtgcatttccaccattcaaatcaagtaaacaagatggtgttggtgctggagttattgctggtatagttataggagtgattgtggctttgttgttgatcttgtttatcgtatattatgcttaccggaagaataagtcgaagggtgattcgttttcttcttctattccgttgtctactaaggctgatcatgcttcttctactagtctccaaagtggaggtttgggtggtgccggagtgtctcctggcattgctgccataagcgtggacaaatctgttgagttttcgttggaggaactagcaaaggctactgataatttcaatttgtcttttaagattgggcaaggtggttttggggctgtttactatgcagagctgagaggagaaaaagctgcgattaagaagatggacatggaggcatcgaaacagttcttggcggaactaaaagtcttaacgcgtgtacatcatgtcaacctggttcgcctgattggatattgtgttgagggatcacttttcttggtgtatgaatatgttgagaatggtaaccttggacaacatttacatgggtcaggacgagaaccattaccgtggactaagagagtgcagattgcactagactcagctagaggtttagaatatatccacgagcacacggttccagtttatgtccatagggacattaaatctgccaatattttgatagaccagaaattccgagcaaaggtagcagatttcgggttaacaaaactgacagaagttggaggttcagcaactcggggtgcaatgggtacatttggttacatggcaccagagactgtttatggagaagtgtctgcaaaagtagatgtatatgcatttggagttgtcctttacgaattgatttctgcgaaaggtgcggttgtcaaaatgacagaagccgttggtgaatttagaggccttgttggtgtgttcgaagaatcattcaaggaaaccgacaaagaagaagcactacgcaagattatagacccgaggctcggtgatagttacccgtttgattcggtatacaagatggcggaattagggaaagcatgtacacaagagaatgcgcagctacgtccgagtatgagatacattgtggttgctttatccactctcttttcgtctaccggaaattgggatgttggaaacttccaaaacgaagatttagtcagtcttatgtccggccggtag

SEQ ID NO: 91893 - protein, 537 aa, Arabidopsis thaliana; identical to SEQ ID NO: 38774
  peptide (1)..(537): Ceres Seq. ID no. 12729925
  misc_feature (1)..(537): Homolog of NCBI NO: 30686316 NR Description: protein kinase family [Arabidopsis thaliana]
  misc_feature (1)..(537): Homolog of NCBI NO: 11994399 NR Description: contains similarity to receptor protein
  misc_feature (4)..(537): Homolog of NCBI NO: 37651058 NR Description: Nod-factor receptor 1a [Lotus corniculatus var.
  misc_feature (4)..(537): Homolog of NCBI NO: 37651060 NR Description: Nod-factor receptor 1b [Lotus corniculatus var.
  misc_feature (3)..(537): Homolog of NCBI NO: 34485516 NR Description: LysM domain-containing receptor-like kinase 3
  misc_feature (214)..(537): Homolog of NCBI NO: 38175551 NR Description: receptor protein kinase PERK1-like protein [Oryza
  misc_feature (1)..(144): Homolog of NCBI NO: 38175551 NR Description: receptor protein kinase PERK1-like protein [Oryza
  misc_feature (222)..(516): Homolog of NCBI NO: 34485514 NR Description: LysM domain-containing receptor-like kinase 1
  misc_feature (3)..(186): Homolog of NCBI NO: 34485514 NR Description: LysM domain-containing receptor-like kinase 1
  misc_feature (50)..(516): Homolog of NCBI NO: 34485526 NR Description: LysM domain-containing receptor-like kinase 4

SEQ ID NO: 91894 - protein, 491 aa, Arabidopsis thaliana; identical to SEQ ID NO: 38775
  peptide (1)..(491): Ceres Seq. ID no. 12729926
  misc_feature (1)..(491): Homolog of NCBI NO: 30686316 NR Description: protein kinase family [Arabidopsis thaliana]
  misc_feature (1)..(491): Homolog of NCBI NO: 11994399 NR Description: contains similarity to receptor protein
  misc_feature (1)..(491): Homolog of NCBI NO: 37651058 NR Description: Nod-factor receptor 1a [Lotus corniculatus var.
  misc_feature (1)..(491): Homolog of NCBI NO: 37651060 NR Description: Nod-factor receptor 1b [Lotus corniculatus var.
  misc_feature (1)..(491): Homolog of NCBI NO: 34485516 NR Description: LysM domain-containing receptor-like kinase 3
  misc_feature (168)..(491): Homolog of NCBI NO: 38175551 NR Description: receptor protein kinase PERK1-like protein [Oryza
  misc_feature (1)..(98): Homolog of NCBI NO: 38175551 NR Description: receptor protein kinase PERK1-like protein [Oryza
  misc_feature (176)..(470): Homolog of NCBI NO: 34485514 NR Description: LysM domain-containing receptor-like kinase 1
  misc_feature (1)..(140): Homolog of NCBI NO: 34485514 NR Description: LysM domain-containing receptor-like kinase 1
  misc_feature (4)..(470): Homolog of NCBI NO: 34485526 NR Description: LysM domain-containing receptor-like kinase 4

SEQ ID NO: 91895 - DNA, 1641 bp, Arabidopsis thaliana
  misc_feature (1)..(1641): Ceres Seq. ID no. 12729927
  misc_feature: MA Experiment ID: 20000437 Result: Up-regulated in Transcription
  misc_feature: MA Experiment 20000437 PARAMETER Experiment Name: At_Drought_P Parameter: Age (day) Value: 8
  misc_feature: MA Experiment 20000437 PARAMETER Experiment Name: At_Drought_P Parameter: Organism Value: A. thaliana
  misc_feature: MA Experiment 20000437 PARAMETER Experiment Name: At_Drought_P Parameter: Plant Line Value: WS
  misc_feature: MA Experiment 20000437 PARAMETER Experiment Name: At_Drought_P Parameter: Timepoint (hr) Value: 24
  misc_feature: MA Experiment 20000437 PARAMETER Experiment Name: At_Drought_P Parameter: Tissue Value: Whole Plant
  misc_feature: MA Experiment 20000437 PARAMETER Experiment Name: At_Drought_P Parameter: Treatment Value: Drought vs. No Drought
atgatcaaacagatatttgggaaattacctagaaagccttccaaatcattgcagaatgactccaatggtgaaggaggtgttaataattcttattatgcttcgaattcgagtactactagtatctctaaaccttcttcaacatcttcgaaatcatcatcagcctcgggttcgcgtgtagctaatggaactcttgctcctaactcaatgagctctaataggaatactaatcaagggaagaaaccattgggaggagatgctgttgtacaagctggaccgtttccgtcttctggtggggtttatgaggctttgcctagctttagagatgttcctatatcggagaaaccgaatctctttatcgggaagttgagtatgtgctgtgttgtttttgactttagtgatccgtctaagaaccttaaggagaaagagattaagaggcagacattgcttgagcttgttgattatgttgcatcagttggttttaagtttaacgatgtttcgatgcaagagttaacgaagatggtagcggttaatctgtttagaacttttccttctgcgaatcacgagagtaaaattcttgaaatacatgatatggatgatgaagaaccttctttggagccagcttggcctcatgttcaagttgtgtatgagattcttctcagattcgtggcttctcccatgactgatgcaaagcttgccaagagatatattgaccattcttttgtcttgaagctcttagacttgtttgattctgaagatcaaagagagagggaatatctaaaaactattctgcatcgggtgtacgggaagttcatggtgcatcgaccttacatcagaaaggcgataaacaatatcttctacagattcatatccgagactgaaaagcataatggcattgcggagttgctagagattcttggaagtataattaatggttttgctttgcctttaaaagaagagcacaagctcttccttttgcgagccttgattcctctccacaagcctaaatgttcatcagtctatcaccaacagctttcgtattgcattgttcagtttgtagaaaaggacttcaagctcgctgataccgttattagaggtcttttaaaatattggcctgtgactaacagctcaaaggaagttatgtttcttggagagttagaagaagtcttggaagcaactcaagccgctgagtttcaacgttgtatggttccattatcccgacaaattgctcgatgcctcaacagttcacatttccaggttgctgaaagagcattgtttctatggaacaacgatcacataagaaacctgatcactcagaaccataaagtgataatgcctatagtcttcccagctcttgagagaaacacgcgtggacattggaaccaagcagttcaaagtctgactataaacgtgaggaaagtattatgcgagattgaccaagttcttttcgacgagtgtttagccaaattccaagtagaagaagtgaataaaacagaggttaaagcgaaacgggaaaggacatggcaacggttagaagatttagctacttcaaagaccgttgtaaccaacgaggcagtactggttccaagatttgtgtcctcagtcaatcttactacaagcagctctgagtccacagggtcgtag

SEQ ID NO: 91896 - protein, 546 aa, Arabidopsis thaliana
  peptide (1)..(546): Ceres Seq. ID no. 12729928
  misc_feature (102)..(515): Pfam Name: Protein phosphatase 2A regulatory B subunit (B56 Pfam Description: Protein phosphatase 2A regulatory B subunit
  misc_feature (1)..(546): Homolog of NCBI NO: 15233119 NR Description: B regulatory subunit of PP2A, putative; protein
  misc_feature (42)..(546): Homolog of NCBI NO: 11994401 NR Description: protein phosphatase 2A B' regulatory subunit
  misc_feature (1)..(68): Homolog of NCBI NO: 11994401 NR Description: protein phosphatase 2A B' regulatory subunit
  misc_feature (43)..(544): Homolog of NCBI NO: 7485149 NR Description: hypothetical protein - Arabidopsis thaliana phosphatase like protein [Arabidopsis thaliana]
  misc_feature (1)..(56): Homolog of NCBI NO: 7485149 NR Description: hypothetical protein - Arabidopsis thaliana phosphatase like protein [Arabidopsis thaliana]
  misc_feature (43)..(544): Homolog of NCBI NO: 18414444 NR Description: Expressed protein; protein id: At4g15415.1, by cDNA: gi_20147342, supported by cDNA: gi_2160693 [Arabidopsis >gi|2160694|gb|AAB58902.1| B' regulatory subunit of PP2A
  misc_feature (43)..(544): Homolog of NCBI NO: 20147343 NR Description: AT4g15410/dl3750w [Arabidopsis thaliana]
  misc_feature (1)..(525): Homolog of NCBI NO: 21530786 NR Description: putative protein phosphatase 2A B'teta subunit
  misc_feature (1)..(517): Homolog of NCBI NO: 15230961 NR Description: putative B regulatory subunit of protein by cDNA: gi_16323339 [Arabidopsis thaliana]
  misc_feature (43)..(529): Homolog of NCBI NO: 21530784 NR Description: putative protein phosphatase 2A B'zeta subunit
MIKQIFGKLPRKPSKSLQNDSNGEGGVNNSYYASNSSTTSISKPSSTSSKSSSASGSRVANGTLAPNSMSSNRNTNQGKKPLGGDAVVQAGPFPSSGGVYEALPSFRDVPISEKPNLFIGKLSMCCVVFDFSDPSKNLKEKEIKRQTLLELVDYVASVGFKFNDVSMQELTKMVAVNLFRTFPSANHESKILEIHDMDDEEPSLEPAWPHVQVVYEILLRFVASPMTDAKLAKRYIDHSFVLKLLDLFDSEDQREREYLKTILHRVYGKFMVHRPYIRKAINNIFYRFISETEKHNGIAELLEILGSIINGFALPLKEEHKLFLLRALIPLHKPKCSSVYHQQLSYCIVQFVEKDFKLADTVIRGLLKYWPVTNSSKEVMFLGELEEVLEATQAAEFQRCMVPLSRQIARCLNSSHFQVAERALFLWNNDHIRNLITQNHKVIMPIVFPALERNTRGHWNQAVQSLTINVRKVLCEIDQVLFDECLAKFQVEEVNKTEVKAKRERTWQRLEDLATSKTVVTNEAVLVPRFVSSVNLTTSSSESTGS

SEQ ID NO: 91897 - protein, 478 aa, Arabidopsis thaliana
  peptide (1)..(478): Ceres Seq. ID no. 12729929
  misc_feature (34)..(447): Pfam Name: Protein phosphatase 2A regulatory B subunit (B56 Pfam Description: Protein phosphatase 2A regulatory B subunit
  misc_feature (1)..(478): Homolog of NCBI NO: 15233119 NR Description: B regulatory subunit of PP2A, putative; protein
  misc_feature (1)..(478): Homolog of NCBI NO: 11994401 NR Description: protein phosphatase 2A B' regulatory subunit
  misc_feature (1)..(476): Homolog of NCBI NO: 7485149 NR Description: hypothetical protein - Arabidopsis thaliana phosphatase like protein [Arabidopsis thaliana]
  misc_feature (1)..(476): Homolog of NCBI NO: 18414444 NR Description: Expressed protein; protein id: At4g15415.1, by cDNA: gi_20147342, supported by cDNA: gi_2160693 [Arabidopsis >gi|2160694|gb|AAB58902.1| B' regulatory subunit of PP2A
  misc_feature (1)..(476): Homolog of NCBI NO: 20147343 NR Description: AT4g15410/dl3750w [Arabidopsis thaliana]
  misc_feature (1)..(457): Homolog of NCBI NO: 21530786 NR Description: putative protein phosphatase 2A B'teta subunit
  misc_feature (1)..(449): Homolog of NCBI NO: 15230961 NR Description: putative B regulatory subunit of protein by cDNA: gi_16323339 [Arabidopsis thaliana]
  misc_feature (1)..(461): Homolog of NCBI NO: 21530784 NR Description: putative protein phosphatase 2A B'zeta subunit
  misc_feature (1)..(449): Homolog of NCBI NO: 15222851 NR Description: B regulatory subunit of protein phosphatase 2A, protein id: At1g13460.1, supported by cDNA: 126195. [Arabidopsis
  misc_feature (1)..(459): Homolog of NCBI NO: 34394129 NR Description: putative protein phosphatase PP2A0 B' subunit
MSSNRNTNQGKKPLGGDAVVQAGPFPSSGGVYEALPSFRDVPISEKPNLFIGKLSMCCVVFDFSDPSKNLKEKEIKRQTLLELVDYVASVGFKFNDVSMQELTKMVAVNLFRTFPSANHESKILEIHDMDDEEPSLEPAWPHVQVVYEILLRFVASPMTDAKLAKRYIDHSFVLKLLDLFDSEDQREREYLKTILHRVYGKFMVHRPYIRKAINNIFYRFISETEKHNGIAELLEILGSIINGFALPLKEEHKLFLLRALIPLHKPKCSSVYHQQLSYCIVQFVEKDFKLADTVIRGLLKYWPVTNSSKEVMFLGELEEVLEATQAAEFQRCMVPLSRQIARCLNSSHFQVAERALFLWNNDHIRNLITQNHKVIMPIVFPALERNTRGHWNQAVQSLTINVRKVLCEIDQVLFDECLAKFQVEEVNKTEVKAKRERTWQRLEDLATSKTVVTNEAVLVPRFVSSVNLTTSSSESTGS

SEQ ID NO: 91898 - protein, 423 aa, Arabidopsis thaliana
  peptide (1)..(423): Ceres Seq. ID no. 12729930
  misc_feature (1)..(392): Pfam Name: Protein phosphatase 2A regulatory B subunit (B56 Pfam Description: Protein phosphatase 2A regulatory B subunit
  misc_feature (1)..(423): Homolog of NCBI NO: 15233119 NR Description: B regulatory subunit of PP2A, putative; protein
  misc_feature (1)..(423): Homolog of NCBI NO: 11994401 NR Description: protein phosphatase 2A B' regulatory subunit
  misc_feature (1)..(421): Homolog of NCBI NO: 7485149 NR Description: hypothetical protein - Arabidopsis thaliana phosphatase like protein [Arabidopsis thaliana]
  misc_feature (1)..(421): Homolog of NCBI NO: 18414444 NR Description: Expressed protein; protein id: At4g15415.1, by cDNA: gi_20147342, supported by cDNA: gi_2160693 [Arabidopsis >gi|2160694|gb|AAB58902.1| B' regulatory subunit of PP2A
  misc_feature (1)..(421): Homolog of NCBI NO: 20147343 NR Description: AT4g15410/dl3750w [Arabidopsis thaliana]
  misc_feature (1)..(402): Homolog of NCBI NO: 21530786 NR Description: putative protein phosphatase 2A B'teta subunit
  misc_feature (1)..(394): Homolog of NCBI NO: 15230961 NR Description: putative B regulatory subunit of protein by cDNA: gi_16323339 [Arabidopsis thaliana]
  misc_feature (1)..(406): Homolog of NCBI NO: 21530784 NR Description: putative protein phosphatase 2A B'zeta subunit
  misc_feature (1)..(394): Homolog of NCBI NO: 15222851 NR Description: B regulatory subunit of protein phosphatase 2A, protein id: At1g13460.1, supported by cDNA: 126195. [Arabidopsis
  misc_feature (1)..(404): Homolog of NCBI NO: 34394129 NR Description: putative protein phosphatase PP2A0 B' subunit
MCCVVFDFSDPSKNLKEKEIKRQTLLELVDYVASVGFKFNDVSMQELTKMVAVNLFRTFPSANHESKILEIHDMDDEEPSLEPAWPHVQVVYEILLRFVASPMTDAKLAKRYIDHSFVLKLLDLFDSEDQREREYLKTILHRVYGKFMVHRPYIRKAINNIFYRFISETEKHNGIAELLEILGSIINGFALPLKEEHKLFLLRALIPLHKPKCSSVYHQQLSYCIVQFVEKDFKLADTVIRGLLKYWPVTNSSKEVMFLGELEEVLEATQAAEFQRCMVPLSRQIARCLNSSHFQVAERALFLWNNDHIRNLITQNHKVIMPIVFPALERNTRGHWNQAVQSLTINVRKVLCEIDQVLFDECLAKFQVEEVNKTEVKAKRERTWQRLEDLATSKTVVTNEAVLVPRFVSSVNLTTSSSESTGS

SEQ ID NO: 91899 - DNA, 633 bp, Arabidopsis thaliana
  misc_feature (1)..(633): Ceres Seq. ID no. 12729960
  misc_feature: MA Experiment ID: 20000437 Result: Down-regulated in Transcription
  misc_feature: MA Experiment 20000437 PARAMETER Experiment Name: At_Drought_P Parameter: Age (day) Value: 8
  misc_feature: MA Experiment 20000437 PARAMETER Experiment Name: At_Drought_P Parameter: Organism Value: A. thaliana
  misc_feature: MA Experiment 20000437 PARAMETER Experiment Name: At_Drought_P Parameter: Plant Line Value: WS
  misc_feature: MA Experiment 20000437 PARAMETER Experiment Name: At_Drought_P Parameter: Timepoint (hr) Value: 24
  misc_feature: MA Experiment 20000437 PARAMETER Experiment Name: At_Drought_P Parameter: Tissue Value: Whole Plant
  misc_feature: MA Experiment 20000437 PARAMETER Experiment Name: At_Drought_P Parameter: Treatment Value: Drought vs. No Drought
  misc_feature: MA Experiment ID: 20000438 Result: Up-regulated in Transcription
  misc_feature: MA Experiment 20000438 PARAMETER Experiment Name: At_Shoots__P Parameter: Age (day) Value: 14
  misc_feature: MA Experiment 20000438 PARAMETER Experiment Name: At_Shoots__P Parameter: Tissue Value: Shoots vs. Whole Plant
  misc_feature: MA Experiment ID: 20001247 Result: Up-regulated in Transcription
  misc_feature: MA Experiment 20001247 PARAMETER Experiment Name: At_Far-red-induction_P Parameter: Age (day) Value: 7
  misc_feature: MA Experiment 20001247 PARAMETER Experiment Name: At_Far-red-induction_P Parameter: Light Value: Far-red vs. White
  misc_feature: MA Experiment 20001247 PARAMETER Experiment Name: At_Far-red-induction_P Parameter: Organism Value: A. thaliana
  misc_feature: MA Experiment 20001247 PARAMETER Experiment Name: At_Far-red-induction_P Parameter: Plant Line Value: Columbia
  misc_feature: MA Experiment 20001247 PARAMETER Experiment Name: At_Far-red-induction_P Parameter: Timepoint (hr) Value: 1
  misc_feature: MA Experiment 20001247 PARAMETER Experiment Name: At_Far-red-induction_P Parameter: Tissue Value: Whole Plant
  misc_feature: MA Experiment ID: 20001450 Result: Up-regulated in Transcription
  misc_feature: MA Experiment 20001450 PARAMETER Experiment Name: At_Far-red-induction_P Parameter: Age (day) Value: 7
  misc_feature: MA Experiment 20001450 PARAMETER Experiment Name: At_Far-red-induction_P Parameter: Light Value: Far-red vs. White
  misc_feature: MA Experiment 20001450 PARAMETER Experiment Name: At_Far-red-induction_P Parameter: Organism Value: A. thaliana
  misc_feature: MA Experiment 20001450 PARAMETER Experiment Name: At_Far-red-induction_P Parameter: Plant Line Value: Columbia
  misc_feature: MA Experiment 20001450 PARAMETER Experiment Name: At_Far-red-induction_P Parameter: Timepoint (hr) Value: 8
  misc_feature: MA Experiment 20001450 PARAMETER Experiment Name: At_Far-red-induction_P Parameter: Tissue Value: Whole Plant
  misc_feature: MA Experiment ID: 20001451 Result: Up-regulated in Transcription
  misc_feature: MA Experiment 20001451 PARAMETER Experiment Name: At_Far-red-induction_P Parameter: Age (day) Value: 7
  misc_feature: MA Experiment 20001451 PARAMETER Experiment Name: At_Far-red-induction_P Parameter: Light Value: Far-red vs. White
  misc_feature: MA Experiment 20001451 PARAMETER Experiment Name: At_Far-red-induction_P Parameter: Organism Value: A. thaliana
  misc_feature: MA Experiment 20001451 PARAMETER Experiment Name: At_Far-red-induction_P Parameter: Plant Line Value: Columbia
  misc_feature: MA Experiment 20001451 PARAMETER Experiment Name: At_Far-red-induction_P Parameter: Timepoint (hr) Value: 24
  misc_feature: MA Experiment 20001451 PARAMETER Experiment Name: At_Far-red-induction_P Parameter: Tissue Value: Whole Plant
  misc_feature: MA Experiment ID: 20001557 Result: Down-regulated in Transcription
  misc_feature: MA Experiment 20001557 PARAMETER Experiment Name: At_Drought_Soil_Dry_P Parameter: Age (day) Value: 27
  misc_feature: MA Experiment 20001557 PARAMETER Experiment Name: At_Drought_Soil_Dry_P Parameter: Organism Value: A. thaliana
  misc_feature: MA Experiment 20001557 PARAMETER Experiment Name: At_Drought_Soil_Dry_P Parameter: Plant Line Value: WS
  misc_feature: MA Experiment 20001557 PARAMETER Experiment Name: At_Drought_Soil_Dry_P Parameter: Post Timepoint (hr) Value: 3
  misc_feature: MA Experiment 20001557 PARAMETER Experiment Name: At_Drought_Soil_Dry_P Parameter: Post-Treatment Value: Re-Water vs. No Drought
  misc_feature: MA Experiment 20001557 PARAMETER Experiment Name: At_Drought_Soil_Dry_P Parameter: Timepoint (day) Value: 13
  misc_feature: MA Experiment 20001557 PARAMETER Experiment Name: At_Drought_Soil_Dry_P Parameter: Treatment Value: Drought vs. No Drought
atgttaaccgcagccggagacgatgaactggacccggtcgtgggaccagaatcggcaacggaagcagccactccaagagtgctgactataatctcccatgtgatggagaagctcgtggcacgaaacgagtggttagctaagcaaactaagggatttgggaagagcttggaggcgtttcacggcgtgagagcgccgagcataagtatagctaaataccttgagaggatatataagtacacaaaatgtagcccggcatgtttcgttgttgggtatgtgtacatagaccggttggctcataagcatcctggttctttggttgtctccttgaatgttcatagactcctcgtcacttgtgtcatgattgctgccaagatactagatgacgtgcactacaacaacgagttctatgctcgggttggaggcgtaagcaatgcagacttgaacaaaatggagttggagcttctctttcttcttgactttagagttactgtgagttttagagttttcgagagctattgctttcacctcgaaaaagagatgcaactaaacgacgccgtttcttccctcaaagatattcaaccaatgcaagaaagtctctctccagcatctactttatcatctttatatgtttga

SEQ ID NO: 91900 - protein, 210 aa, Arabidopsis thaliana
  peptide (1)..(210): Ceres Seq. ID no. 12729961
  misc_feature (26)..(163): Pfam Name: Cyclin, N-terminal domain Pfam Description: Cyclin, N-terminal domain
  misc_feature (1)..(210): Homolog of NCBI NO: 15233185 NR Description: PREG-like protein, putative; protein id:
  misc_feature (15)..(180): Homolog of NCBI NO: 25493992 NR Description: PREG-like protein [imported] - Picea mariana
  misc_feature (17)..(179): Homolog of NCBI NO: 39546240 NR Description: OSJNBa0089N06.10 [Oryza sativa (japonica
  misc_feature (26)..(199): Homolog of NCBI NO: 15224950 NR Description: putative PREG1-like negative regulator; protein
  misc_feature (25)..(197): Homolog of NCBI NO: 15225402 NR Description: putative PREG1-like negative regulator; protein At2g45080.1, supported by cDNA: gi_18491282 [Arabidopsis
  misc_feature (24)..(197): Homolog of NCBI NO: 15232360 NR Description: regulatory protein - like; protein id: At3g60550.1
  misc_feature (25)..(205): Homolog of NCBI NO: 15240306 NR Description: PREG-like - like protein; protein id: At5g61650.1
  misc_feature (25)..(209): Homolog of NCBI NO: 15240794 NR Description: putative protein; protein id: At5g07450.1
  misc_feature (25)..(179): Homolog of NCBI NO: 15229382 NR Description: putative protein; protein id: At3g63120.1, by cDNA: 35075. [Arabidopsis thaliana] >gi|11358166|pir||T48101
  misc_feature (25)..(179): Homolog of NCBI NO: 21593009 NR Description: unknown [Arabidopsis thaliana]
MLTAAGDDELDPVVGPESATEAATPRVLTIISHVMEKLVARNEWLAKQTKGFGKSLEAFHGVRAPSISIAKYLERIYKYTKCSPACFVVGYVYIDRLAHKHPGSLVVSLNVHRLLVTCVMIAAKILDDVHYNNEFYARVGGVSNADLNKMELELLFLLDFRVTVSFRVFESYCFHLEKEMQLNDAVSSLKDIQPMQESLSPASTLSSLYV

SEQ ID NO: 91901 - protein, 176 aa, Arabidopsis thaliana
  peptide (1)..(176): Ceres Seq. ID no. 12729962
  misc_feature (1)..(129): Pfam Name: Cyclin, N-terminal domain Pfam Description: Cyclin, N-terminal domain
  misc_feature (1)..(176): Homolog of NCBI NO: 15233185 NR Description: PREG-like protein, putative; protein id:
  misc_feature (1)..(146): Homolog of NCBI NO: 25493992 NR Description: PREG-like protein [imported] - Picea mariana
  misc_feature (1)..(145): Homolog of NCBI NO: 39546240 NR Description: OSJNBa0089N06.10 [Oryza sativa (japonica
  misc_feature (1)..(165): Homolog of NCBI NO: 15224950 NR Description: putative PREG1-like negative regulator; protein
  misc_feature (1)..(163): Homolog of NCBI NO: 15225402 NR Description: putative PREG1-like negative regulator; protein At2g45080.1, supported by cDNA: gi_18491282 [Arabidopsis
  misc_feature (1)..(163): Homolog of NCBI NO: 15232360 NR Description: regulatory protein - like; protein id: At3g60550.1
  misc_feature (1)..(171): Homolog of NCBI NO: 15240306 NR Description: PREG-like - like protein; protein id: At5g61650.1
  misc_feature (1)..(175): Homolog of NCBI NO: 15240794 NR Description: putative protein; protein id: At5g07450.1
  misc_feature (1)..(145): Homolog of NCBI NO: 15229382 NR Description: putative protein; protein id: At3g63120.1, by cDNA: 35075. [Arabidopsis thaliana] >gi|11358166|pir||T48101
  misc_feature (1)..(145): Homolog of NCBI NO: 21593009 NR Description: unknown [Arabidopsis thaliana]
MEKLVARNEWLAKQTKGFGKSLEAFHGVRAPSISIAKYLERIYKYTKCSPACFVVGYVYIDRLAHKHPGSLVVSLNVHRLLVTCVMIAAKILDDVHYNNEFYARVGGVSNADLNKMELELLFLLDFRVTVSFRVFESYCFHLEKEMQLNDAVSSLKDIQPMQESLSPASTLSSLYV

SEQ ID NO: 91902 - DNA, 837 bp, Arabidopsis thaliana
  misc_feature (1)..(837): Ceres Seq. ID no. 12729971
  misc_feature: MA Experiment ID: 20000440 Result: Up-regulated in Transcription
  misc_feature: MA Experiment 20000440 PARAMETER Experiment Name: At_Closed-Flower__Sub_P Parameter: Tissue Value: Closed Flower vs. Whole Plant
atgtactctttatcttctgtatcaaaacaccttattttggtccatatattggccctggtggccacacaactgcttctcatacgtagcgtttcgtctttgaacatgaccaattcctatctgaaccacaaatgctttgtcagtcaagggaaatacaagccaggaagtgcacatgagaaaagcctagaagctatcatccattccatctcggttggtgaaaatgttaatagcggttacgacatgatgtcatttggtgacggtccagatctagtctgcgttgtcctccagtgccgtggtgactcctacgggtccaagtgccgctcctgctttgcctcagccatggccgggcttcgtaggagatgtccgagatataaagggggaataatatggttcgaccaatgtcttctcgagatttcttcgatcgataatgtagggcagctcaattacggtgatagtttctgtatgtccaacgcgaagaatgtgggagatgatccattttctttcatactgaagtgggatactctcttcgacaatatatcacgtatagctatcactgaaaagaataaaaacttaaaagataccaacaaaccggcactatacggggcgggggagaagaggctcgggacaaagaagaagatgtacggaatggttcagtgtacagatgacttatctgttaaggcttgtgaggagtgtctggttgctaatatcttgaagtttcaaaattgctggaaaagtggtaaacgcggtgcgagggttttggataggagctgtaactttaggtatgagctttacccttttgttaatgccaagactggtcctaattcttattttaagagttaa

SEQ ID NO: 91903 - protein, 278 aa, Arabidopsis thaliana
  peptide (1)..(278): Ceres Seq. ID no. 12729972
  misc_feature (212)..(267): Pfam Name: Domain of unknown function DUF26 Pfam Description: Domain of unknown function DUF26
  misc_feature (1)..(278): Homolog of NCBI NO: 15233201 NR Description: hypothetical protein; protein id: At3g21910.1 thaliana] >gi|9279742|dbj|BAB01368.1| contains similarity to
  misc_feature (1)..(272): Homolog of NCBI NO: 15233204 NR Description: pollen coat receptor kinase, putative; protein At3g21920.1 [Arabidopsis thaliana] >gi|9279743|dbj|BAB01369.1| similarity to receptor protein kinase~gene_id:MZN24.4
  misc_feature (1)..(276): Homolog of NCBI NO: 9279744 NR Description: contains similarity to receptor protein
  misc_feature (1)..(276): Homolog of NCBI NO: 15233207 NR Description: receptor kinase, putative; protein id:
  misc_feature (87)..(277): Homolog of NCBI NO: 11994709 NR Description: contains similarity to receptor protein
  misc_feature (7)..(85): Homolog of NCBI NO: 11994709 NR Description: contains similarity to receptor protein
  misc_feature (1)..(266): Homolog of NCBI NO: 15233368 NR Description: putative protein; protein id: At4g20680.1
  misc_feature (1)..(266): Homolog of NCBI NO: 15233236 NR Description: hypothetical protein; protein id: At3g22000.1 thaliana] >gi|9279757|dbj|BAB01383.1| contains similarity to
  misc_feature (14)..(266): Homolog of NCBI NO: 15233235 NR Description: receptor kinase common family, putative; protein At3g21990.1 [Arabidopsis thaliana] >gi|9279756|dbj|BAB01382.1| similarity to receptor kinase~gene_id:MZN24.17 [Arabidopsis
  misc_feature (14)..(266): Homolog of NCBI NO: 15233366 NR Description: pollen coat receptor kinase, putative; protein At4g20670.1 [Arabidopsis thaliana] >gi|7485931|pir||T10609
MYSLSSVSKHLILVHILALVATQLLLIRSVSSLNMTNSYLNHKCFVSQGKYKPGSAHEKSLEAIIHSISVGENVNSGYDMMSFGDGPDLVCVVLQCRGDSYGSKCRSCFASAMAGLRRRCPRYKGGIIWFDQCLLEISSIDNVGQLNYGDSFCMSNAKNVGDDPFSFILKWDTLFDNISRIAITEKNKNLKDTNKPALYGAGEKRLGTKKKMYGMVQCTDDLSVKACEECLVANILKFQNCWKSGKRGARVLDRSCNFRYELYPFVNAKTGPNSYFKS

SEQ ID NO: 91904 - protein, 244 aa, Arabidopsis thaliana
  peptide (1)..(244): Ceres Seq. ID no. 12729973
  misc_feature (178)..(233): Pfam Name: Domain of unknown function DUF26 Pfam Description: Domain of unknown function DUF26
  misc_feature (1)..(244): Homolog of NCBI NO: 15233201 NR Description: hypothetical protein; protein id: At3g21910.1 thaliana] >gi|9279742|dbj|BAB01368.1| contains similarity to
  misc_feature (1)..(238): Homolog of NCBI NO: 15233204 NR Description: pollen coat receptor kinase, putative; protein At3g21920.1 [Arabidopsis thaliana] >gi|9279743|dbj|BAB01369.1| similarity to receptor protein kinase~gene_id:MZN24.4
  misc_feature (1)..(242): Homolog of NCBI NO: 9279744 NR Description: contains similarity to receptor protein
  misc_feature (1)..(242): Homolog of NCBI NO: 15233207 NR Description: receptor kinase, putative; protein id:
  misc_feature (53)..(243): Homolog of NCBI NO: 11994709 NR Description: contains similarity to receptor protein
  misc_feature (1)..(51): Homolog of NCBI NO: 11994709 NR Description: contains similarity to receptor protein
  misc_feature (1)..(232): Homolog of NCBI NO: 15233368 NR Description: putative protein; protein id: At4g20680.1
  misc_feature (1)..(232): Homolog of NCBI NO: 15233236 NR Description: hypothetical protein; protein id: At3g22000.1 thaliana] >gi|9279757|dbj|BAB01383.1| contains similarity to
  misc_feature (1)..(232): Homolog of NCBI NO: 15233235 NR Description: receptor kinase common family, putative; protein At3g21990.1 [Arabidopsis thaliana] >gi|9279756|dbj|BAB01382.1| similarity to receptor kinase~gene_id:MZN24.17 [Arabidopsis
  misc_feature (1)..(232): Homolog of NCBI NO: 15233366 NR Description: pollen coat receptor kinase, putative; protein At4g20670.1 [Arabidopsis thaliana] >gi|7485931|pir||T10609
MTNSYLNHKCFVSQGKYKPGSAHEKSLEAIIHSISVGENVNSGYDMMSFGDGPDLVCVVLQCRGDSYGSKCRSCFASAMAGLRRRCPRYKGGIIWFDQCLLEISSIDNVGQLNYGDSFCMSNAKNVGDDPFSFILKWDTLFDNISRIAITEKNKNLKDTNKPALYGAGEKRLGTKKKMYGMVQCTDDLSVKACEECLVANILKFQNCWKSGKRGARVLDRSCNFRYELYPFVNAKTGPNSYFKS

SEQ ID NO: 91905 - protein, 199 aa, Arabidopsis thaliana
  peptide (1)..(199): Ceres Seq. ID no. 12729974
  misc_feature (133)..(188): Pfam Name: Domain of unknown function DUF26 Pfam Description: Domain of unknown function DUF26
  misc_feature (1)..(199): Homolog of NCBI NO: 15233201 NR Description: hypothetical protein; protein id: At3g21910.1 thaliana] >gi|9279742|dbj|BAB01368.1| contains similarity to
  misc_feature (1)..(193): Homolog of NCBI NO: 15233204 NR Description: pollen coat receptor kinase, putative; protein At3g21920.1 [Arabidopsis thaliana] >gi|9279743|dbj|BAB01369.1| similarity to receptor protein kinase~gene_id:MZN24.4
  misc_feature (1)..(197): Homolog of NCBI NO: 9279744 NR Description: contains similarity to receptor protein
  misc_feature (1)..(197): Homolog of NCBI NO: 15233207 NR Description: receptor kinase, putative; protein id:
  misc_feature (8)..(198): Homolog of NCBI NO: 11994709 NR Description: contains similarity to receptor protein
  misc_feature (1)..(187): Homolog of NCBI NO: 15233368 NR Description: putative protein; protein id: At4g20680.1
  misc_feature (1)..(187): Homolog of NCBI NO: 15233236 NR Description: hypothetical protein; protein id: At3g22000.1 thaliana] >gi|9279757|dbj|BAB01383.1| contains similarity to
  misc_feature (1)..(187): Homolog of NCBI NO: 15233235 NR Description: receptor kinase common family, putative; protein At3g21990.1 [Arabidopsis thaliana] >gi|9279756|dbj|BAB01382.1| similarity to receptor kinase~gene_id:MZN24.17 [Arabidopsis
  misc_feature (1)..(187): Homolog of NCBI NO: 15233366 NR Description: pollen coat receptor kinase, putative; protein At4g20670.1 [Arabidopsis thaliana] >gi|7485931|pir||T10609
  misc_feature (1)..(187): Homolog of NCBI NO: 15233238 NR Description: hypothetical protein; protein id: At3g22010.1 thaliana] >gi|9279758|dbj|BAB01384.1| contains similarity to
MMSFGDGPDLVCVVLQCRGDSYGSKCRSCFASAMAGLRRRCPRYKGGIIWFDQCLLEISSIDNVGQLNYGDSFCMSNAKNVGDDPFSFILKWDTLFDNISRIAITEKNKNLKDTNKPALYGAGEKRLGTKKKMYGMVQCTDDLSVKACEECLVANILKFQNCWKSGKRGARVLDRSCNFRYELYPFVNAKTGPNSYFKS

SEQ ID NO: 91906 - DNA, 789 bp, Arabidopsis thaliana
  misc_feature (1)..(789): Ceres Seq. ID no. 12729983
  misc_feature: MA Experiment ID: 20000327 Result: Up-regulated in Transcription
  misc_feature: MA Experiment 20000327 PARAMETER Experiment Name: At_42deg_Heat_Sub_P Parameter: Age (day) Value: 14
  misc_feature: MA Experiment 20000327 PARAMETER Experiment Name: At_42deg_Heat_Sub_P Parameter: Organism Value: A. thaliana
  misc_feature: MA Experiment 20000327 PARAMETER Experiment Name: At_42deg_Heat_Sub_P Parameter: Plant Line Value: WS
  misc_feature: MA Experiment 20000327 PARAMETER Experiment Name: At_42deg_Heat_Sub_P Parameter: Temperature (deg C) Value: 42 vs. 22
  misc_feature: MA Experiment 20000327 PARAMETER Experiment Name: At_42deg_Heat_Sub_P Parameter: Timepoint (hr) Value: 1
  misc_feature: MA Experiment 20000327 PARAMETER Experiment Name: At_42deg_Heat_Sub_P Parameter: Tissue Value: Aerial
atgtctttatcctcttctgtaacgaaacatcttatttcggcctccatattagccatagtggcaatgcaactcccttctgtacacagtgttttatccctaaacgagaccaatgcatatctgcaccacatatgcattaacggtgaagggacattcaagtcggggagtccatacgagaaagaaatcaaacaactcattgattttttgtcatcgtttatcaaagactatagttttgtccacggcgttagtggtattggtcccgatgatatcaacgtcaagttccagtgccgaggcgataccttacaagccaagtgccgctcttgcctcgccaccgccttctccgagattcgtagtaaatgtccgaacaacaaagggagaataatatggtacgataactgtcatctcgacctttcgtcaatctatacatatggccagatcgattacaagaacaatttctatatgtacaacgcgaaggatgtgaggggcgataaaaagtctttctacaagaacatgaaggcattccttcataagctaaaggcgaaagcaagtagtaaggaaaacaaaccctacgtgaaagactatatgtatgcagcaggaagggaaagtcttgggacggtgaaattgtacgcaatggtgcagtgtacgcaggacttatcgcttaaaaattgcactgtgtgtttggactggattatgacgaagcttcccgaatgctgcaatggtaaacaaggaggaagagttttgagtccaagctgtaattttaggtatgagctatatccttttgtagaaaattaa

SEQ ID NO: 91907 - protein, 262 aa, Arabidopsis thaliana
  peptide (1)..(262): Ceres Seq. ID no. 12729984
  misc_feature (207)..(261): Pfam Name: Domain of unknown function DUF26 Pfam Description: Domain of unknown function DUF26
  misc_feature (1)..(262): Homolog of NCBI NO: 15233214 NR Description: hypothetical protein; protein id: At3g21960.1 thaliana] >gi|9279750|dbj|BAB01376.1| contains similarity to
  misc_feature (12)..(261): Homolog of NCBI NO: 15225108 NR Description: receptor kinase, putative; protein id: [Arabidopsis thaliana] >gi|25408171|pir||A84723 hypothetical
  misc_feature (29)..(260): Homolog of NCBI NO: 9279746 NR Description: contains similarity to receptor protein
  misc_feature (4)..(261): Homolog of NCBI NO: 15233211 NR Description: hypothetical protein; protein id: At3g21940.1 thaliana] >gi|9279747|dbj|BAB01373.1| contains similarity to
  misc_feature (151)..(261): Homolog of NCBI NO: 9279752 NR Description: gb|AAD24839.1~gene_id:MZN24.13~similar to unknown
  misc_feature (4)..(114): Homolog of NCBI NO: 9279752 NR Description: gb|AAD24839.1~gene_id:MZN24.13~similar to unknown
  misc_feature (4)..(261): Homolog of NCBI NO: 9279748 NR Description: gb|AAD24839.1~gene_id:MZN24.9~similar to unknown
  misc_feature (13)..(262): Homolog of NCBI NO: 15233235 NR Description: receptor kinase common family, putative; protein At3g21990.1 [Arabidopsis thaliana] >gi|9279756|dbj|BAB01382.1| similarity to receptor kinase~gene_id:MZN24.17 [Arabidopsis
  misc_feature (13)..(262): Homolog of NCBI NO: 15233366 NR Description: pollen coat receptor kinase, putative; protein At4g20670.1 [Arabidopsis thaliana] >gi|7485931|pir||T10609
  misc_feature (1)..(260): Homolog of NCBI NO: 15233238 NR Description: hypothetical protein; protein id: At3g22010.1 thaliana] >gi|9279758|dbj|BAB01384.1| contains similarity to
MSLSSSVTKHLISASILAIVAMQLPSVHSVLSLNETNAYLHHICINGEGTFKSGSPYEKEIKQLIDFLSSFIKDYSFVHGVSGIGPDDINVKFQCRGDTLQAKCRSCLATAFSEIRSKCPNNKGRIIWYDNCHLDLSSIYTYGQIDYKNNFYMYNAKDVRGDKKSFYKNMKAFLHKLKAKASSKENKPYVKDYMYAAGRESLGTVKLYAMVQCTQDLSLKNCTVCLDWIMTKLPECCNGKQGGRVLSPSCNFRYELYPFVEN

SEQ ID NO: 91908 - protein, 241 aa, Arabidopsis thaliana
  peptide (1)..(241): Ceres Seq. ID no. 12729985
  misc_feature (186)..(240): Pfam Name: Domain of unknown function DUF26 Pfam Description: Domain of unknown function DUF26
  misc_feature (1)..(241): Homolog of NCBI NO: 15233214 NR Description: hypothetical protein; protein id: At3g21960.1 thaliana] >gi|9279750|dbj|BAB01376.1| contains similarity to
  misc_feature (1)..(240): Homolog of NCBI NO: 15225108 NR Description: receptor kinase, putative; protein id: [Arabidopsis thaliana] >gi|25408171|pir||A84723 hypothetical
  misc_feature (8)..(239): Homolog of NCBI NO: 9279746 NR Description: contains similarity to receptor protein
  misc_feature (1)..(240): Homolog of NCBI NO: 15233211 NR Description: hypothetical protein; protein id: At3g21940.1 thaliana] >gi|9279747|dbj|BAB01373.1| contains similarity to
  misc_feature (130)..(240): Homolog of NCBI NO: 9279752 NR Description: gb|AAD24839.1~gene_id:MZN24.13~similar to unknown
  misc_feature (1)..(93): Homolog of NCBI NO: 9279752 NR Description: gb|AAD24839.1~gene_id:MZN24.13~similar to unknown
  misc_feature (1)..(240): Homolog of NCBI NO: 9279748 NR Description: gb|AAD24839.1~gene_id:MZN24.9~similar to unknown
  misc_feature (1)..(241): Homolog of NCBI NO: 15233235 NR Description: receptor kinase common family, putative; protein At3g21990.1 [Arabidopsis thaliana] >gi|9279756|dbj|BAB01382.1| similarity to receptor kinase~gene_id:MZN24.17 [Arabidopsis
  misc_feature (1)..(241): Homolog of NCBI NO: 15233366 NR Description: pollen coat receptor kinase, putative; protein At4g20670.1 [Arabidopsis thaliana] >gi|7485931|pir||T10609
  misc_feature (1)..(239): Homolog of NCBI NO: 15233238 NR Description: hypothetical protein; protein id: At3g22010.1 thaliana] >gi|9279758|dbj|BAB01384.1| contains similarity to
MQLPSVHSVLSLNETNAYLHHICINGEGTFKSGSPYEKEIKQLIDFLSSFIKDYSFVHGVSGIGPDDINVKFQCRGDTLQAKCRSCLATAFSEIRSKCPNNKGRIIWYDNCHLDLSSIYTYGQIDYKNNFYMYNAKDVRGDKKSFYKNMKAFLHKLKAKASSKENKPYVKDYMYAAGRESLGTVKLYAMVQCTQDLSLKNCTVCLDWIMTKLPECCNGKQGGRVLSPSCNFRYELYPFVEN

SEQ ID NO: 91909 - DNA, 795 bp, Arabidopsis thaliana
  misc_feature (1)..(795): Ceres Seq. ID no. 12729986
  misc_feature: MA Experiment ID: 20000440 Result: Up-regulated in Transcription
  misc_feature: MA Experiment 20000440 PARAMETER Experiment Name: At_Closed-Flower__Sub_P Parameter: Tissue Value: Closed Flower vs. Whole Plant
atgtcttcaaatatttttggatcggtccctattttggtcgtggtggctatacaacttcttcttgtacacaatgtttcttcccagaacgttaccaatgactatttgaaccaccaatgcaacaacacccaagggagatacacgcatgggagtacgtttgagaagaacctcaaccaagttcttcataacatctctaacctcgatcttagatacggttacgcctacgtctctaatgttgtggcttacaaagttagcaaggatcccaacattgtcttcgttttgctccagtgccgcggtgactcctttgggtccaaatgccactcctgcctcagcacagccgtctctgggcttcgtgagagatgtccaggaaacagaggagcaacaatatggtacgaccaatgtcttttggagatttcttcggtggattccgaggggaggatccattacaaacgtatgttctatatgcaaaacccgacgaacgtcaccaacgatcccaaacggttcgaagataaaagaagggatctcctccacaagctaatgctggaagccaccaaggatagcaaggaaaacggcgccaagggactgttgtacgcagtgggtgagatgaggattggaagaaataagatgtatgcaatggtgcagtgtacgcaagacttatggcagactggttgccatgtgtgtctagaatggattacgcagatgaaatatggagagttcttctaccgtaaaccaggagggagagtttgtggtaggagttgtagctttaggtatgagctttacccttttcttagaaggtaa

SEQ ID NO: 91910 - protein, 264 aa, Arabidopsis thaliana
  peptide (1)..(264): Ceres Seq. ID no. 12729987
  misc_feature (90)..(144): Pfam Name: Domain of unknown function DUF26 Pfam Description: Domain of unknown function DUF26
  misc_feature (1)..(264): Homolog of NCBI NO: 15233228 NR Description: hypothetical protein; protein id: At3g21970.1
  misc_feature (1)..(248): Homolog of NCBI NO: 9279753 NR Description: emb|CAB45833.1~gene_id:MZN24.14~similar to
  misc_feature (11)..(264): Homolog of NCBI NO: 11994708 NR Description: contains similarity to serine/threonine
  misc_feature (14)..(264): Homolog of NCBI NO: 15228583 NR Description: receptor kinase, putative; protein id:
  misc_feature (3)..(263): Homolog of NCBI NO: 15233366 NR Description: pollen coat receptor kinase, putative; protein At4g20670.1 [Arabidopsis thaliana] >gi|7485931|pir||T10609
  misc_feature (3)..(263): Homolog of NCBI NO: 15233235 NR Description: receptor kinase common family, putative; protein At3g21990.1 [Arabidopsis thaliana] >gi|9279756|dbj|BAB01382.1| similarity to receptor kinase~gene_id:MZN24.17 [Arabidopsis
  misc_feature (21)..(262): Homolog of NCBI NO: 9279746 NR Description: contains similarity to receptor protein
  misc_feature (9)..(264): Homolog of NCBI NO: 9279762 NR Description: emb|CAB45834.1~gene_id:MZN24.23~similar to
  misc_feature (146)..(263): Homolog of NCBI NO: 15233231 NR Description: hypothetical protein; protein id: At3g21980.1
  misc_feature (6)..(116): Homolog of NCBI NO: 15233231 NR Description: hypothetical protein; protein id: At3g21980.1
MSSNIFGSVPILVVVAIQLLLVHNVSSQNVTNDYLNHQCNNTQGRYTHGSTFEKNLNQVLHNISNLDLRYGYAYVSNVVAYKVSKDPNIVFVLLQCRGDSFGSKCHSCLSTAVSGLRERCPGNRGATIWYDQCLLEISSVDSEGRIHYKRMFYMQNPTNVTNDPKRFEDKRRDLLHKLMLEATKDSKENGAKGLLYAVGEMRIGRNKMYAMVQCTQDLWQTGCHVCLEWITQMKYGEFFYRKPGGRVCGRSCSFRYELYPFLRR

SEQ ID NO: 91911 - DNA, 771 bp, Arabidopsis thaliana
  misc_feature (1)..(771): Ceres Seq. ID no. 12729988
  misc_feature: MA Experiment ID: 20000306 Result: Down-regulated in Transcription
  misc_feature: MA Experiment 20000306 PARAMETER Experiment Name: At_Germinating_Seeds_Sub_P Parameter: Age (hr) Value: 6 vs. 0
  misc_feature: MA Experiment 20000306 PARAMETER Experiment Name: At_Germinating_Seeds_Sub_P Parameter: Organism Value: A. thaliana
  misc_feature: MA Experiment 20000306 PARAMETER Experiment Name: At_Germinating_Seeds_Sub_P Parameter: Plant Line Value: WS
  misc_feature: MA Experiment 20000306 PARAMETER Experiment Name: At_Germinating_Seeds_Sub_P Parameter: Tissue Value: Germinating Seeds
  misc_feature: MA Experiment ID: 20000307 Result: Down-regulated in Transcription
  misc_feature: MA Experiment 20000307 PARAMETER Experiment Name: At_Germinating_Seeds_Sub_P Parameter: Age (hr) Value: 24 vs. 0
  misc_feature: MA Experiment 20000307 PARAMETER Experiment Name: At_Germinating_Seeds_Sub_P Parameter: Organism Value: A. thaliana
  misc_feature: MA Experiment 20000307 PARAMETER Experiment Name: At_Germinating_Seeds_Sub_P Parameter: Plant Line Value: WS
  misc_feature: MA Experiment 20000307 PARAMETER Experiment Name: At_Germinating_Seeds_Sub_P Parameter: Tissue Value: Germinating Seeds
  misc_feature: MA Experiment ID: 20000314 Result: Down-regulated in Transcription
  misc_feature: MA Experiment 20000314 PARAMETER Experiment Name: At_14day_Shoots-Roots_Sub_P Parameter: Age (day) Value: 14
  misc_feature: MA Experiment 20000314 PARAMETER Experiment Name: At_14day_Shoots-Roots_Sub_P Parameter: Organism Value: A. thaliana
  misc_feature: MA Experiment 20000314 PARAMETER Experiment Name: At_14day_Shoots-Roots_Sub_P Parameter: Plant Line Value: WS
  misc_feature: MA Experiment 20000314 PARAMETER Experiment Name: At_14day_Shoots-Roots_Sub_P Parameter: Tissue Value: Roots vs. Whole Plant
  misc_feature: MA Experiment ID: 20000355 Result: Down-regulated in Transcription
  misc_feature: MA Experiment 20000355 PARAMETER Experiment Name: At_Siliques_Sub_P Parameter: Age (day) Value: 21
  misc_feature: MA Experiment 20000355 PARAMETER Experiment Name: At_Siliques_Sub_P Parameter: Organism Value: A. thaliana
  misc_feature: MA Experiment 20000355 PARAMETER Experiment Name: At_Siliques_Sub_P Parameter: Plant Line Value: WS
  misc_feature: MA Experiment 20000355 PARAMETER Experiment Name: At_Siliques_Sub_P Parameter: Tissue Value: Less Than 5mm Siliques vs. Whole Plant
  misc_feature: MA Experiment ID: 20000440 Result: Up-regulated in Transcription
  misc_feature: MA Experiment 20000440 PARAMETER Experiment Name: At_Closed-Flower__Sub_P Parameter: Tissue Value: Closed Flower vs. Whole Plant
atgtcttcagtttttggatctgtccatatcttggccatgatagccatacaactcctccttatacacagtgtttcgtctctgaaccttacaaatgcgtatctgcaccacaaatgcagcaacactcaaggaaaatataagcaggggagtgcgttcgagaaaaatctcaacttagtcctcagtaccatcacctcgattggaaattttcgtgacggtttccgctacaccgaagaaggtgaggatcccaataacgtctttgtcatgttccagtgtcgcggcgactcctactggtccaagtgccccccttgcattagcaccgctgtctctgggcttcgtaggagatgtccaagaaataagggagcaataatatggtatgaccaatgtcttttaaagatatcttcagtcgcctccttcaataagatagattatgagaacgatttctatttgtccaacccaaaaaacatgagtgatcgggagttgttcaacaaggagacgtcggctctcctggagaagctggcaaataaagcctccgatagaaacaacttggatggtaaacaattggtgttgtacgcagcaggggagaagagaattgggacaaagaaggtgtctgcaatggtgcagtgtacgaaagacttaatatttacaaagtgctttgagtgtttggaagggattttgaggaagtttccagagtgttgtgacggtaaacaaggagggagagttttgggtacgagctgtaactttaggtatgagttatatccttttcttagaaactaa

SEQ ID NO: 91912 - protein, 256 aa, Arabidopsis thaliana; identical to SEQ ID NO: 72354
  peptide (1)..(256): Ceres Seq. ID no. 12729989
  misc_feature (84)..(138): Pfam Name: Domain of unknown function DUF26 Pfam Description: Domain of unknown function DUF26
  misc_feature (1)..(256): Homolog of NCBI NO: 15233235 NR Description: receptor kinase common family, putative; protein At3g21990.1 [Arabidopsis thaliana] >gi|9279756|dbj|BAB01382.1| similarity to receptor kinase~gene_id:MZN24.17 [Arabidopsis
  misc_feature (1)..(256): Homolog of NCBI NO: 15233366 NR Description: pollen coat receptor kinase, putative; protein At4g20670.1 [Arabidopsis thaliana] >gi|7485931|pir||T10609
  misc_feature (1)..(247): Homolog of NCBI NO: 15233364 NR Description: receptor kinase common family, 3' partial, protein id: At4g20650.1 [Arabidopsis thaliana]
  misc_feature (1)..(247): Homolog of NCBI NO: 18415518 NR Description: putative protein; protein id: At4g20530.1 thaliana] >gi|18415520|ref|NP_567604.1| putative protein; protein At4g20540.1 [Arabidopsis thaliana] >gi|18415522|ref|NP_567605.1|
  misc_feature (135)..(256): Homolog of NCBI NO: 15233231 NR Description: hypothetical protein; protein id: At3g21980.1
  misc_feature (1)..(110): Homolog of NCBI NO: 15233231 NR Description: hypothetical protein; protein id: At3g21980.1
  misc_feature (1)..(240): Homolog of NCBI NO: 9279755 NR Description: emb|CAB45833.1~gene_id:MZN24.16~similar to
  misc_feature (11)..(255): Homolog of NCBI NO: 15233368 NR Description: putative protein; protein id: At4g20680.1
  misc_feature (11)..(255): Homolog of NCBI NO: 15233236 NR Description: hypothetical protein; protein id: At3g22000.1 thaliana] >gi|9279757|dbj|BAB01383.1| contains similarity to
  misc_feature (145)..(256): Homolog of NCBI NO: 9279754 NR Description: emb|CAB45833.1~gene_id:MZN24.15~similar to

SEQ ID NO: 91913 - protein, 244 aa, Arabidopsis thaliana; identical to SEQ ID NO: 72355
  peptide (1)..(244): Ceres Seq. ID no. 12729990
  misc_feature (72)..(126): Pfam Name: Domain of unknown function DUF26 Pfam Description: Domain of unknown function DUF26
  misc_feature (1)..(244): Homolog of NCBI NO: 15233235 NR Description: receptor kinase common family, putative; protein At3g21990.1 [Arabidopsis thaliana] >gi|9279756|dbj|BAB01382.1| similarity to receptor kinase~gene_id:MZN24.17 [Arabidopsis
  misc_feature (1)..(244): Homolog of NCBI NO: 15233366 NR Description: pollen coat receptor kinase, putative; protein At4g20670.1 [Arabidopsis thaliana] >gi|7485931|pir||T10609
  misc_feature (1)..(235): Homolog of NCBI NO: 15233364 NR Description: receptor kinase common family, 3' partial, protein id: At4g20650.1 [Arabidopsis thaliana]
  misc_feature (1)..(235): Homolog of NCBI NO: 18415518 NR Description: putative protein; protein id: At4g20530.1 thaliana] >gi|18415520|ref|NP_567604.1| putative protein; protein At4g20540.1 [Arabidopsis thaliana] >gi|18415522|ref|NP_567605.1|
  misc_feature (123)..(244): Homolog of NCBI NO: 15233231 NR Description: hypothetical protein; protein id: At3g21980.1
  misc_feature (1)..(98): Homolog of NCBI NO: 15233231 NR Description: hypothetical protein; protein id: At3g21980.1
  misc_feature (1)..(228): Homolog of NCBI NO: 9279755 NR Description: emb|CAB45833.1~gene_id:MZN24.16~similar to
  misc_feature (1)..(243): Homolog of NCBI NO: 15233368 NR Description: putative protein; protein id: At4g20680.1
  misc_feature (1)..(243): Homolog of NCBI NO: 15233236 NR Description: hypothetical protein; protein id: At3g22000.1 thaliana] >gi|9279757|dbj|BAB01383.1| contains similarity to
  misc_feature (133)..(244): Homolog of NCBI NO: 9279754 NR Description: emb|CAB45833.1~gene_id:MZN24.15~similar to

SEQ ID NO: 91914 - protein, 170 aa, Arabidopsis thaliana; identical to SEQ ID NO: 72356
  peptide (1)..(170): Ceres Seq. ID no. 12729991
  misc_feature (1)..(52): Pfam Name: Domain of unknown function DUF26 Pfam Description: Domain of unknown function DUF26
  misc_feature (1)..(170): Homolog of NCBI NO: 15233235 NR Description: receptor kinase common family, putative; protein At3g21990.1 [Arabidopsis thaliana] >gi|9279756|dbj|BAB01382.1| similarity to receptor kinase~gene_id:MZN24.17 [Arabidopsis
  misc_feature (1)..(170): Homolog of NCBI NO: 15233366 NR Description: pollen coat receptor kinase, putative; protein At4g20670.1 [Arabidopsis thaliana] >gi|7485931|pir||T10609
  misc_feature (1)..(161): Homolog of NCBI NO: 15233364 NR Description: receptor kinase common family, 3' partial, protein id: At4g20650.1 [Arabidopsis thaliana]
  misc_feature (1)..(161): Homolog of NCBI NO: 18415518 NR Description: putative protein; protein id: At4g20530.1 thaliana] >gi|18415520|ref|NP_567604.1| putative protein; protein At4g20540.1 [Arabidopsis thaliana] >gi|18415522|ref|NP_567605.1|
  misc_feature (49)..(170): Homolog of NCBI NO: 15233231 NR Description: hypothetical protein; protein id: At3g21980.1
  misc_feature (1)..(24): Homolog of NCBI NO: 15233231 NR Description: hypothetical protein; protein id: At3g21980.1
  misc_feature (1)..(154): Homolog of NCBI NO: 9279755 NR Description: emb|CAB45833.1~gene_id:MZN24.16~similar to
  misc_feature (1)..(169): Homolog of NCBI NO: 15233368 NR Description: putative protein; protein id: At4g20680.1
  misc_feature (1)..(169): Homolog of NCBI NO: 15233236 NR Description: hypothetical protein; protein id: At3g22000.1 thaliana] >gi|9279757|dbj|BAB01383.1| contains similarity to
  misc_feature (59)..(170): Homolog of NCBI NO: 9279754 NR Description: emb|CAB45833.1~gene_id:MZN24.15~similar to

SEQ ID NO: 91915 - DNA, 822 bp, Arabidopsis thaliana
  misc_feature (1)..(822): Ceres Seq. ID no. 12729992
  misc_feature: MA Experiment ID: 20000327 Result: Up-regulated in Transcription
  misc_feature: MA Experiment 20000327 PARAMETER Experiment Name: At_42deg_Heat_Sub_P Parameter: Age (day) Value: 14
  misc_feature: MA Experiment 20000327 PARAMETER Experiment Name: At_42deg_Heat_Sub_P Parameter: Organism Value: A. thaliana
  misc_feature: MA Experiment 20000327 PARAMETER Experiment Name: At_42deg_Heat_Sub_P Parameter: Plant Line Value: WS
  misc_feature: MA Experiment 20000327 PARAMETER Experiment Name: At_42deg_Heat_Sub_P Parameter: Temperature (deg C) Value: 42 vs. 22
  misc_feature: MA Experiment 20000327 PARAMETER Experiment Name: At_42deg_Heat_Sub_P Parameter: Timepoint (hr) Value: 1
  misc_feature: MA Experiment 20000327 PARAMETER Experiment Name: At_42deg_Heat_Sub_P Parameter: Tissue Value: Aerial
  misc_feature: MA Experiment ID: 20000328 Result: Up-regulated in Transcription
  misc_feature: MA Experiment 20000328 PARAMETER Experiment Name: At_42deg_Heat_Sub_P Parameter: Age (day) Value: 14
  misc_feature: MA Experiment 20000328 PARAMETER Experiment Name: At_42deg_Heat_Sub_P Parameter: Organism Value: A. thaliana
  misc_feature: MA Experiment 20000328 PARAMETER Experiment Name: At_42deg_Heat_Sub_P Parameter: Plant Line Value: WS
  misc_feature: MA Experiment 20000328 PARAMETER Experiment Name: At_42deg_Heat_Sub_P Parameter: Temperature (deg C) Value: 42 vs. 22
  misc_feature: MA Experiment 20000328 PARAMETER Experiment Name: At_42deg_Heat_Sub_P Parameter: Timepoint (hr) Value: 6
  misc_feature: MA Experiment 20000328 PARAMETER Experiment Name: At_42deg_Heat_Sub_P Parameter: Tissue Value: Aerial
atgtactcttcatgttctcttttacaacgtctcgtttggttccctttcttagccttggtggccacacaactcctatttatacgcaatgtttcgtccctgaacctcaccaatgagtatctgcatcacaaatgtctcgttagtgaagggaaatataaaccaggaagcaagtacgagtatatccttaacgattacatccgttttctcgcagccggaaattttcgctcaggttccatgcacatgactagtggtctaaaacccaatgctgtaaccattctctaccagtgcagcggtgactcctataattctaagtgccgctcttgctatgctgccggcatctccgggcttcgtaggcgatgtccgagaaacaaaggtgggataatatggttcgatcagtgttttgttgagattacttcaatcagtgtcatcgacttcaacatctcaaagatcaattacgagaacaatttccccttacacaacccgaacagggtaagtggcaatataaagtcattcaacaatgagacaatggctctcctcaaagagttggcgttgaaagcaaataataaagacaacatggacaatggcaagatggcactgtacgcatcaggggagaagagggtcgggacaaagaaggtgtacgcaatggttcagtgtatgagagatctagttaagcctaagatgtgtaaggagtgtttggaaagcattataaaggagtttcccgagtgttgcgacggtaaacaaggagggaggattttgggtacgagctgtgattttaggtatgaactttacccttttctaaggacttcagattcaaaaactgtttga

SEQ ID NO: 91916 - protein, 273 aa, Arabidopsis thaliana
  peptide (1)..(273): Ceres Seq. ID no. 12729993
  misc_feature (211)..(266): Pfam Name: Domain of unknown function DUF26 Pfam Description: Domain of unknown function DUF26
  misc_feature (1)..(273): Homolog of NCBI NO: 15233236 NR Description: hypothetical protein; protein id: At3g22000.1 thaliana] >gi|9279757|dbj|BAB01383.1| contains similarity to
  misc_feature (1)..(273): Homolog of NCBI NO: 15233368 NR Description: putative protein; protein id: At4g20680.1
  misc_feature (1)..(267): Homolog of NCBI NO: 15233238 NR Description: hypothetical protein; protein id: At3g22010.1 thaliana] >gi|9279758|dbj|BAB01384.1| contains similarity to
  misc_feature (17)..(273): Homolog of NCBI NO: 15233366 NR Description: pollen coat receptor kinase, putative; protein At4g20670.1 [Arabidopsis thaliana] >gi|7485931|pir||T10609
  misc_feature (17)..(266): Homolog of NCBI NO: 15233235 NR Description: receptor kinase common family, putative; protein At3g21990.1 [Arabidopsis thaliana] >gi|9279756|dbj|BAB01382.1| similarity to receptor kinase~gene_id:MZN24.17 [Arabidopsis
  misc_feature (1)..(267): Homolog of NCBI NO: 15233241 NR Description: hypothetical protein; protein id: At3g22040.1 thaliana] >gi|9279761|dbj|BAB01387.1|
  misc_feature (1)..(266): Homolog of NCBI NO: 9279762 NR Description: emb|CAB45834.1~gene_id:MZN24.23~similar to
  misc_feature (1)..(265): Homolog of NCBI NO: 15233201 NR Description: hypothetical protein; protein id: At3g21910.1 thaliana] >gi|9279742|dbj|BAB01368.1| contains similarity to
  misc_feature (15)..(265): Homolog of NCBI NO: 9279746 NR Description: contains similarity to receptor protein
  misc_feature (140)..(266): Homolog of NCBI NO: 15233231 NR Description: hypothetical protein; protein id: At3g21980.1
MYSSCSLLQRLVWFPFLALVATQLLFIRNVSSLNLTNEYLHHKCLVSEGKYKPGSKYEYILNDYIRFLAAGNFRSGSMHMTSGLKPNAVTILYQCSGDSYNSKCRSCYAAGISGLRRRCPRNKGGIIWFDQCFVEITSISVIDFNISKINYENNFPLHNPNRVSGNIKSFNNETMALLKELALKANNKDNMDNGKMALYASGEKRVGTKKVYAMVQCMRDLVKPKMCKECLESIIKEFPECCDGKQGGRILGTSCDFRYELYPFLRTSDSKTV

SEQ ID NO: 91917 - protein, 196 aa, Arabidopsis thaliana
  peptide (1)..(196): Ceres Seq. ID no. 12729994
  misc_feature (134)..(189): Pfam Name: Domain of unknown function DUF26 Pfam Description: Domain of unknown function DUF26
  misc_feature (1)..(196): Homolog of NCBI NO: 15233236 NR Description: hypothetical protein; protein id: At3g22000.1 thaliana] >gi|9279757|dbj|BAB01383.1| contains similarity to
  misc_feature (1)..(196): Homolog of NCBI NO: 15233368 NR Description: putative protein; protein id: At4g20680.1
  misc_feature (1)..(190): Homolog of NCBI NO: 15233238 NR Description: hypothetical protein; protein id: At3g22010.1 thaliana] >gi|9279758|dbj|BAB01384.1| contains similarity to
  misc_feature (1)..(196): Homolog of NCBI NO: 15233366 NR Description: pollen coat receptor kinase, putative; protein At4g20670.1 [Arabidopsis thaliana] >gi|7485931|pir||T10609
  misc_feature (1)..(189): Homolog of NCBI NO: 15233235 NR Description: receptor kinase common family, putative; protein At3g21990.1 [Arabidopsis thaliana] >gi|9279756|dbj|BAB01382.1| similarity to receptor kinase~gene_id:MZN24.17 [Arabidopsis
  misc_feature (1)..(190): Homolog of NCBI NO: 15233241 NR Description: hypothetical protein; protein id: At3g22040.1 thaliana] >gi|9279761|dbj|BAB01387.1|
  misc_feature (1)..(189): Homolog of NCBI NO: 9279762 NR Description: emb|CAB45834.1~gene_id:MZN24.23~similar to
  misc_feature (1)..(188): Homolog of NCBI NO: 15233201 NR Description: hypothetical protein; protein id: At3g21910.1 thaliana] >gi|9279742|dbj|BAB01368.1| contains similarity to
  misc_feature (1)..(188): Homolog of NCBI NO: 9279746 NR Description: contains similarity to receptor protein
  misc_feature (63)..(189): Homolog of NCBI NO: 15233231 NR Description: hypothetical protein; protein id: At3g21980.1
MHMTSGLKPNAVTILYQCSGDSYNSKCRSCYAAGISGLRRRCPRNKGGIIWFDQCFVEITSISVIDFNISKINYENNFPLHNPNRVSGNIKSFNNETMALLKELALKANNKDNMDNGKMALYASGEKRVGTKKVYAMVQCMRDLVKPKMCKECLESIIKEFPECCDGKQGGRILGTSCDFRYELYPFLRTSDSKTV

SEQ ID NO: 91918 - protein, 194 aa, Arabidopsis thaliana
  peptide (1)..(194): Ceres Seq. ID no. 12729995
  misc_feature (132)..(187): Pfam Name: Domain of unknown function DUF26 Pfam Description: Domain of unknown function DUF26
  misc_feature (1)..(194): Homolog of NCBI NO: 15233236 NR Description: hypothetical protein; protein id: At3g22000.1 thaliana] >gi|9279757|dbj|BAB01383.1| contains similarity to
  misc_feature (1)..(194): Homolog of NCBI NO: 15233368 NR Description: putative protein; protein id: At4g20680.1
  misc_feature (1)..(188): Homolog of NCBI NO: 15233238 NR Description: hypothetical protein; protein id: At3g22010.1 thaliana] >gi|9279758|dbj|BAB01384.1| contains similarity to
  misc_feature (1)..(194): Homolog of NCBI NO: 15233366 NR Description: pollen coat receptor kinase, putative; protein At4g20670.1 [Arabidopsis thaliana] >gi|7485931|pir||T10609
  misc_feature (1)..(187): Homolog of NCBI NO: 15233235 NR Description: receptor kinase common family, putative; protein At3g21990.1 [Arabidopsis thaliana] >gi|9279756|dbj|BAB01382.1| similarity to receptor kinase~gene_id:MZN24.17 [Arabidopsis
  misc_feature (1)..(188): Homolog of NCBI NO: 15233241 NR Description: hypothetical protein; protein id: At3g22040.1 thaliana] >gi|9279761|dbj|BAB01387.1|
  misc_feature (1)..(187): Homolog of NCBI NO: 9279762 NR Description: emb|CAB45834.1~gene_id:MZN24.23~similar to
  misc_feature (1)..(186): Homolog of NCBI NO: 15233201 NR Description: hypothetical protein; protein id: At3g21910.1 thaliana] >gi|9279742|dbj|BAB01368.1| contains similarity to
  misc_feature (1)..(186): Homolog of NCBI NO: 9279746 NR Description: contains similarity to receptor protein
  misc_feature (61)..(187): Homolog of NCBI NO: 15233231 NR Description: hypothetical protein; protein id: At3g21980.1
MTSGLKPNAVTILYQCSGDSYNSKCRSCYAAGISGLRRRCPRNKGGIIWFDQCFVEITSISVIDFNISKINYENNFPLHNPNRVSGNIKSFNNETMALLKELALKANNKDNMDNGKMALYASGEKRVGTKKVYAMVQCMRDLVKPKMCKECLESIIKEFPECCDGKQGGRILGTSCDFRYELYPFLRTSDSKTV

SEQ ID NO: 91919 - DNA, 1007 bp, Arabidopsis thaliana
  misc_feature (1)..(1007): Ceres Seq. ID no. 12729998
  misc_feature: MA Experiment ID: 20000179 Result: Down-regulated in Transcription
  misc_feature: MA Experiment 20000179 PARAMETER Experiment Name: At_Germinating_Seeds_P Parameter: Age (hr) Value: 6 vs. 0
  misc_feature: MA Experiment 20000179 PARAMETER Experiment Name: At_Germinating_Seeds_P Parameter: Tissue Value: Germinating Seeds
  misc_feature: MA Experiment ID: 20000180 Result: Down-regulated in Transcription
  misc_feature: MA Experiment 20000180 PARAMETER Experiment Name: At_Germinating_Seeds_P Parameter: Age (hr) Value: 24 vs. 0
  misc_feature: MA Experiment 20000180 PARAMETER Experiment Name: At_Germinating_Seeds_P Parameter: Tissue Value: Germinating Seeds
  misc_feature: MA Experiment ID: 20000185 Result: Down-regulated in Transcription
  misc_feature: MA Experiment 20000185 PARAMETER Experiment Name: At_Roots__P Parameter: Age (day) Value: 7 vs. 21
  misc_feature: MA Experiment 20000185 PARAMETER Experiment Name: At_Roots__P Parameter: Organism Value: A. thaliana
  misc_feature: MA Experiment 20000185 PARAMETER Experiment Name: At_Roots__P Parameter: Tissue Value: Roots vs. Whole Plant
  misc_feature: MA Experiment ID: 20000234 Result: Down-regulated in Transcription
  misc_feature: MA Experiment 20000234 PARAMETER Experiment Name: At_Siliques_P Parameter: Age (day) Value: 21
  misc_feature: MA Experiment 20000234 PARAMETER Experiment Name: At_Siliques_P Parameter: Organism Value: A. thaliana
  misc_feature: MA Experiment 20000234 PARAMETER Experiment Name: At_Siliques_P Parameter: Plant Line Value: WS
  misc_feature: MA Experiment 20000234 PARAMETER Experiment Name: At_Siliques_P Parameter: Tissue Value: Less Than 5mm Siliques vs. Whole Plant
  misc_feature: MA Experiment ID: 20000235 Result: Down-regulated in Transcription
  misc_feature: MA Experiment 20000235 PARAMETER Experiment Name: At_Siliques_P Parameter: Age (day) Value: 21
  misc_feature: MA Experiment 20000235 PARAMETER Experiment Name: At_Siliques_P Parameter: Organism Value: A. thaliana
  misc_feature: MA Experiment 20000235 PARAMETER Experiment Name: At_Siliques_P Parameter: Plant Line Value: WS
  misc_feature: MA Experiment 20000235 PARAMETER Experiment Name: At_Siliques_P Parameter: Tissue Value: 5-10mm Siliques vs. Whole Plant
  misc_feature: MA Experiment ID: 20000264 Result: Down-regulated in Transcription
  misc_feature: MA Experiment 20000264 PARAMETER Experiment Name: At_Open_Flower_P Parameter: Age (day) Value: 21
  misc_feature: MA Experiment 20000264 PARAMETER Experiment Name: At_Open_Flower_P Parameter: Plant Line Value: WS
  misc_feature: MA Experiment 20000264 PARAMETER Experiment Name: At_Open_Flower_P Parameter: Tissue Value: Open Flower vs. Whole Plant
  misc_feature: MA Experiment ID: 20000265 Result: Down-regulated in Transcription
  misc_feature: MA Experiment 20000265 PARAMETER Experiment Name: At_Open_Flower_P Parameter: Age (day) Value: 21
  misc_feature: MA Experiment 20000265 PARAMETER Experiment Name: At_Open_Flower_P Parameter: Plant Line Value: WS
  misc_feature: MA Experiment 20000265 PARAMETER Experiment Name: At_Open_Flower_P Parameter: Tissue Value: Closed Flower vs. Whole Plant
  misc_feature: MA Experiment ID: 20000286 Result: Down-regulated in Transcription
  misc_feature: MA Experiment 20000286 PARAMETER Experiment Name: At_Open_Flower_P Parameter: Age (day) Value: 21
  misc_feature: MA Experiment 20000286 PARAMETER Experiment Name: At_Open_Flower_P Parameter: Plant Line Value: WS
  misc_feature: MA Experiment 20000286 PARAMETER Experiment Name: At_Open_Flower_P Parameter: Tissue Value: Half Open vs. Whole Plant
  misc_feature: MA Experiment ID: 20000437 Result: Down-regulated in Transcription
  misc_feature: MA Experiment 20000437 PARAMETER Experiment Name: At_Drought_P Parameter: Age (day) Value: 8
  misc_feature: MA Experiment 20000437 PARAMETER Experiment Name: At_Drought_P Parameter: Organism Value: A. thaliana
  misc_feature: MA Experiment 20000437 PARAMETER Experiment Name: At_Drought_P Parameter: Plant Line Value: WS
  misc_feature: MA Experiment 20000437 PARAMETER Experiment Name: At_Drought_P Parameter: Timepoint (hr) Value: 24
  misc_feature: MA Experiment 20000437 PARAMETER Experiment Name: At_Drought_P Parameter: Tissue Value: Whole Plant
  misc_feature: MA Experiment 20000437 PARAMETER Experiment Name: At_Drought_P Parameter: Treatment Value: Drought vs. No Drought
  misc_feature: MA Experiment ID: 20000439 Result: Down-regulated in Transcription
  misc_feature: MA Experiment 20000439 PARAMETER Experiment Name: At_Roots__P Parameter: Age (day) Value: 14 vs. 21
  misc_feature: MA Experiment 20000439 PARAMETER Experiment Name: At_Roots__P Parameter: Organism Value: A. thaliana
  misc_feature: MA Experiment 20000439 PARAMETER Experiment Name: At_Roots__P Parameter: Tissue Value: Roots vs. Whole Plant
  misc_feature: MA Experiment ID: 20000441 Result: Up-regulated in Transcription
  misc_feature: MA Experiment 20000441 PARAMETER Experiment Name: At_1uM_BR-BRZ__P Parameter: Tissue Value: Shoot Apices
  misc_feature: MA Experiment 20000441 PARAMETER Experiment Name: At_1uM_BR-BRZ__P Parameter: Treatment Value: 1uM BR vs. No Treatment
  misc_feature: MA Experiment ID: 20000451 Result: Up-regulated in Transcription
  misc_feature: MA Experiment 20000451 PARAMETER Experiment Name: At_CS6879_Shoots-Roots_P Parameter: Age (day) Value: 14
  misc_feature: MA Experiment 20000451 PARAMETER Experiment Name: At_CS6879_Shoots-Roots_P Parameter: Organism Value: A. thaliana
  misc_feature: MA Experiment 20000451 PARAMETER Experiment Name: At_CS6879_Shoots-Roots_P Parameter: Plant Line Value: CS6879 vs. WS
  misc_feature: MA Experiment 20000451 PARAMETER Experiment Name: At_CS6879_Shoots-Roots_P Parameter: Tissue Value: Roots
  misc_feature: MA Experiment ID: 20000452 Result: Up-regulated in Transcription
  misc_feature: MA Experiment 20000452 PARAMETER Experiment Name: At_CS6879_Shoots-Roots_P Parameter: Age (day) Value: 14
  misc_feature: MA Experiment 20000452 PARAMETER Experiment Name: At_CS6879_Shoots-Roots_P Parameter: Organism Value: A. thaliana
  misc_feature: MA Experiment 20000452 PARAMETER Experiment Name: At_CS6879_Shoots-Roots_P Parameter: Plant Line Value: CS6879 vs. WS
  misc_feature: MA Experiment 20000452 PARAMETER Experiment Name: At_CS6879_Shoots-Roots_P Parameter: Tissue Value: Shoots
  misc_feature: MA Experiment ID: 20000709 Result: Down-regulated in Transcription
  misc_feature: MA Experiment 20000709 PARAMETER Experiment Name: At_15mM_NH4NO3_L-to-H_P Parameter: Age (hr) Value: 14
  misc_feature: MA Experiment 20000709 PARAMETER Experiment Name: At_15mM_NH4NO3_L-to-H_P Parameter: Organism Value: A. thaliana
  misc_feature: MA Experiment 20000709 PARAMETER Experiment Name: At_15mM_NH4NO3_L-to-H_P Parameter: Plant Line Value: WS
  misc_feature: MA Experiment 20000709 PARAMETER Experiment Name: At_15mM_NH4NO3_L-to-H_P Parameter: Timepoint (hr) Value: 4
  misc_feature: MA Experiment 20000709 PARAMETER Experiment Name: At_15mM_NH4NO3_L-to-H_P Parameter: Tissue Value: Aerial
  misc_feature: MA Experiment 20000709 PARAMETER Experiment Name: At_15mM_NH4NO3_L-to-H_P Parameter: Treatment Value: 15mM NH4NO3 vs. 30mM Mannitol
  misc_feature: MA Experiment ID: 20000794 Result: Down-regulated in Transcription
  misc_feature: MA Experiment 20000794 PARAMETER Experiment Name: At_Petals_P Parameter: Age (day) Value: 23-25 days
  misc_feature: MA Experiment 20000794 PARAMETER Experiment Name: At_Petals_P Parameter: Plant Line Value: WS
  misc_feature: MA Experiment 20000794 PARAMETER Experiment Name: At_Petals_P Parameter: Tissue Value: Petals vs. Whole plant
  misc_feature: MA Experiment ID: 20001248 Result: Down-regulated in Transcription
  misc_feature: MA Experiment 20001248 PARAMETER Experiment Name: At_Far-red-induction_P Parameter: Age (day) Value: 7
  misc_feature: MA Experiment 20001248 PARAMETER Experiment Name: At_Far-red-induction_P Parameter: Light Value: Far-red vs. White
  misc_feature: MA Experiment 20001248 PARAMETER Experiment Name: At_Far-red-induction_P Parameter: Organism Value: A. thaliana
  misc_feature: MA Experiment 20001248 PARAMETER Experiment Name: At_Far-red-induction_P Parameter: Plant Line Value: Columbia
  misc_feature: MA Experiment 20001248 PARAMETER Experiment Name: At_Far-red-induction_P Parameter: Timepoint (hr) Value: 4
  misc_feature: MA Experiment 20001248 PARAMETER Experiment Name: At_Far-red-induction_P Parameter: Tissue Value: Whole Plant
  misc_feature: MA Experiment ID: 20001554 Result: Down-regulated in Transcription
  misc_feature: MA Experiment 20001554 PARAMETER Experiment Name: At_Drought_Soil_Dry_P Parameter: Age (day) Value: 21
  misc_feature: MA Experiment 20001554 PARAMETER Experiment Name: At_Drought_Soil_Dry_P Parameter: Organism Value: A. thaliana
  misc_feature: MA Experiment 20001554 PARAMETER Experiment Name: At_Drought_Soil_Dry_P Parameter: Plant Line Value: WS
  misc_feature: MA Experiment 20001554 PARAMETER Experiment Name: At_Drought_Soil_Dry_P Parameter: Post Timepoint (hr) Value: None
  misc_feature: MA Experiment 20001554 PARAMETER Experiment Name: At_Drought_Soil_Dry_P Parameter: Post-Treatment Value: None
  misc_feature: MA Experiment 20001554 PARAMETER Experiment Name: At_Drought_Soil_Dry_P Parameter: Timepoint (day) Value: 7
  misc_feature: MA Experiment 20001554 PARAMETER Experiment Name: At_Drought_Soil_Dry_P Parameter: Treatment Value: Drought vs. No Drought
  misc_feature: MA Experiment ID: 20001555 Result: Down-regulated in Transcription
  misc_feature: MA Experiment 20001555 PARAMETER Experiment Name: At_Drought_Soil_Dry_P Parameter: Age (day) Value: 24
  misc_feature: MA Experiment 20001555 PARAMETER Experiment Name: At_Drought_Soil_Dry_P Parameter: Organism Value: A. thaliana
  misc_feature: MA Experiment 20001555 PARAMETER Experiment Name: At_Drought_Soil_Dry_P Parameter: Plant Line Value: WS
  misc_feature: MA Experiment 20001555 PARAMETER Experiment Name: At_Drought_Soil_Dry_P Parameter: Post Timepoint (hr) Value: None
  misc_feature: MA Experiment 20001555 PARAMETER Experiment Name: At_Drought_Soil_Dry_P Parameter: Post-Treatment Value: None
  misc_feature: MA Experiment 20001555 PARAMETER Experiment Name: At_Drought_Soil_Dry_P Parameter: Timepoint (day) Value: 10
  misc_feature: MA Experiment 20001555 PARAMETER Experiment Name: At_Drought_Soil_Dry_P Parameter: Treatment Value: Drought vs. No Drought
  misc_feature: MA Experiment ID: 20001556 Result: Down-regulated in Transcription
  misc_feature: MA Experiment 20001556 PARAMETER Experiment Name: At_Drought_Soil_Dry_P Parameter: Age (day) Value: 26
  misc_feature: MA Experiment 20001556 PARAMETER Experiment Name: At_Drought_Soil_Dry_P Parameter: Organism Value: A. thaliana
  misc_feature: MA Experiment 20001556 PARAMETER Experiment Name: At_Drought_Soil_Dry_P Parameter: Plant Line Value: WS
  misc_feature: MA Experiment 20001556 PARAMETER Experiment Name: At_Drought_Soil_Dry_P Parameter: Post Timepoint (hr) Value: None
  misc_feature: MA Experiment 20001556 PARAMETER Experiment Name: At_Drought_Soil_Dry_P Parameter: Post-Treatment Value: None
  misc_feature: MA Experiment 20001556 PARAMETER Experiment Name: At_Drought_Soil_Dry_P Parameter: Timepoint (day) Value: 12
  misc_feature: MA Experiment 20001556 PARAMETER Experiment Name: At_Drought_Soil_Dry_P Parameter: Treatment Value: Drought vs. No Drought
  misc_feature: MA Experiment ID: 20001559 Result: Down-regulated in Transcription
  misc_feature: MA Experiment 20001559 PARAMETER Experiment Name: At_Drought_Soil_Dry_P Parameter: Age (day) Value: 28
  misc_feature: MA Experiment 20001559 PARAMETER Experiment Name: At_Drought_Soil_Dry_P Parameter: Organism Value: A. thaliana
  misc_feature: MA Experiment 20001559 PARAMETER Experiment Name: At_Drought_Soil_Dry_P Parameter: Plant Line Value: WS
  misc_feature: MA Experiment 20001559 PARAMETER Experiment Name: At_Drought_Soil_Dry_P Parameter: Post Timepoint (hr) Value: 29
  misc_feature: MA Experiment 20001559 PARAMETER Experiment Name: At_Drought_Soil_Dry_P Parameter: Post-Treatment Value: Re-Water vs. No Drought
  misc_feature: MA Experiment 20001559 PARAMETER Experiment Name: At_Drought_Soil_Dry_P Parameter: Timepoint (day) Value: 14
  misc_feature: MA Experiment 20001559 PARAMETER Experiment Name: At_Drought_Soil_Dry_P Parameter: Treatment Value: Drought vs. No Drought
  misc_feature: MA Experiment ID: 20001773 Result: Down-regulated in Transcription
  misc_feature: MA Experiment 20001773 PARAMETER Experiment Name: At_Far-red-enriched-adult_P Parameter: Age (day) Value: 30
  misc_feature: MA Experiment 20001773 PARAMETER Experiment Name: At_Far-red-enriched-adult_P Parameter: Light Value: Far-red enriched vs. White
  misc_feature: MA Experiment 20001773 PARAMETER Experiment Name: At_Far-red-enriched-adult_P Parameter: Organism Value: A. thaliana
  misc_feature: MA Experiment 20001773 PARAMETER Experiment Name: At_Far-red-enriched-adult_P Parameter: Plant Line Value: Columbia
  misc_feature: MA Experiment 20001773 PARAMETER Experiment Name: At_Far-red-enriched-adult_P Parameter: Timepoint (hr) Value: 48
  misc_feature: MA Experiment 20001773 PARAMETER Experiment Name: At_Far-red-enriched-adult_P Parameter: Tissue Value: Aerial
  misc_feature: MA Experiment ID: 20001904 Result: Down-regulated in Transcription
  misc_feature: MA Experiment 20001904 PARAMETER Experiment Name: At_Drought_Reproduction_P Parameter: Age (day) Value: 37
  misc_feature: MA Experiment 20001904 PARAMETER Experiment Name: At_Drought_Reproduction_P Parameter: Organism Value: A. thaliana
  misc_feature: MA Experiment 20001904 PARAMETER Experiment Name: At_Drought_Reproduction_P Parameter: Plant Line Value: WS
  misc_feature: MA Experiment 20001904 PARAMETER Experiment Name: At_Drought_Reproduction_P Parameter: Timepoint (day) Value: 7
  misc_feature: MA Experiment 20001904 PARAMETER Experiment Name: At_Drought_Reproduction_P Parameter: Tissue Value: Rosettes
  misc_feature: MA Experiment 20001904 PARAMETER Experiment Name: At_Drought_Reproduction_P Parameter: Treatment Value: Drought vs. No Drought
aaaaaaaaaaaagacaccctccacaaaatatcaattttcttccaaaacaatgtcttcattaaaacgcatcgtttggttccctatcttggccatagccatacaaattctctctatacataccgttttgtctcaaagccagaacaatgcgtttctcttccacaagtgctcagacatcgaaggaagctttacctcaaaaagtctctacgagtcaaatctcaacaatctctttagtcagctctcttacaaagttccatccaccggttttgccgcctcctccactggcaacactccaaacaacgtcaacggtttggccctttgccgcggtgatgcctcctcctctgactgccgctcttgtcttgagactgccatccccgagctacgtcagagatgtccgaacaacaaggcgggaatagtatggtatgacaactgtcttgtaaagtattcctcgaccaatttcttcgggaagatagatttcgagaacaggttctatttgtacaacgtcaaaaatgtgagtgatccatcaacattcaactcgcagacgaaagctcttttaaccgagctgacaaagaaagcgactactagagataaccagaagctatttgcgacaggagagaaaaatatcggaaagaataaattgtacggactagtgcaatgtacgagggacttgaagagtattacttgtaaggcgtgtttaaatggaattattggggagcttcctaactgttgcgacggtaaagaaggagggagagttgtgggtgggagctgtaactttaggtatgagatttacccttttgttaagactgcttgattagaggtccaagttaaaagggggtccaatgccaaacacggtcttaatttgtgattattgtcaatgtgatatgtattgtatgttgttgtttgtataatgtgttgagccagtaaaatgtaatcttctctttgtgggttatttgtacgatagacacgattatagaggcttgactcctataaataaaaacattccctttgcc

SEQ ID NO: 91920 - protein, 268 aa, Arabidopsis thaliana
  peptide (1)..(268): Ceres Seq. ID no. 12729999
  misc_feature (212)..(266): Pfam Name: Domain of unknown function DUF26 Pfam Description: Domain of unknown function DUF26
  misc_feature (17)..(268): Homolog of NCBI NO: 18403247 NR Description: receptor kinase common family, putative; protein At3g22060.1, supported by cDNA: gi_14334417 [Arabidopsis >gi|9279765|dbj|BAB01391.1| contains similarity to receptor
  misc_feature (32)..(231): Homolog of NCBI NO: 28188537 NR Description: unknown protein [Arabidopsis thaliana] unknown protein [Arabidopsis thaliana] unknown protein [Arabidopsis thaliana]
  misc_feature (32)..(231): Homolog of NCBI NO: 28188559 NR Description: unknown protein [Arabidopsis thaliana]
  misc_feature (32)..(231): Homolog of NCBI NO: 28188539 NR Description: unknown protein [Arabidopsis thaliana]
  misc_feature (32)..(231): Homolog of NCBI NO: 28188561 NR Description: unknown protein [Arabidopsis lyrata] unknown protein [Arabidopsis lyrata] >gi|28188569|gb|AAN46210.1|
  misc_feature (32)..(231): Homolog of NCBI NO: 28188563 NR Description: unknown protein [Arabidopsis lyrata]
  misc_feature (21)..(267): Homolog of NCBI NO: 15231012 NR Description: putative protein; protein id: At3g58310.1
  misc_feature (28)..(266): Homolog of NCBI NO: 15233235 NR Description: receptor kinase common family, putative; protein At3g21990.1 [Arabidopsis thaliana] >gi|9279756|dbj|BAB01382.1| similarity to receptor kinase~gene_id:MZN24.17 [Arabidopsis
  misc_feature (28)..(266): Homolog of NCBI NO: 15233366 NR Description: pollen coat receptor kinase, putative; protein At4g20670.1 [Arabidopsis thaliana] >gi|7485931|pir||T10609
  misc_feature (41)..(265): Homolog of NCBI NO: 9279746 NR Description: contains similarity to receptor protein
KKKKTPSTKYQFSSKTMSSLKRIVWFPILAIAIQILSIHTVLSQSQNNAFLFHKCSDIEGSFTSKSLYESNLNNLFSQLSYKVPSTGFAASSTGNTPNNVNGLALCRGDASSSDCRSCLETAIPELRQRCPNNKAGIVWYDNCLVKYSSTNFFGKIDFENRFYLYNVKNVSDPSTFNSQTKALLTELTKKATTRDNQKLFATGEKNIGKNKLYGLVQCTRDLKSITCKACLNGIIGELPNCCDGKEGGRVVGGSCNFRYEIYPFVKTA

SEQ ID NO: 91921 - protein, 252 aa, Arabidopsis thaliana
  peptide (1)..(252): Ceres Seq. ID no. 12730000
  misc_feature (196)..(250): Pfam Name: Domain of unknown function DUF26 Pfam Description: Domain of unknown function DUF26
  misc_feature (1)..(252): Homolog of NCBI NO: 18403247 NR Description: receptor kinase common family, putative; protein At3g22060.1, supported by cDNA: gi_14334417 [Arabidopsis >gi|9279765|dbj|BAB01391.1| contains similarity to receptor
  misc_feature (16)..(215): Homolog of NCBI NO: 28188537 NR Description: unknown protein [Arabidopsis thaliana] unknown protein [Arabidopsis thaliana] unknown protein [Arabidopsis thaliana]
  misc_feature (16)..(215): Homolog of NCBI NO: 28188559 NR Description: unknown protein [Arabidopsis thaliana]
  misc_feature (16)..(215): Homolog of NCBI NO: 28188539 NR Description: unknown protein [Arabidopsis thaliana]
  misc_feature (16)..(215): Homolog of NCBI NO: 28188561 NR Description: unknown protein [Arabidopsis lyrata] unknown protein [Arabidopsis lyrata] >gi|28188569|gb|AAN46210.1|
  misc_feature (16)..(215): Homolog of NCBI NO: 28188563 NR Description: unknown protein [Arabidopsis lyrata]
  misc_feature (5)..(251): Homolog of NCBI NO: 15231012 NR Description: putative protein; protein id: At3g58310.1
  misc_feature (12)..(250): Homolog of NCBI NO: 15233235 NR Description: receptor kinase common family, putative; protein At3g21990.1 [Arabidopsis thaliana] >gi|9279756|dbj|BAB01382.1| similarity to receptor kinase~gene_id:MZN24.17 [Arabidopsis
  misc_feature (12)..(250): Homolog of NCBI NO: 15233366 NR Description: pollen coat receptor kinase, putative; protein At4g20670.1 [Arabidopsis thaliana] >gi|7485931|pir||T10609
  misc_feature (25)..(249): Homolog of NCBI NO: 9279746 NR Description: contains similarity to receptor protein
MSSLKRIVWFPILAIAIQILSIHTVLSQSQNNAFLFHKCSDIEGSFTSKSLYESNLNNLFSQLSYKVPSTGFAASSTGNTPNNVNGLALCRGDASSSDCRSCLETAIPELRQRCPNNKAGIVWYDNCLVKYSSTNFFGKIDFENRFYLYNVKNVSDPSTFNSQTKALLTELTKKATTRDNQKLFATGEKNIGKNKLYGLVQCTRDLKSITCKACLNGIIGELPNCCDGKEGGRVVGGSCNFRYEIYPFVKTA

SEQ ID NO: 91922 - DNA, 1329 bp, Arabidopsis thaliana
  misc_feature (1)..(1329): Ceres Seq. ID no. 12730004
  misc_feature: MA Experiment ID: 108434 Result: Up-regulated in Transcription
  misc_feature: MA Experiment 108434 PARAMETER Experiment Name: At_Root_Tips_cDNA_P Parameter: Tissue Value: Root Tips
  misc_feature: MA Experiment ID: 108463 Result: Down-regulated in Transcription
  misc_feature: MA Experiment 108463 PARAMETER Experiment Name: At_Germinating_Seeds_cDNA_P Parameter: Age (day) Value: 3 vs. 0
  misc_feature: MA Experiment 108463 PARAMETER Experiment Name: At_Germinating_Seeds_cDNA_P Parameter: Tissue Value: Germinating Seeds
  misc_feature: MA Experiment ID: 108561 Result: Down-regulated in Transcription
  misc_feature: MA Experiment 108561 PARAMETER Experiment Name: At_100uM_ABA_cDNA_P Parameter: Timepoint (hr) Value: 6
  misc_feature: MA Experiment 108561 PARAMETER Experiment Name: At_100uM_ABA_cDNA_P Parameter: Tissue Value: Aerial
  misc_feature: MA Experiment 108561 PARAMETER Experiment Name: At_100uM_ABA_cDNA_P Parameter: Treatment Value: 100uM ABA vs. No Treatment
  misc_feature: MA Experiment ID: 108573 Result: Down-regulated in Transcription
  misc_feature: MA Experiment 108573 PARAMETER Experiment Name: At_Drought_cDNA_P Parameter: Timepoint (hr) Value: 6
  misc_feature: MA Experiment 108573 PARAMETER Experiment Name: At_Drought_cDNA_P Parameter: Tissue Value: Aerial
  misc_feature: MA Experiment 108573 PARAMETER Experiment Name: At_Drought_cDNA_P Parameter: Treatment Value: Drought vs. No Drought
  misc_feature: MA Experiment ID: 108576 Result: Down-regulated in Transcription
  misc_feature: MA Experiment 108576 PARAMETER Experiment Name: At_42deg_Heat_cDNA_P Parameter: Temperature (deg C) Value: 42 vs. 22
  misc_feature: MA Experiment 108576 PARAMETER Experiment Name: At_42deg_Heat_cDNA_P Parameter: Timepoint (hr) Value: 1
  misc_feature: MA Experiment 108576 PARAMETER Experiment Name: At_42deg_Heat_cDNA_P Parameter: Tissue Value: Aerial
  misc_feature: MA Experiment ID: 108577 Result: Down-regulated in Transcription
  misc_feature: MA Experiment 108577 PARAMETER Experiment Name: At_42deg_Heat_cDNA_P Parameter: Temperature (deg C) Value: 42 vs. 22
  misc_feature: MA Experiment 108577 PARAMETER Experiment Name: At_42deg_Heat_cDNA_P Parameter: Timepoint (hr) Value: 6
  misc_feature: MA Experiment 108577 PARAMETER Experiment Name: At_42deg_Heat_cDNA_P Parameter: Tissue Value: Aerial
  misc_feature: MA Experiment ID: 108579 Result: Up-regulated in Transcription
  misc_feature: MA Experiment 108579 PARAMETER Experiment Name: At_4deg_Cold_cDNA_P Parameter: Temperature (deg C) Value: 4 vs. 22
  misc_feature: MA Experiment 108579 PARAMETER Experiment Name: At_4deg_Cold_cDNA_P Parameter: Timepoint (hr) Value: 6
  misc_feature: MA Experiment 108579 PARAMETER Experiment Name: At_4deg_Cold_cDNA_P Parameter: Tissue Value: Aerial
  misc_feature: MA Experiment ID: 20000184 Result: Up-regulated in Transcription
  misc_feature: MA Experiment 20000184 PARAMETER Experiment Name: At_Shoots__P Parameter: Age (day) Value: 7
  misc_feature: MA Experiment 20000184 PARAMETER Experiment Name: At_Shoots__P Parameter: Tissue Value: Shoots vs. Whole Plant
  misc_feature: MA Experiment ID: 20000185 Result: Down-regulated in Transcription
  misc_feature: MA Experiment 20000185 PARAMETER Experiment Name: At_Roots__P Parameter: Age (day) Value: 7 vs. 21
  misc_feature: MA Experiment 20000185 PARAMETER Experiment Name: At_Roots__P Parameter: Organism Value: A. thaliana
  misc_feature: MA Experiment 20000185 PARAMETER Experiment Name: At_Roots__P Parameter: Tissue Value: Roots vs. Whole Plant
  misc_feature: MA Experiment ID: 20000214 Result: Up-regulated in Transcription
  misc_feature: MA Experiment 20000214 PARAMETER Experiment Name: At_4deg_Cold_P Parameter: Timepoint (hr) Value: 6
  misc_feature: MA Experiment ID: 20000234 Result: Up-regulated in Transcription
  misc_feature: MA Experiment 20000234 PARAMETER Experiment Name: At_Siliques_P Parameter: Age (day) Value: 21
  misc_feature: MA Experiment 20000234 PARAMETER Experiment Name: At_Siliques_P Parameter: Organism Value: A. thaliana
  misc_feature: MA Experiment 20000234 PARAMETER Experiment Name: At_Siliques_P Parameter: Plant Line Value: WS
  misc_feature: MA Experiment 20000234 PARAMETER Experiment Name: At_Siliques_P Parameter: Tissue Value: Less Than 5mm Siliques vs. Whole Plant
  misc_feature: MA Experiment ID: 20000235 Result: Up-regulated in Transcription
  misc_feature: MA Experiment 20000235 PARAMETER Experiment Name: At_Siliques_P Parameter: Age (day) Value: 21
  misc_feature: MA Experiment 20000235 PARAMETER Experiment Name: At_Siliques_P Parameter: Organism Value: A. thaliana
  misc_feature: MA Experiment 20000235 PARAMETER Experiment Name: At_Siliques_P Parameter: Plant Line Value: WS
  misc_feature: MA Experiment 20000235 PARAMETER Experiment Name: At_Siliques_P Parameter: Tissue Value: 5-10mm Siliques vs. Whole Plant
  misc_feature: MA Experiment ID: 20000264 Result: Up-regulated in Transcription
  misc_feature: MA Experiment 20000264 PARAMETER Experiment Name: At_Open_Flower_P Parameter: Age (day) Value: 21
  misc_feature: MA Experiment 20000264 PARAMETER Experiment Name: At_Open_Flower_P Parameter: Plant Line Value: WS
  misc_feature: MA Experiment 20000264 PARAMETER Experiment Name: At_Open_Flower_P Parameter: Tissue Value: Open Flower vs. Whole Plant
  misc_feature: MA Experiment ID: 20000265 Result: Up-regulated in Transcription
  misc_feature: MA Experiment 20000265 PARAMETER Experiment Name: At_Open_Flower_P Parameter: Age (day) Value: 21
  misc_feature: MA Experiment 20000265 PARAMETER Experiment Name: At_Open_Flower_P Parameter: Plant Line Value: WS
  misc_feature: MA Experiment 20000265 PARAMETER Experiment Name: At_Open_Flower_P Parameter: Tissue Value: Closed Flower vs. Whole Plant
  misc_feature: MA Experiment ID: 20000286 Result: Up-regulated in Transcription
  misc_feature: MA Experiment 20000286 PARAMETER Experiment Name: At_Open_Flower_P Parameter: Age (day) Value: 21
  misc_feature: MA Experiment 20000286 PARAMETER Experiment Name: At_Open_Flower_P Parameter: Plant Line Value: WS
  misc_feature: MA Experiment 20000286 PARAMETER Experiment Name: At_Open_Flower_P Parameter: Tissue Value: Half Open vs. Whole Plant
  misc_feature: MA Experiment ID: 20000438 Result: Up-regulated in Transcription
  misc_feature: MA Experiment 20000438 PARAMETER Experiment Name: At_Shoots__P Parameter: Age (day) Value: 14
  misc_feature: MA Experiment 20000438 PARAMETER Experiment Name: At_Shoots__P Parameter: Tissue Value: Shoots vs. Whole Plant
  misc_feature: MA Experiment ID: 20000439 Result: Down-regulated in Transcription
  misc_feature: MA Experiment 20000439 PARAMETER Experiment Name: At_Roots__P Parameter: Age (day) Value: 14 vs. 21
  misc_feature: MA Experiment 20000439 PARAMETER Experiment Name: At_Roots__P Parameter: Organism Value: A. thaliana
  misc_feature: MA Experiment 20000439 PARAMETER Experiment Name: At_Roots__P Parameter: Tissue Value: Roots vs. Whole Plant
  misc_feature: MA Experiment ID: 20000441 Result: Up-regulated in Transcription
  misc_feature: MA Experiment 20000441 PARAMETER Experiment Name: At_1uM_BR-BRZ__P Parameter: Tissue Value: Shoot Apices
  misc_feature: MA Experiment 20000441 PARAMETER Experiment Name: At_1uM_BR-BRZ__P Parameter: Treatment Value: 1uM BR vs. No Treatment
  misc_feature: MA Experiment ID: 20000451 Result: Up-regulated in Transcription
  misc_feature: MA Experiment 20000451 PARAMETER Experiment Name: At_CS6879_Shoots-Roots_P Parameter: Age (day) Value: 14
  misc_feature: MA Experiment 20000451 PARAMETER Experiment Name: At_CS6879_Shoots-Roots_P Parameter: Organism Value: A. thaliana
  misc_feature: MA Experiment 20000451 PARAMETER Experiment Name: At_CS6879_Shoots-Roots_P Parameter: Plant Line Value: CS6879 vs. WS
  misc_feature: MA Experiment 20000451 PARAMETER Experiment Name: At_CS6879_Shoots-Roots_P Parameter: Tissue Value: Roots
  misc_feature: MA Experiment ID: 20000495 Result: Up-regulated in Transcription
  misc_feature: MA Experiment 20000495 PARAMETER Experiment Name: At_Guard_Cells_P Parameter: Harvest Date Value: 8/2/2002
  misc_feature: MA Experiment 20000495 PARAMETER Experiment Name: At_Guard_Cells_P Parameter: Organism Value: A. thaliana
  misc_feature: MA Experiment 20000495 PARAMETER Experiment Name: At_Guard_Cells_P Parameter: Tissue Value: Guard Cells vs. Leaves
  misc_feature: MA Experiment ID: 20000573 Result: Up-regulated in Transcription
  misc_feature: MA Experiment 20000573 PARAMETER Experiment Name: At_100uM_ABA_Mutants__P Parameter: Organism Value: A. thaliana
  misc_feature: MA Experiment 20000573 PARAMETER Experiment Name: At_100uM_ABA_Mutants__P Parameter: Plant Line Value: CS22 vs. Ler wt
  misc_feature: MA Experiment 20000573 PARAMETER Experiment Name: At_100uM_ABA_Mutants__P Parameter: Timepoint (hr) Value: N/A
  misc_feature: MA Experiment 20000573 PARAMETER Experiment Name: At_100uM_ABA_Mutants__P Parameter: Tissue Value: Whole Plant
  misc_feature: MA Experiment 20000573 PARAMETER Experiment Name: At_100uM_ABA_Mutants__P Parameter: Treatment Value: None
  misc_feature: MA Experiment ID: 20000574 Result: Up-regulated in Transcription
  misc_feature: MA Experiment 20000574 PARAMETER Experiment Name: At_100uM_ABA_Mutants__P Parameter: Organism Value: A. thaliana
  misc_feature: MA Experiment 20000574 PARAMETER Experiment Name: At_100uM_ABA_Mutants__P Parameter: Plant Line Value: CS23 vs. Ler wt
  misc_feature: MA Experiment 20000574 PARAMETER Experiment Name: At_100uM_ABA_Mutants__P Parameter: Timepoint (hr) Value: N/A
  misc_feature: MA Experiment 20000574 PARAMETER Experiment Name: At_100uM_ABA_Mutants__P Parameter: Tissue Value: Whole Plant
  misc_feature: MA Experiment 20000574 PARAMETER Experiment Name: At_100uM_ABA_Mutants__P Parameter: Treatment Value: None
  misc_feature: MA Experiment ID: 20001555 Result: Down-regulated in Transcription
  misc_feature: MA Experiment 20001555 PARAMETER Experiment Name: At_Drought_Soil_Dry_P Parameter: Age (day) Value: 24
  misc_feature: MA Experiment 20001555 PARAMETER Experiment Name: At_Drought_Soil_Dry_P Parameter: Organism Value: A. thaliana
  misc_feature: MA Experiment 20001555 PARAMETER Experiment Name: At_Drought_Soil_Dry_P Parameter: Plant Line Value: WS
  misc_feature: MA Experiment 20001555 PARAMETER Experiment Name: At_Drought_Soil_Dry_P Parameter: Post Timepoint (hr) Value: None
  misc_feature: MA Experiment 20001555 PARAMETER Experiment Name: At_Drought_Soil_Dry_P Parameter: Post-Treatment Value: None
  misc_feature: MA Experiment 20001555 PARAMETER Experiment Name: At_Drought_Soil_Dry_P Parameter: Timepoint (day) Value: 10
  misc_feature: MA Experiment 20001555 PARAMETER Experiment Name: At_Drought_Soil_Dry_P Parameter: Treatment Value: Drought vs. No Drought
  misc_feature: MA Experiment ID: 20001557 Result: Up-regulated in Transcription
  misc_feature: MA Experiment 20001557 PARAMETER Experiment Name: At_Drought_Soil_Dry_P Parameter: Age (day) Value: 27
  misc_feature: MA Experiment 20001557 PARAMETER Experiment Name: At_Drought_Soil_Dry_P Parameter: Organism Value: A. thaliana
  misc_feature: MA Experiment 20001557 PARAMETER Experiment Name: At_Drought_Soil_Dry_P Parameter: Plant Line Value: WS
  misc_feature: MA Experiment 20001557 PARAMETER Experiment Name: At_Drought_Soil_Dry_P Parameter: Post Timepoint (hr) Value: 3
  misc_feature: MA Experiment 20001557 PARAMETER Experiment Name: At_Drought_Soil_Dry_P Parameter: Post-Treatment Value: Re-Water vs. No Drought
  misc_feature: MA Experiment 20001557 PARAMETER Experiment Name: At_Drought_Soil_Dry_P Parameter: Timepoint (day) Value: 13
  misc_feature: MA Experiment 20001557 PARAMETER Experiment Name: At_Drought_Soil_Dry_P Parameter: Treatment Value: Drought vs. No Drought
  misc_feature: MA Experiment ID: 20001558 Result: Up-regulated in Transcription
  misc_feature: MA Experiment 20001558 PARAMETER Experiment Name: At_Drought_Soil_Dry_P Parameter: Age (day) Value: 27
  misc_feature: MA Experiment 20001558 PARAMETER Experiment Name: At_Drought_Soil_Dry_P Parameter: Organism Value: A. thaliana
  misc_feature: MA Experiment 20001558 PARAMETER Experiment Name: At_Drought_Soil_Dry_P Parameter: Plant Line Value: WS
  misc_feature: MA Experiment 20001558 PARAMETER Experiment Name: At_Drought_Soil_Dry_P Parameter: Post Timepoint (hr) Value: 6
  misc_feature: MA Experiment 20001558 PARAMETER Experiment Name: At_Drought_Soil_Dry_P Parameter: Post-Treatment Value: Re-Water vs. No Drought
  misc_feature: MA Experiment 20001558 PARAMETER Experiment Name: At_Drought_Soil_Dry_P Parameter: Timepoint (day) Value: 13
  misc_feature: MA Experiment 20001558 PARAMETER Experiment Name: At_Drought_Soil_Dry_P Parameter: Treatment Value: Drought vs. No Drought
  misc_feature: MA Experiment ID: 20001560 Result: Up-regulated in Transcription
  misc_feature: MA Experiment 20001560 PARAMETER Experiment Name: At_Drought_Soil_Dry_P Parameter: Age (day) Value: 28
  misc_feature: MA Experiment 20001560 PARAMETER Experiment Name: At_Drought_Soil_Dry_P Parameter: Organism Value: A. thaliana
  misc_feature: MA Experiment 20001560 PARAMETER Experiment Name: At_Drought_Soil_Dry_P Parameter: Plant Line Value: WS
  misc_feature: MA Experiment 20001560 PARAMETER Experiment Name: At_Drought_Soil_Dry_P Parameter: Post Timepoint (hr) Value: None
  misc_feature: MA Experiment 20001560 PARAMETER Experiment Name: At_Drought_Soil_Dry_P Parameter: Post-Treatment Value: None
  misc_feature: MA Experiment 20001560 PARAMETER Experiment Name: At_Drought_Soil_Dry_P Parameter: Timepoint (day) Value: 14
  misc_feature: MA Experiment 20001560 PARAMETER Experiment Name: At_Drought_Soil_Dry_P Parameter: Treatment Value: Drought vs. No Drought
  misc_feature: MA Experiment ID: 20001904 Result: Down-regulated in Transcription
  misc_feature: MA Experiment 20001904 PARAMETER Experiment Name: At_Drought_Reproduction_P Parameter: Age (day) Value: 37
  misc_feature: MA Experiment 20001904 PARAMETER Experiment Name: At_Drought_Reproduction_P Parameter: Organism Value: A. thaliana
  misc_feature: MA Experiment 20001904 PARAMETER Experiment Name: At_Drought_Reproduction_P Parameter: Plant Line Value: WS
  misc_feature: MA Experiment 20001904 PARAMETER Experiment Name: At_Drought_Reproduction_P Parameter: Timepoint (day) Value: 7
  misc_feature: MA Experiment 20001904 PARAMETER Experiment Name: At_Drought_Reproduction_P Parameter: Tissue Value: Rosettes
  misc_feature: MA Experiment 20001904 PARAMETER Experiment Name: At_Drought_Reproduction_P Parameter: Treatment Value: Drought vs. No Drought
  misc_feature: MA Experiment ID: 20001905 Result: Down-regulated in Transcription
  misc_feature: MA Experiment 20001905 PARAMETER Experiment Name: At_Drought_Reproduction_P Parameter: Age (day) Value: 40
  misc_feature: MA Experiment 20001905 PARAMETER Experiment Name: At_Drought_Reproduction_P Parameter: Organism Value: A. thaliana
  misc_feature: MA Experiment 20001905 PARAMETER Experiment Name: At_Drought_Reproduction_P Parameter: Plant Line Value: WS
  misc_feature: MA Experiment 20001905 PARAMETER Experiment Name: At_Drought_Reproduction_P Parameter: Timepoint (day) Value: 10
  misc_feature: MA Experiment 20001905 PARAMETER Experiment Name: At_Drought_Reproduction_P Parameter: Tissue Value: Rosettes
  misc_feature: MA Experiment 20001905 PARAMETER Experiment Name: At_Drought_Reproduction_P Parameter: Treatment Value: Drought vs. No Drought
  misc_feature: MA Experiment ID: 20001906 Result: Down-regulated in Transcription
  misc_feature: MA Experiment 20001906 PARAMETER Experiment Name: At_Drought_Reproduction_P Parameter: Age (day) Value: 35
  misc_feature: MA Experiment 20001906 PARAMETER Experiment Name: At_Drought_Reproduction_P Parameter: Organism Value: A. thaliana
  misc_feature: MA Experiment 20001906 PARAMETER Experiment Name: At_Drought_Reproduction_P Parameter: Plant Line Value: WS
  misc_feature: MA Experiment 20001906 PARAMETER Experiment Name: At_Drought_Reproduction_P Parameter: Timepoint (day) Value: 5
  misc_feature: MA Experiment 20001906 PARAMETER Experiment Name: At_Drought_Reproduction_P Parameter: Tissue Value: Siliques
  misc_feature: MA Experiment 20001906 PARAMETER Experiment Name: At_Drought_Reproduction_P Parameter: Treatment Value: Drought vs. No Drought
atgtatctacttactcactcctttcagaaacccaaaccctcattccaaaaaatggggtctcgctctcaaaacctctcctttctcgtcctcctcctccttggcttcgttgccgtctcctatgcttgcgactgtacccctcctaaaccatcaccagcacctcacaaaccaccaaaacatccagtcaaaccgcctaaacctcctgccgtcaaaccacctaaaccaccggcagtaaaaccacctactccaaaacctcccaccgtgaaaccccatcctaaaccaccaaccgtcaaaccccatcctaaaccaccaaccgtcaaaccccaccctaagccacccaccgtcaaaccaccccaccctaaaccacccaccaaacctcacccccacccaaaacctcccatcgtaaagccaccaaccaagcctcctccgtccacccctaaacctcccaccaaacctcccccgtccacacctaaacctcccacgaccaagcctcctccgtctactccgaaaccaccccaccacaagcctccgcctacaccatgcccaccaccaacaccaacgccgactccaccagttgtaacaccgccaacaccaaccccacccgtcataactccaccaacaccaaccccacccgtcgtaacaccgccaacgccaactccacccgtcattacaccaccaacaccaactccacccgtcattacaccaccaacaccaacaccacccgtcgtgacacctccaacaccaacaccacccgtagtaacaccaccaacaccaactcctcctacgcctattccagagacttgcccaattgacacgctgaagctaggcgcttgtgtggacgttcttggaggtttgattcacatcggacttggaaaaagccacgccaaggcagaatgttgtccggttttaggaggtttacttgacctagacgcagccgtttgtctatgtaccaccattaagctcaaacttctcaacatcgaccttgttctccccattgctcttgagcttcttctcgactgtggaaaaactccaccatctgacttcaaatgtcccgcttaatcgatgtagaacgttgagagtctctggacgactccaaaagtttcgtttcttcaagaaatttgttagtttcatgatctatttggtaatgggaggttaatctgcatatgtgcgacctttagttacatgtttcatttgatacaataaaaggcgttgtaatttgggtttgagatttcaatttctttgggctttcttgttatgttgtacttttaagaagaagaaaaaaaaactgttaaacgatataactttttttttaatatgaacaagtttgtatct

SEQ ID NO: 91923 - protein, 351 aa, Arabidopsis thaliana
  peptide (1)..(351): Ceres Seq. ID no. 12730005
  misc_feature (267)..(349): Pfam Name: Protease inhibitor/seed storage/LTP family Pfam Description: Protease inhibitor/seed storage/LTP family
  misc_feature (1)..(351): Homolog of NCBI NO: 15233282 NR Description: unknown protein; protein id: At3g22120.1
  misc_feature (18)..(351): Homolog of NCBI NO: 11994732 NR Description: contains similarity to cell wall-plasma membrane
  misc_feature (71)..(351): Homolog of NCBI NO: 25453525 NR Description: cell wall-plasma membrane linker protein homolog
  misc_feature (46)..(351): Homolog of NCBI NO: 7446482 NR Description: probable cell wall-plasma membrane linker protein
  misc_feature (18)..(264): Homolog of NCBI NO: 7446482 NR Description: probable cell wall-plasma membrane linker protein
  misc_feature (18)..(323): Homolog of NCBI NO: 25453525 NR Description: cell wall-plasma membrane linker protein homolog
  misc_feature (46)..(351): Homolog of NCBI NO: 1709767 NR Description: 36.4 KD PROLINE-RICH PROTEIN
  misc_feature (53)..(351): Homolog of NCBI NO: 19521 NR Description: proline rich protein [Lycopersicon esculentum]
  misc_feature (47)..(351): Homolog of NCBI NO: 1076501 NR Description: cell wall protein - alfalfa
  misc_feature (45)..(351): Homolog of NCBI NO: 15022163 NR Description: putative proline-rich protein [Solanum brevidens]
MYLLTHSFQKPKPSFQKMGSRSQNLSFLVLLLLGFVAVSYACDCTPPKPSPAPHKPPKHPVKPPKPPAVKPPKPPAVKPPTPKPPTVKPHPKPPTVKPHPKPPTVKPHPKPPTVKPPHPKPPTKPHPHPKPPIVKPPTKPPPSTPKPPTKPPPSTPKPPTTKPPPSTPKPPHHKPPPTPCPPPTPTPTPPVVTPPTPTPPVITPPTPTPPVVTPPTPTPPVITPPTPTPPVITPPTPTPPVVTPPTPTPPVVTPPTPTPPTPIPETCPIDTLKLGACVDVLGGLIHIGLGKSHAKAECCPVLGGLLDLDAAVCLCTTIKLKLLNIDLVLPIALELLLDCGKTPPSDFKCPA

SEQ ID NO: 91924 - protein, 334 aa, Arabidopsis thaliana
  peptide (1)..(334): Ceres Seq. ID no. 12730006
  misc_feature (250)..(332): Pfam Name: Protease inhibitor/seed storage/LTP family Pfam Description: Protease inhibitor/seed storage/LTP family
  misc_feature (1)..(334): Homolog of NCBI NO: 15233282 NR Description: unknown protein; protein id: At3g22120.1
  misc_feature (1)..(334): Homolog of NCBI NO: 11994732 NR Description: contains similarity to cell wall-plasma membrane
  misc_feature (54)..(334): Homolog of NCBI NO: 25453525 NR Description: cell wall-plasma membrane linker protein homolog
  misc_feature (29)..(334): Homolog of NCBI NO: 7446482 NR Description: probable cell wall-plasma membrane linker protein
  misc_feature (1)..(247): Homolog of NCBI NO: 7446482 NR Description: probable cell wall-plasma membrane linker protein
  misc_feature (1)..(306): Homolog of NCBI NO: 25453525 NR Description: cell wall-plasma membrane linker protein homolog
  misc_feature (29)..(334): Homolog of NCBI NO: 1709767 NR Description: 36.4 KD PROLINE-RICH PROTEIN
  misc_feature (36)..(334): Homolog of NCBI NO: 19521 NR Description: proline rich protein [Lycopersicon esculentum]
  misc_feature (30)..(334): Homolog of NCBI NO: 1076501 NR Description: cell wall protein - alfalfa
  misc_feature (28)..(334): Homolog of NCBI NO: 15022163 NR Description: putative proline-rich protein [Solanum brevidens]
MGSRSQNLSFLVLLLLGFVAVSYACDCTPPKPSPAPHKPPKHPVKPPKPPAVKPPKPPAVKPPTPKPPTVKPHPKPPTVKPHPKPPTVKPHPKPPTVKPPHPKPPTKPHPHPKPPIVKPPTKPPPSTPKPPTKPPPSTPKPPTTKPPPSTPKPPHHKPPPTPCPPPTPTPTPPVVTPPTPTPPVITPPTPTPPVVTPPTPTPPVITPPTPTPPVITPPTPTPPVVTPPTPTPPVVTPPTPTPPTPIPETCPIDTLKLGACVDVLGGLIHIGLGKSHAKAECCPVLGGLLDLDAAVCLCTTIKLKLLNIDLVLPIALELLLDCGKTPPSDFKCPA

SEQ ID NO: 91925 - DNA, 3432 bp, Arabidopsis thaliana; identical to SEQ ID NO: 88169
  misc_feature (1)..(3432): Ceres Seq. ID no. 12706139
  misc_feature: MA Experiment ID: 20001451 Result: Down-regulated in Transcription
  misc_feature: MA Experiment 20001451 PARAMETER Experiment Name: At_Far-red-induction_P Parameter: Age (day) Value: 7
  misc_feature: MA Experiment 20001451 PARAMETER Experiment Name: At_Far-red-induction_P Parameter: Light Value: Far-red vs. White
  misc_feature: MA Experiment 20001451 PARAMETER Experiment Name: At_Far-red-induction_P Parameter: Organism Value: A. thaliana
  misc_feature: MA Experiment 20001451 PARAMETER Experiment Name: At_Far-red-induction_P Parameter: Plant Line Value: Columbia
  misc_feature: MA Experiment 20001451 PARAMETER Experiment Name: At_Far-red-induction_P Parameter: Timepoint (hr) Value: 24
  misc_feature: MA Experiment 20001451 PARAMETER Experiment Name: At_Far-red-induction_P Parameter: Tissue Value: Whole Plant

SEQ ID NO: 91926 - protein, 1143 aa, Arabidopsis thaliana; identical to SEQ ID NO: 88170
  peptide (1)..(1143): Ceres Seq. ID no. 12706140
  misc_feature (30)..(486): Pfam Name: Cytochrome P450 Pfam Description: Cytochrome P450
  misc_feature (1)..(557): Homolog of NCBI NO: 11249389 NR Description: cytochrome P450-like protein - Arabidopsis
  misc_feature (1068)..(1103): Homolog of NCBI NO: 11249389 NR Description: cytochrome P450-like protein - Arabidopsis
  misc_feature (1)..(492): Homolog of NCBI NO: 30683235 NR Description: cytochrome P450 family [Arabidopsis thaliana]
  misc_feature (578)..(1070): Homolog of NCBI NO: 15238203 NR Description: cytochrome p450, putative; protein id: At5g10610.1
  misc_feature (578)..(1071): Homolog of NCBI NO: 11249389 NR Description: cytochrome P450-like protein - Arabidopsis
  misc_feature (563)..(1070): Homolog of NCBI NO: 30683235 NR Description: cytochrome P450 family [Arabidopsis thaliana]
  misc_feature (1)..(492): Homolog of NCBI NO: 15238203 NR Description: cytochrome p450, putative; protein id: At5g10610.1
  misc_feature (7)..(492): Homolog of NCBI NO: 3059131 NR Description: cytochrome P450 [Helianthus tuberosus]
  misc_feature (8)..(492): Homolog of NCBI NO: 7430635 NR Description: cytochrome P450 (EC 1.14.-.-) 81B1c - Jerusalem >gi|3059129|emb|CAA04116.1| cytochrome P450 [Helianthus
  misc_feature (584)..(1070): Homolog of NCBI NO: 3059131 NR Description: cytochrome P450 [Helianthus tuberosus]

SEQ ID NO: 91927 - protein, 962 aa, Arabidopsis thaliana; identical to SEQ ID NO: 88171
  peptide (1)..(962): Ceres Seq. ID no. 12706141
  misc_feature (1)..(305): Pfam Name: Cytochrome P450 Pfam Description: Cytochrome P450
  misc_feature (1)..(376): Homolog of NCBI NO: 11249389 NR Description: cytochrome P450-like protein - Arabidopsis
  misc_feature (887)..(922): Homolog of NCBI NO: 11249389 NR Description: cytochrome P450-like protein - Arabidopsis
  misc_feature (1)..(311): Homolog of NCBI NO: 30683235 NR Description: cytochrome P450 family [Arabidopsis thaliana]
  misc_feature (397)..(889): Homolog of NCBI NO: 15238203 NR Description: cytochrome p450, putative; protein id: At5g10610.1
  misc_feature (397)..(890): Homolog of NCBI NO: 11249389 NR Description: cytochrome P450-like protein - Arabidopsis
  misc_feature (382)..(889): Homolog of NCBI NO: 30683235 NR Description: cytochrome P450 family [Arabidopsis thaliana]
  misc_feature (1)..(311): Homolog of NCBI NO: 15238203 NR Description: cytochrome p450, putative; protein id: At5g10610.1
  misc_feature (1)..(311): Homolog of NCBI NO: 3059131 NR Description: cytochrome P450 [Helianthus tuberosus]
  misc_feature (1)..(311): Homolog of NCBI NO: 7430635 NR Description: cytochrome P450 (EC 1.14.-.-) 81B1c - Jerusalem >gi|3059129|emb|CAA04116.1| cytochrome P450 [Helianthus
  misc_feature (403)..(889): Homolog of NCBI NO: 3059131 NR Description: cytochrome P450 [Helianthus tuberosus]

SEQ ID NO: 91928 - protein, 926 aa, Arabidopsis thaliana; identical to SEQ ID NO: 88172
  peptide (1)..(926): Ceres Seq. ID no. 12706142
  misc_feature (1)..(269): Pfam Name: Cytochrome P450 Pfam Description: Cytochrome P450
  misc_feature (1)..(340): Homolog of NCBI NO: 11249389 NR Description: cytochrome P450-like protein - Arabidopsis
  misc_feature (851)..(886): Homolog of NCBI NO: 11249389 NR Description: cytochrome P450-like protein - Arabidopsis
  misc_feature (1)..(275): Homolog of NCBI NO: 30683235 NR Description: cytochrome P450 family [Arabidopsis thaliana]
  misc_feature (361)..(853): Homolog of NCBI NO: 15238203 NR Description: cytochrome p450, putative; protein id: At5g10610.1
  misc_feature (361)..(854): Homolog of NCBI NO: 11249389 NR Description: cytochrome P450-like protein - Arabidopsis
  misc_feature (346)..(853): Homolog of NCBI NO: 30683235 NR Description: cytochrome P450 family [Arabidopsis thaliana]
  misc_feature (1)..(275): Homolog of NCBI NO: 15238203 NR Description: cytochrome p450, putative; protein id: At5g10610.1
  misc_feature (1)..(275): Homolog of NCBI NO: 3059131 NR Description: cytochrome P450 [Helianthus tuberosus]
  misc_feature (1)..(275): Homolog of NCBI NO: 7430635 NR Description: cytochrome P450 (EC 1.14.-.-) 81B1c - Jerusalem >gi|3059129|emb|CAA04116.1| cytochrome P450 [Helianthus
  misc_feature (367)..(853): Homolog of NCBI NO: 3059131 NR Description: cytochrome P450 [Helianthus tuberosus]

SEQ ID NO: 91929 - DNA, 2067 bp, Arabidopsis thaliana; identical to SEQ ID NO: 88173
  misc_feature (1)..(2067): Ceres Seq. ID no. 12706146
  misc_feature: MA Experiment ID: 20000180 Result: Down-regulated in Transcription
  misc_feature: MA Experiment 20000180 PARAMETER Experiment Name: At_Germinating_Seeds_P Parameter: Age (hr) Value: 24 vs. 0
  misc_feature: MA Experiment 20000180 PARAMETER Experiment Name: At_Germinating_Seeds_P Parameter: Tissue Value: Germinating Seeds
  misc_feature: MA Experiment ID: 20001451 Result: Down-regulated in Transcription
  misc_feature: MA Experiment 20001451 PARAMETER Experiment Name: At_Far-red-induction_P Parameter: Age (day) Value: 7
  misc_feature: MA Experiment 20001451 PARAMETER Experiment Name: At_Far-red-induction_P Parameter: Light Value: Far-red vs. White
  misc_feature: MA Experiment 20001451 PARAMETER Experiment Name: At_Far-red-induction_P Parameter: Organism Value: A. thaliana
  misc_feature: MA Experiment 20001451 PARAMETER Experiment Name: At_Far-red-induction_P Parameter: Plant Line Value: Columbia
  misc_feature: MA Experiment 20001451 PARAMETER Experiment Name: At_Far-red-induction_P Parameter: Timepoint (hr) Value: 24
  misc_feature: MA Experiment 20001451 PARAMETER Experiment Name: At_Far-red-induction_P Parameter: Tissue Value: Whole Plant

SEQ ID NO: 91930 - protein, 688 aa, Arabidopsis thaliana; identical to SEQ ID NO: 88174
  peptide (1)..(688): Ceres Seq. ID no. 12706147
  misc_feature (258)..(482): Pfam Name: Elongation factor Tu GTP binding domain Pfam Description: Elongation factor Tu GTP binding domain
  misc_feature (134)..(687): Homolog of NCBI NO: 38347078 NR Description: OSJNBa0006A01.19 [Oryza sativa (japonica
  misc_feature (102)..(687): Homolog of NCBI NO: 34895284 NR Description: putative eukaryoticrelease factor [Oryza sativa
  misc_feature (102)..(683): Homolog of NCBI NO: 38567963 NR Description: OSJNBa0093F12.4 [Oryza sativa (japonica
  misc_feature (194)..(684): Homolog of NCBI NO: 38344203 NR Description: OSJNBa0064G10.19 [Oryza sativa (japonica
  misc_feature (109)..(203): Homolog of NCBI NO: 38344203 NR Description: OSJNBa0064G10.19 [Oryza sativa (japonica
  misc_feature (179)..(684): Homolog of NCBI NO: 5729864 NR Description: HBS1-like [Homo sapiens]
  misc_feature (202)..(684): Homolog of NCBI NO: 5689413 NR Description: KIAA1038 protein [Homo sapiens]
  misc_feature (251)..(684): Homolog of NCBI NO: 16307413 NR Description: Similar to HBS1 (S. cerevisiae)-like [Mus
  misc_feature (261)..(684): Homolog of NCBI NO: 9789945 NR Description: Hbs1-like (S. cerevisiae); eukaryotic release
  misc_feature (225)..(684): Homolog of NCBI NO: 21357037 NR Description: CG1898-PA [Drosophila melanogaster]

SEQ ID NO: 91931 - protein, 662 aa, Arabidopsis thaliana; identical to SEQ ID NO: 88175
  peptide (1)..(662): Ceres Seq. ID no. 12706148
  misc_feature (232)..(456): Pfam Name: Elongation factor Tu GTP binding domain Pfam Description: Elongation factor Tu GTP binding domain
  misc_feature (108)..(661): Homolog of NCBI NO: 38347078 NR Description: OSJNBa0006A01.19 [Oryza sativa (japonica
  misc_feature (76)..(661): Homolog of NCBI NO: 34895284 NR Description: putative eukaryoticrelease factor [Oryza sativa
  misc_feature (76)..(657): Homolog of NCBI NO: 38567963 NR Description: OSJNBa0093F12.4 [Oryza sativa (japonica
  misc_feature (168)..(658): Homolog of NCBI NO: 38344203 NR Description: OSJNBa0064G10.19 [Oryza sativa (japonica
  misc_feature (83)..(177): Homolog of NCBI NO: 38344203 NR Description: OSJNBa0064G10.19 [Oryza sativa (japonica
  misc_feature (153)..(658): Homolog of NCBI NO: 5729864 NR Description: HBS1-like [Homo sapiens]
  misc_feature (176)..(658): Homolog of NCBI NO: 5689413 NR Description: KIAA1038 protein [Homo sapiens]
  misc_feature (225)..(658): Homolog of NCBI NO: 16307413 NR Description: Similar to HBS1 (S. cerevisiae)-like [Mus
  misc_feature (235)..(658): Homolog of NCBI NO: 9789945 NR Description: Hbs1-like (S. cerevisiae); eukaryotic release
  misc_feature (199)..(658): Homolog of NCBI NO: 21357037 NR Description: CG1898-PA [Drosophila melanogaster]

SEQ ID NO: 91932 - protein, 660 aa, Arabidopsis thaliana; identical to SEQ ID NO: 88176
  peptide (1)..(660): Ceres Seq. ID no. 12706149
  misc_feature (230)..(454): Pfam Name: Elongation factor Tu GTP binding domain Pfam Description: Elongation factor Tu GTP binding domain
  misc_feature (106)..(659): Homolog of NCBI NO: 38347078 NR Description: OSJNBa0006A01.19 [Oryza sativa (japonica
  misc_feature (74)..(659): Homolog of NCBI NO: 34895284 NR Description: putative eukaryoticrelease factor [Oryza sativa
  misc_feature (74)..(655): Homolog of NCBI NO: 38567963 NR Description: OSJNBa0093F12.4 [Oryza sativa (japonica
  misc_feature (166)..(656): Homolog of NCBI NO: 38344203 NR Description: OSJNBa0064G10.19 [Oryza sativa (japonica
  misc_feature (81)..(175): Homolog of NCBI NO: 38344203 NR Description: OSJNBa0064G10.19 [Oryza sativa (japonica
  misc_feature (151)..(656): Homolog of NCBI NO: 5729864 NR Description: HBS1-like [Homo sapiens]
  misc_feature (174)..(656): Homolog of NCBI NO: 5689413 NR Description: KIAA1038 protein [Homo sapiens]
  misc_feature (223)..(656): Homolog of NCBI NO: 16307413 NR Description: Similar to HBS1 (S. cerevisiae)-like [Mus
  misc_feature (233)..(656): Homolog of NCBI NO: 9789945 NR Description: Hbs1-like (S. cerevisiae); eukaryotic release
  misc_feature (197)..(656): Homolog of NCBI NO: 21357037 NR Description: CG1898-PA [Drosophila melanogaster]

SEQ ID NO: 91933 - DNA, 1165 bp, Arabidopsis thaliana; identical to SEQ ID NO: 88177
  misc_feature (1)..(1165): Ceres Seq. ID no. 12706162
  misc_feature: MA Experiment ID: 108434 Result: Down-regulated in Transcription
  misc_feature: MA Experiment 108434 PARAMETER Experiment Name: At_Root_Tips_cDNA_P Parameter: Tissue Value: Root Tips
  misc_feature: MA Experiment ID: 108574 Result: Up-regulated in Transcription
  misc_feature: MA Experiment 108574 PARAMETER Experiment Name: At_Wounding__cDNA_P Parameter: Timepoint (hr) Value: 1
  misc_feature: MA Experiment 108574 PARAMETER Experiment Name: At_Wounding__cDNA_P Parameter: Tissue Value: Aerial
  misc_feature: MA Experiment 108574 PARAMETER Experiment Name: At_Wounding__cDNA_P Parameter: Treatment Value: Wounding vs. No Wounding
  misc_feature: MA Experiment ID: 108579 Result: Up-regulated in Transcription
  misc_feature: MA Experiment 108579 PARAMETER Experiment Name: At_4deg_Cold_cDNA_P Parameter: Temperature (deg C) Value: 4 vs. 22
  misc_feature: MA Experiment 108579 PARAMETER Experiment Name: At_4deg_Cold_cDNA_P Parameter: Timepoint (hr) Value: 6
  misc_feature: MA Experiment 108579 PARAMETER Experiment Name: At_4deg_Cold_cDNA_P Parameter: Tissue Value: Aerial
  misc_feature: MA Experiment ID: 108585 Result: Up-regulated in Transcription
  misc_feature: MA Experiment 108585 PARAMETER Experiment Name: At_5mM_NaNP_cDNA_P Parameter: Timepoint (hr) Value: 6
  misc_feature: MA Experiment 108585 PARAMETER Experiment Name: At_5mM_NaNP_cDNA_P Parameter: Tissue Value: Aerial
  misc_feature: MA Experiment 108585 PARAMETER Experiment Name: At_5mM_NaNP_cDNA_P Parameter: Treatment Value: null
  misc_feature: MA Experiment ID: 108595 Result: Up-regulated in Transcription
  misc_feature: MA Experiment 108595 PARAMETER Experiment Name: At_Ler-pi_Ovule_cDNA_P Parameter: Plant Line Value: null
  misc_feature: MA Experiment ID: 20000113 Result: Up-regulated in Transcription
  misc_feature: MA Experiment 20000113 PARAMETER Experiment Name: At_42deg_Heat_cDNA_P Parameter: Temperature (deg C) Value: 42 vs. 22
  misc_feature: MA Experiment 20000113 PARAMETER Experiment Name: At_42deg_Heat_cDNA_P Parameter: Timepoint (hr) Value: 8
  misc_feature: MA Experiment 20000113 PARAMETER Experiment Name: At_42deg_Heat_cDNA_P Parameter: Tissue Value: Aerial
  misc_feature: MA Experiment ID: 20000171 Result: Down-regulated in Transcription
  misc_feature: MA Experiment 20000171 PARAMETER Experiment Name: At_42deg_Heat_P Parameter: Age (day) Value: 14
  misc_feature: MA Experiment 20000171 PARAMETER Experiment Name: At_42deg_Heat_P Parameter: Organism Value: A. thaliana
  misc_feature: MA Experiment 20000171 PARAMETER Experiment Name: At_42deg_Heat_P Parameter: Plant Line Value: WS
  misc_feature: MA Experiment 20000171 PARAMETER Experiment Name: At_42deg_Heat_P Parameter: Temperature (deg C) Value: 42 vs. 22
  misc_feature: MA Experiment 20000171 PARAMETER Experiment Name: At_42deg_Heat_P Parameter: Timepoint (hr) Value: 1
  misc_feature: MA Experiment 20000171 PARAMETER Experiment Name: At_42deg_Heat_P Parameter: Tissue Value: Aerial
  misc_feature: MA Experiment ID: 20000265 Result: Down-regulated in Transcription
  misc_feature: MA Experiment 20000265 PARAMETER Experiment Name: At_Open_Flower_P Parameter: Age (day) Value: 21
  misc_feature: MA Experiment 20000265 PARAMETER Experiment Name: At_Open_Flower_P Parameter: Plant Line Value: WS
  misc_feature: MA Experiment 20000265 PARAMETER Experiment Name: At_Open_Flower_P Parameter: Tissue Value: Closed Flower vs. Whole Plant
  misc_feature: MA Experiment ID: 20000495 Result: Down-regulated in Transcription
  misc_feature: MA Experiment 20000495 PARAMETER Experiment Name: At_Guard_Cells_P Parameter: Harvest Date Value: 8/2/2002
  misc_feature: MA Experiment 20000495 PARAMETER Experiment Name: At_Guard_Cells_P Parameter: Organism Value: A. thaliana
  misc_feature: MA Experiment 20000495 PARAMETER Experiment Name: At_Guard_Cells_P Parameter: Tissue Value: Guard Cells vs. Leaves

SEQ ID NO: 91934 - protein, 302 aa, Arabidopsis thaliana; identical to SEQ ID NO: 88178
  peptide (1)..(302): Ceres Seq. ID no. 12706163
  misc_feature (1)..(302): Homolog of NCBI NO: 15238248 NR Description: putative protein; protein id: At5g10750.1, by cDNA: 2344. [Arabidopsis thaliana] >gi|11358294|pir||T50784
  misc_feature (1)..(302): Homolog of NCBI NO: 22655107 NR Description: putative protein [Arabidopsis thaliana]
  misc_feature (1)..(302): Homolog of NCBI NO: 21592409 NR Description: unknown [Arabidopsis thaliana]
  misc_feature (9)..(300): Homolog of NCBI NO: 15238672 NR Description: putative protein; protein id: At5g24990.1, by cDNA: gi_15028368, supported by cDNA: gi_19310654 [Arabidopsis >gi|15028369|gb|AAK76661.1| unknown protein [Arabidopsis
  misc_feature (6)..(301): Homolog of NCBI NO: 15238674 NR Description: putative protein; protein id: At5g25010.1
  misc_feature (168)..(302): Homolog of NCBI NO: 15238675 NR Description: putative protein; protein id: At5g25020.1
  misc_feature (15)..(142): Homolog of NCBI NO: 15238675 NR Description: putative protein; protein id: At5g25020.1
  misc_feature (22)..(275): Homolog of NCBI NO: 18390605 NR Description: expressed protein; protein id: At1g06050.1,
  misc_feature (22)..(275): Homolog of NCBI NO: 25406892 NR Description: hypothetical protein [imported] - Arabidopsis >gi|8810466|gb|AAF80127.1|AC024174_9 Contains similarity to an protein T1B3.16 gi|4432844 from Arabidopsis thaliana BAC from
  misc_feature (22)..(275): Homolog of NCBI NO: 21618178 NR Description: unknown [Arabidopsis thaliana]

SEQ ID NO: 91935 - protein, 216 aa, Arabidopsis thaliana; identical to SEQ ID NO: 26282
  peptide (1)..(216): Ceres Seq. ID no. 12706164
  misc_feature (1)..(216): Homolog of NCBI NO: 15238248 NR Description: putative protein; protein id: At5g10750.1, by cDNA: 2344. [Arabidopsis thaliana] >gi|11358294|pir||T50784
  misc_feature (1)..(216): Homolog of NCBI NO: 22655107 NR Description: putative protein [Arabidopsis thaliana]
  misc_feature (1)..(216): Homolog of NCBI NO: 21592409 NR Description: unknown [Arabidopsis thaliana]
  misc_feature (1)..(214): Homolog of NCBI NO: 15238672 NR Description: putative protein; protein id: At5g24990.1, by cDNA: gi_15028368, supported by cDNA: gi_19310654 [Arabidopsis >gi|15028369|gb|AAK76661.1| unknown protein [Arabidopsis
  misc_feature (1)..(215): Homolog of NCBI NO: 15238674 NR Description: putative protein; protein id: At5g25010.1
  misc_feature (82)..(216): Homolog of NCBI NO: 15238675 NR Description: putative protein; protein id: At5g25020.1
  misc_feature (1)..(56): Homolog of NCBI NO: 15238675 NR Description: putative protein; protein id: At5g25020.1
  misc_feature (1)..(189): Homolog of NCBI NO: 18390605 NR Description: expressed protein; protein id: At1g06050.1,
  misc_feature (1)..(189): Homolog of NCBI NO: 25406892 NR Description: hypothetical protein [imported] - Arabidopsis >gi|8810466|gb|AAF80127.1|AC024174_9 Contains similarity to an protein T1B3.16 gi|4432844 from Arabidopsis thaliana BAC from
  misc_feature (1)..(189): Homolog of NCBI NO: 21618178 NR Description: unknown [Arabidopsis thaliana]

SEQ ID NO: 91936 - DNA, 1788 bp, Arabidopsis thaliana; identical to SEQ ID NO: 88180
  misc_feature (1)..(1788): Ceres Seq. ID no. 12706214
  misc_feature: MA Experiment ID: 108434 Result: Up-regulated in Transcription
  misc_feature: MA Experiment 108434 PARAMETER Experiment Name: At_Root_Tips_cDNA_P Parameter: Tissue Value: Root Tips
  misc_feature: MA Experiment ID: 108435 Result: Up-regulated in Transcription
  misc_feature: MA Experiment 108435 PARAMETER Experiment Name: At_stm_Mutants_cDNA_P Parameter: Plant Line Value: wt Landsburg vs stm
  misc_feature: MA Experiment 108435 PARAMETER Experiment Name: At_stm_Mutants_cDNA_P Parameter: Tissue Value: Shoot Apical Meristem Region
  misc_feature: MA Experiment ID: 108461 Result: Down-regulated in Transcription
  misc_feature: MA Experiment 108461 PARAMETER Experiment Name: At_Germinating_Seeds_cDNA_P Parameter: Age (day) Value: 1 vs. 0
  misc_feature: MA Experiment 108461 PARAMETER Experiment Name: At_Germinating_Seeds_cDNA_P Parameter: Tissue Value: Germinating Seeds
  misc_feature: MA Experiment ID: 108462 Result: Down-regulated in Transcription
  misc_feature: MA Experiment 108462 PARAMETER Experiment Name: At_Germinating_Seeds_cDNA_P Parameter: Age (day) Value: 2 vs. 0
  misc_feature: MA Experiment 108462 PARAMETER Experiment Name: At_Germinating_Seeds_cDNA_P Parameter: Tissue Value: Germinating Seeds
  misc_feature: MA Experiment ID: 108463 Result: Down-regulated in Transcription
  misc_feature: MA Experiment 108463 PARAMETER Experiment Name: At_Germinating_Seeds_cDNA_P Parameter: Age (day) Value: 3 vs. 0
  misc_feature: MA Experiment 108463 PARAMETER Experiment Name: At_Germinating_Seeds_cDNA_P Parameter: Tissue Value: Germinating Seeds
  misc_feature: MA Experiment ID: 108464 Result: Down-regulated in Transcription
  misc_feature: MA Experiment 108464 PARAMETER Experiment Name: At_Germinating_Seeds_cDNA_P Parameter: Age (day) Value: 4 vs. 0
  misc_feature: MA Experiment 108464 PARAMETER Experiment Name: At_Germinating_Seeds_cDNA_P Parameter: Tissue Value: Germinating Seeds
  misc_feature: MA Experiment ID: 20000180 Result: Down-regulated in Transcription
  misc_feature: MA Experiment 20000180 PARAMETER Experiment Name: At_Germinating_Seeds_P Parameter: Age (hr) Value: 24 vs. 0
  misc_feature: MA Experiment 20000180 PARAMETER Experiment Name: At_Germinating_Seeds_P Parameter: Tissue Value: Germinating Seeds
  misc_feature: MA Experiment ID: 20001558 Result: Up-regulated in Transcription
  misc_feature: MA Experiment 20001558 PARAMETER Experiment Name: At_Drought_Soil_Dry_P Parameter: Age (day) Value: 27
  misc_feature: MA Experiment 20001558 PARAMETER Experiment Name: At_Drought_Soil_Dry_P Parameter: Organism Value: A. thaliana
  misc_feature: MA Experiment 20001558 PARAMETER Experiment Name: At_Drought_Soil_Dry_P Parameter: Plant Line Value: WS
  misc_feature: MA Experiment 20001558 PARAMETER Experiment Name: At_Drought_Soil_Dry_P Parameter: Post Timepoint (hr) Value: 6
  misc_feature: MA Experiment 20001558 PARAMETER Experiment Name: At_Drought_Soil_Dry_P Parameter: Post-Treatment Value: Re-Water vs. No Drought
  misc_feature: MA Experiment 20001558 PARAMETER Experiment Name: At_Drought_Soil_Dry_P Parameter: Timepoint (day) Value: 13
  misc_feature: MA Experiment 20001558 PARAMETER Experiment Name: At_Drought_Soil_Dry_P Parameter: Treatment Value: Drought vs. No Drought

SEQ ID NO: 91937 - protein, 595 aa, Arabidopsis thaliana; identical to SEQ ID NO: 88181
  peptide (1)..(595): Ceres Seq. ID no. 12706215
  misc_feature (91)..(298): Pfam Name: DEAD/DEAH box helicase Pfam Description: DEAD/DEAH box helicase
  misc_feature (9)..(457): Homolog of NCBI NO: 11358797 NR Description: RNA helicase RH15 [imported] - Arabidopsis (fragment) >gi|3776005|emb|CAA09205.1| RNA helicase [Arabidopsis
  misc_feature (33)..(457): Homolog of NCBI NO: 18416486 NR Description: DEAD/DEAH box RNA helicase, putative; protein id:
  misc_feature (33)..(456): Homolog of NCBI NO: 8953379 NR Description: DEAD BOX RNA helicase RH15-like protein
  misc_feature (33)..(457): Homolog of NCBI NO: 18416493 NR Description: DEAD/DEAH box RNA helicase, putative; protein id: supported by cDNA: gi_14190380, supported by cDNA: gi_16323359 thaliana] >gi|14190381|gb|AAK55671.1|AF378868_1
  misc_feature (33)..(456): Homolog of NCBI NO: 8953382 NR Description: DEAD BOX RNA helicase RH15 [Arabidopsis thaliana]
  misc_feature (35)..(435): Homolog of NCBI NO: 34913868 NR Description: putative DEAD BOX RNA helicase [Oryza sativa
  misc_feature (38)..(457): Homolog of NCBI NO: 28278325 NR Description: Unknown (protein for MGC:55433) [Danio rerio]
  misc_feature (43)..(457): Homolog of NCBI NO: 16758334 NR Description: nuclear RNA helicase, DECD variant of DEAD box [Rattus norvegicus] >gi|3132829|gb|AAC16391.1| nuclear RNA
  misc_feature (43)..(458): Homolog of NCBI NO: 19115173 NR Description: putative ATP-dependent RNA helicase
  misc_feature (43)..(278): Homolog of NCBI NO: 21040373 NR Description: DEAD/H (Asp-Glu-Ala-Asp/His) box polypeptide 39, >gi|14714632|gb|AAH10455.1|AAH10455 Unknown (protein for

SEQ ID NO: 91938 - protein, 563 aa, Arabidopsis thaliana; identical to SEQ ID NO: 88182
  peptide (1)..(563): Ceres Seq. ID no. 12706216
  misc_feature (59)..(266): Pfam Name: DEAD/DEAH box helicase Pfam Description: DEAD/DEAH box helicase
  misc_feature (1)..(425): Homolog of NCBI NO: 11358797 NR Description: RNA helicase RH15 [imported] - Arabidopsis (fragment) >gi|3776005|emb|CAA09205.1| RNA helicase [Arabidopsis
  misc_feature (1)..(425): Homolog of NCBI NO: 18416486 NR Description: DEAD/DEAH box RNA helicase, putative; protein id:
  misc_feature (1)..(424): Homolog of NCBI NO: 8953379 NR Description: DEAD BOX RNA helicase RH15-like protein
  misc_feature (1)..(425): Homolog of NCBI NO: 18416493 NR Description: DEAD/DEAH box RNA helicase, putative; protein id: supported by cDNA: gi_14190380, supported by cDNA: gi_16323359 thaliana] >gi|14190381|gb|AAK55671.1|AF378868_1
  misc_feature (1)..(424): Homolog of NCBI NO: 8953382 NR Description: DEAD BOX RNA helicase RH15 [Arabidopsis thaliana]
  misc_feature (3)..(403): Homolog of NCBI NO: 34913868 NR Description: putative DEAD BOX RNA helicase [Oryza sativa
  misc_feature (6)..(425): Homolog of NCBI NO: 28278325 NR Description: Unknown (protein for MGC:55433) [Danio rerio]
  misc_feature (11)..(425): Homolog of NCBI NO: 16758334 NR Description: nuclear RNA helicase, DECD variant of DEAD box [Rattus norvegicus] >gi|3132829|gb|AAC16391.1| nuclear RNA
  misc_feature (11)..(426): Homolog of NCBI NO: 19115173 NR Description: putative ATP-dependent RNA helicase
  misc_feature (11)..(246): Homolog of NCBI NO: 21040373 NR Description: DEAD/H (Asp-Glu-Ala-Asp/His) box polypeptide 39, >gi|14714632|gb|AAH10455.1|AAH10455 Unknown (protein for

SEQ ID NO: 91939 - protein, 480 aa, Arabidopsis thaliana; identical to SEQ ID NO: 88183
  peptide (1)..(480): Ceres Seq. ID no. 12706217
  misc_feature (1)..(183): Pfam Name: DEAD/DEAH box helicase Pfam Description: DEAD/DEAH box helicase
  misc_feature (1)..(342): Homolog of NCBI NO: 11358797 NR Description: RNA helicase RH15 [imported] - Arabidopsis (fragment) >gi|3776005|emb|CAA09205.1| RNA helicase [Arabidopsis
  misc_feature (1)..(342): Homolog of NCBI NO: 18416486 NR Description: DEAD/DEAH box RNA helicase, putative; protein id:
  misc_feature (1)..(341): Homolog of NCBI NO: 8953379 NR Description: DEAD BOX RNA helicase RH15-like protein
  misc_feature (1)..(342): Homolog of NCBI NO: 18416493 NR Description: DEAD/DEAH box RNA helicase, putative; protein id: supported by cDNA: gi_14190380, supported by cDNA: gi_16323359 thaliana] >gi|14190381|gb|AAK55671.1|AF378868_1
  misc_feature (1)..(341): Homolog of NCBI NO: 8953382 NR Description: DEAD BOX RNA helicase RH15 [Arabidopsis thaliana]
  misc_feature (1)..(320): Homolog of NCBI NO: 34913868 NR Description: putative DEAD BOX RNA helicase [Oryza sativa
  misc_feature (1)..(342): Homolog of NCBI NO: 28278325 NR Description: Unknown (protein for MGC:55433) [Danio rerio]
  misc_feature (1)..(342): Homolog of NCBI NO: 16758334 NR Description: nuclear RNA helicase, DECD variant of DEAD box [Rattus norvegicus] >gi|3132829|gb|AAC16391.1| nuclear RNA
  misc_feature (1)..(343): Homolog of NCBI NO: 19115173 NR Description: putative ATP-dependent RNA helicase
  misc_feature (1)..(163): Homolog of NCBI NO: 21040373 NR Description: DEAD/H (Asp-Glu-Ala-Asp/His) box polypeptide 39, >gi|14714632|gb|AAH10455.1|AAH10455 Unknown (protein for

SEQ ID NO: 91940 - DNA, 1551 bp, Arabidopsis thaliana; identical to SEQ ID NO: 88184
  misc_feature (1)..(1551): Ceres Seq. ID no. 12706251
  misc_feature: MA Experiment ID: 20000440 Result: Up-regulated in Transcription
  misc_feature: MA Experiment 20000440 PARAMETER Experiment Name: At_Closed-Flower__Sub_P Parameter: Tissue Value: Closed Flower vs. Whole Plant

SEQ ID NO: 91941 - protein, 516 aa, Arabidopsis thaliana; identical to SEQ ID NO: 88185
  peptide (1)..(516): Ceres Seq. ID no. 12706252
  misc_feature (1)..(340): Homolog of NCBI NO: 15239047 NR Description: putative protein; protein id: At5g11410.1 thaliana] >gi|8953403|emb|CAB96676.1| putative protein
  misc_feature (338)..(516): Homolog of NCBI NO: 15239043 NR Description: putative protein; protein id: At5g11400.1 thaliana] >gi|8953402|emb|CAB96675.1| putative protein
  misc_feature (1)..(234): Homolog of NCBI NO: 15239043 NR Description: putative protein; protein id: At5g11400.1 thaliana] >gi|8953402|emb|CAB96675.1| putative protein
  misc_feature (247)..(340): Homolog of NCBI NO: 15239043 NR Description: putative protein; protein id: At5g11400.1 thaliana] >gi|8953402|emb|CAB96675.1| putative protein
  misc_feature (6)..(343): Homolog of NCBI NO: 25287650 NR Description: hypothetical protein F15M4.14 [imported] -
  misc_feature (37)..(343): Homolog of NCBI NO: 30699159 NR Description: protein kinase, putative [Arabidopsis thaliana]
  misc_feature (33)..(338): Homolog of NCBI NO: 38345396 NR Description: OSJNBa0017B10.2 [Oryza sativa (japonica
  misc_feature (23)..(343): Homolog of NCBI NO: 18398350 NR Description: putative protein kinase; protein id: At2g17220.1, by cDNA: 13257., supported by cDNA: gi_13877652, supported by gi_15146243 [Arabidopsis thaliana]
  misc_feature (23)..(343): Homolog of NCBI NO: 25287605 NR Description: probable protein kinase [imported] - Arabidopsis
  misc_feature (23)..(343): Homolog of NCBI NO: 21537344 NR Description: putative protein kinase [Arabidopsis thaliana]

SEQ ID NO: 91942 - protein, 464 aa, Arabidopsis thaliana; identical to SEQ ID NO: 88186
  peptide (1)..(464): Ceres Seq. ID no. 12706253
  misc_feature (1)..(288): Homolog of NCBI NO: 15239047 NR Description: putative protein; protein id: At5g11410.1 thaliana] >gi|8953403|emb|CAB96676.1| putative protein
  misc_feature (286)..(464): Homolog of NCBI NO: 15239043 NR Description: putative protein; protein id: At5g11400.1 thaliana] >gi|8953402|emb|CAB96675.1| putative protein
  misc_feature (1)..(182): Homolog of NCBI NO: 15239043 NR Description: putative protein; protein id: At5g11400.1 thaliana] >gi|8953402|emb|CAB96675.1| putative protein
  misc_feature (195)..(288): Homolog of NCBI NO: 15239043 NR Description: putative protein; protein id: At5g11400.1 thaliana] >gi|8953402|emb|CAB96675.1| putative protein
  misc_feature (1)..(291): Homolog of NCBI NO: 25287650 NR Description: hypothetical protein F15M4.14 [imported] -
  misc_feature (1)..(291): Homolog of NCBI NO: 30699159 NR Description: protein kinase, putative [Arabidopsis thaliana]
  misc_feature (1)..(286): Homolog of NCBI NO: 38345396 NR Description: OSJNBa0017B10.2 [Oryza sativa (japonica
  misc_feature (1)..(291): Homolog of NCBI NO: 18398350 NR Description: putative protein kinase; protein id: At2g17220.1, by cDNA: 13257., supported by cDNA: gi_13877652, supported by gi_15146243 [Arabidopsis thaliana]
  misc_feature (1)..(291): Homolog of NCBI NO: 25287605 NR Description: probable protein kinase [imported] - Arabidopsis
  misc_feature (1)..(291): Homolog of NCBI NO: 21537344 NR Description: putative protein kinase [Arabidopsis thaliana]

SEQ ID NO: 91943 - protein, 429 aa, Arabidopsis thaliana; identical to SEQ ID NO: 88187
  peptide (1)..(429): Ceres Seq. ID no. 12706254
  misc_feature (1)..(253): Homolog of NCBI NO: 15239047 NR Description: putative protein; protein id: At5g11410.1 thaliana] >gi|8953403|emb|CAB96676.1| putative protein
  misc_feature (251)..(429): Homolog of NCBI NO: 15239043 NR Description: putative protein; protein id: At5g11400.1 thaliana] >gi|8953402|emb|CAB96675.1| putative protein
  misc_feature (1)..(147): Homolog of NCBI NO: 15239043 NR Description: putative protein; protein id: At5g11400.1 thaliana] >gi|8953402|emb|CAB96675.1| putative protein
  misc_feature (160)..(253): Homolog of NCBI NO: 15239043 NR Description: putative protein; protein id: At5g11400.1 thaliana] >gi|8953402|emb|CAB96675.1| putative protein
  misc_feature (1)..(256): Homolog of NCBI NO: 25287650 NR Description: hypothetical protein F15M4.14 [imported] -
  misc_feature (1)..(256): Homolog of NCBI NO: 30699159 NR Description: protein kinase, putative [Arabidopsis thaliana]
  misc_feature (1)..(251): Homolog of NCBI NO: 38345396 NR Description: OSJNBa0017B10.2 [Oryza sativa (japonica
  misc_feature (1)..(256): Homolog of NCBI NO: 18398350 NR Description: putative protein kinase; protein id: At2g17220.1, by cDNA: 13257., supported by cDNA: gi_13877652, supported by gi_15146243 [Arabidopsis thaliana]
  misc_feature (1)..(256): Homolog of NCBI NO: 25287605 NR Description: probable protein kinase [imported] - Arabidopsis
  misc_feature (1)..(256): Homolog of NCBI NO: 21537344 NR Description: putative protein kinase [Arabidopsis thaliana]

SEQ ID NO: 91944 - DNA, 1462 bp, Arabidopsis thaliana; identical to SEQ ID NO: 88188
  misc_feature (1)..(1462): Ceres Seq. ID no. 12706262
  misc_feature: MA Experiment ID: 108461 Result: Down-regulated in Transcription
  misc_feature: MA Experiment 108461 PARAMETER Experiment Name: At_Germinating_Seeds_cDNA_P Parameter: Age (day) Value: 1 vs. 0
  misc_feature: MA Experiment 108461 PARAMETER Experiment Name: At_Germinating_Seeds_cDNA_P Parameter: Tissue Value: Germinating Seeds
  misc_feature: MA Experiment ID: 108462 Result: Down-regulated in Transcription
  misc_feature: MA Experiment 108462 PARAMETER Experiment Name: At_Germinating_Seeds_cDNA_P Parameter: Age (day) Value: 2 vs. 0
  misc_feature: MA Experiment 108462 PARAMETER Experiment Name: At_Germinating_Seeds_cDNA_P Parameter: Tissue Value: Germinating Seeds
  misc_feature: MA Experiment ID: 108463 Result: Down-regulated in Transcription
  misc_feature: MA Experiment 108463 PARAMETER Experiment Name: At_Germinating_Seeds_cDNA_P Parameter: Age (day) Value: 3 vs. 0
  misc_feature: MA Experiment 108463 PARAMETER Experiment Name: At_Germinating_Seeds_cDNA_P Parameter: Tissue Value: Germinating Seeds
  misc_feature: MA Experiment ID: 108464 Result: Down-regulated in Transcription
  misc_feature: MA Experiment 108464 PARAMETER Experiment Name: At_Germinating_Seeds_cDNA_P Parameter: Age (day) Value: 4 vs. 0
  misc_feature: MA Experiment 108464 PARAMETER Experiment Name: At_Germinating_Seeds_cDNA_P Parameter: Tissue Value: Germinating Seeds
  misc_feature: MA Experiment ID: 108474 Result: Down-regulated in Transcription
  misc_feature: MA Experiment 108474 PARAMETER Experiment Name: At_Drought_Flowers_cDNA_P Parameter: Timepoint (hr) Value: null
  misc_feature: MA Experiment 108474 PARAMETER Experiment Name: At_Drought_Flowers_cDNA_P Parameter: Treatment Value: Drought vs. No Drought
  misc_feature: MA Experiment ID: 108561 Result: Down-regulated in Transcription
  misc_feature: MA Experiment 108561 PARAMETER Experiment Name: At_100uM_ABA_cDNA_P Parameter: Timepoint (hr) Value: 6
  misc_feature: MA Experiment 108561 PARAMETER Experiment Name: At_100uM_ABA_cDNA_P Parameter: Tissue Value: Aerial
  misc_feature: MA Experiment 108561 PARAMETER Experiment Name: At_100uM_ABA_cDNA_P Parameter: Treatment Value: 100uM ABA vs. No Treatment
  misc_feature: MA Experiment ID: 108569 Result: Up-regulated in Transcription
  misc_feature: MA Experiment 108569 PARAMETER Experiment Name: At_0.001%_MeJA__cDNA_P Parameter: Timepoint (hr) Value: 6
  misc_feature: MA Experiment 108569 PARAMETER Experiment Name: At_0.001%_MeJA__cDNA_P Parameter: Tissue Value: Aerial
  misc_feature: MA Experiment 108569 PARAMETER Experiment Name: At_0.001%_MeJA__cDNA_P Parameter: Treatment Value: 0.001% MeJA vs. No Treatment
  misc_feature: MA Experiment ID: 108572 Result: Down-regulated in Transcription
  misc_feature: MA Experiment 108572 PARAMETER Experiment Name: At_Drought_cDNA_P Parameter: Timepoint (hr) Value: 1
  misc_feature: MA Experiment 108572 PARAMETER Experiment Name: At_Drought_cDNA_P Parameter: Tissue Value: Aerial
  misc_feature: MA Experiment 108572 PARAMETER Experiment Name: At_Drought_cDNA_P Parameter: Treatment Value: Drought vs. No Drought
  misc_feature: MA Experiment ID: 108576 Result: Down-regulated in Transcription
  misc_feature: MA Experiment 108576 PARAMETER Experiment Name: At_42deg_Heat_cDNA_P Parameter: Temperature (deg C) Value: 42 vs. 22
  misc_feature: MA Experiment 108576 PARAMETER Experiment Name: At_42deg_Heat_cDNA_P Parameter: Timepoint (hr) Value: 1
  misc_feature: MA Experiment 108576 PARAMETER Experiment Name: At_42deg_Heat_cDNA_P Parameter: Tissue Value: Aerial
  misc_feature: MA Experiment ID: 108577 Result: Down-regulated in Transcription
  misc_feature: MA Experiment 108577 PARAMETER Experiment Name: At_42deg_Heat_cDNA_P Parameter: Temperature (deg C) Value: 42 vs. 22
  misc_feature: MA Experiment 108577 PARAMETER Experiment Name: At_42deg_Heat_cDNA_P Parameter: Timepoint (hr) Value: 6
  misc_feature: MA Experiment 108577 PARAMETER Experiment Name: At_42deg_Heat_cDNA_P Parameter: Tissue Value: Aerial
  misc_feature: MA Experiment ID: 108585 Result: Down-regulated in Transcription
  misc_feature: MA Experiment 108585 PARAMETER Experiment Name: At_5mM_NaNP_cDNA_P Parameter: Timepoint (hr) Value: 6
  misc_feature: MA Experiment 108585 PARAMETER Experiment Name: At_5mM_NaNP_cDNA_P Parameter: Tissue Value: Aerial
  misc_feature: MA Experiment 108585 PARAMETER Experiment Name: At_5mM_NaNP_cDNA_P Parameter: Treatment Value: null
  misc_feature: MA Experiment ID: 108595 Result: Down-regulated in Transcription
  misc_feature: MA Experiment 108595 PARAMETER Experiment Name: At_Ler-pi_Ovule_cDNA_P Parameter: Plant Line Value: null
  misc_feature: MA Experiment ID: 108607 Result: Down-regulated in Transcription
  misc_feature: MA Experiment 108607 PARAMETER Experiment Name: At_100uM_ABA_cDNA_P Parameter: Timepoint (hr) Value: 4
  misc_feature: MA Experiment 108607 PARAMETER Experiment Name: At_100uM_ABA_cDNA_P Parameter: Tissue Value: Aerial
  misc_feature: MA Experiment 108607 PARAMETER Experiment Name: At_100uM_ABA_cDNA_P Parameter: Treatment Value: 100uM ABA vs. No Treatment
  misc_feature: MA Experiment ID: 20000069 Result: Down-regulated in Transcription
  misc_feature: MA Experiment 20000069 PARAMETER Experiment Name: At_100uM_ABA_Mutants_cDNA_P Parameter: Plant Line Value: CS23
  misc_feature: MA Experiment 20000069 PARAMETER Experiment Name: At_100uM_ABA_Mutants_cDNA_P Parameter: Timepoint (hr) Value: 6
  misc_feature: MA Experiment 20000069 PARAMETER Experiment Name: At_100uM_ABA_Mutants_cDNA_P Parameter: Tissue Value: Aerial
  misc_feature: MA Experiment 20000069 PARAMETER Experiment Name: At_100uM_ABA_Mutants_cDNA_P Parameter: Treatment Value: 100uM ABA vs. No Treatment
  misc_feature: MA Experiment ID: 20000070 Result: Down-regulated in Transcription
  misc_feature: MA Experiment 20000070 PARAMETER Experiment Name: At_100uM_ABA_Mutants_cDNA_P Parameter: Plant Line Value: CS24
  misc_feature: MA Experiment 20000070 PARAMETER Experiment Name: At_100uM_ABA_Mutants_cDNA_P Parameter: Timepoint (hr) Value: 6
  misc_feature: MA Experiment 20000070 PARAMETER Experiment Name: At_100uM_ABA_Mutants_cDNA_P Parameter: Tissue Value: Aerial
  misc_feature: MA Experiment 20000070 PARAMETER Experiment Name: At_100uM_ABA_Mutants_cDNA_P Parameter: Treatment Value: 100uM ABA vs. No Treatment
  misc_feature: MA Experiment ID: 20000071 Result: Down-regulated in Transcription
  misc_feature: MA Experiment 20000071 PARAMETER Experiment Name: At_100uM_ABA_Mutants_cDNA_P Parameter: Plant Line Value: CS8104
  misc_feature: MA Experiment 20000071 PARAMETER Experiment Name: At_100uM_ABA_Mutants_cDNA_P Parameter: Timepoint (hr) Value: 6
  misc_feature: MA Experiment 20000071 PARAMETER Experiment Name: At_100uM_ABA_Mutants_cDNA_P Parameter: Tissue Value: Aerial
  misc_feature: MA Experiment 20000071 PARAMETER Experiment Name: At_100uM_ABA_Mutants_cDNA_P Parameter: Treatment Value: 100uM ABA vs. No Treatment
  misc_feature: MA Experiment ID: 20000072 Result: Down-regulated in Transcription
  misc_feature: MA Experiment 20000072 PARAMETER Experiment Name: At_100uM_ABA_Mutants_cDNA_P Parameter: Plant Line Value: CS8105
  misc_feature: MA Experiment 20000072 PARAMETER Experiment Name: At_100uM_ABA_Mutants_cDNA_P Parameter: Timepoint (hr) Value: 6
  misc_feature: MA Experiment 20000072 PARAMETER Experiment Name: At_100uM_ABA_Mutants_cDNA_P Parameter: Tissue Value: Aerial
  misc_feature: MA Experiment 20000072 PARAMETER Experiment Name: At_100uM_ABA_Mutants_cDNA_P Parameter: Treatment Value: 100uM ABA vs. No Treatment
  misc_feature: MA Experiment ID: 20000086 Result: Down-regulated in Transcription
  misc_feature: MA Experiment 20000086 PARAMETER Experiment Name: At_100uM_ABA_Mutants_cDNA_P Parameter: Plant Line Value: CS22
  misc_feature: MA Experiment 20000086 PARAMETER Experiment Name: At_100uM_ABA_Mutants_cDNA_P Parameter: Timepoint (hr) Value: 6
  misc_feature: MA Experiment 20000086 PARAMETER Experiment Name: At_100uM_ABA_Mutants_cDNA_P Parameter: Tissue Value: Aerial
  misc_feature: MA Experiment 20000086 PARAMETER Experiment Name: At_100uM_ABA_Mutants_cDNA_P Parameter: Treatment Value: 100uM ABA vs. No Treatment
  misc_feature: MA Experiment ID: 20000087 Result: Down-regulated in Transcription
  misc_feature: MA Experiment 20000087 PARAMETER Experiment Name: At_100uM_ABA_Mutants_cDNA_P Parameter: Plant Line Value: WS
  misc_feature: MA Experiment 20000087 PARAMETER Experiment Name: At_100uM_ABA_Mutants_cDNA_P Parameter: Timepoint (hr) Value: 6
  misc_feature: MA Experiment 20000087 PARAMETER Experiment Name: At_100uM_ABA_Mutants_cDNA_P Parameter: Tissue Value: Aerial
  misc_feature: MA Experiment 20000087 PARAMETER Experiment Name: At_100uM_ABA_Mutants_cDNA_P Parameter: Treatment Value: 100uM ABA vs. No Treatment
  misc_feature: MA Experiment ID: 20000088 Result: Down-regulated in Transcription
  misc_feature: MA Experiment 20000088 PARAMETER Experiment Name: At_100uM_ABA_Mutants_cDNA_P Parameter: Plant Line Value: Landsberg
  misc_feature: MA Experiment 20000088 PARAMETER Experiment Name: At_100uM_ABA_Mutants_cDNA_P Parameter: Timepoint (hr) Value: 6
  misc_feature: MA Experiment 20000088 PARAMETER Experiment Name: At_100uM_ABA_Mutants_cDNA_P Parameter: Tissue Value: Aerial
  misc_feature: MA Experiment 20000088 PARAMETER Experiment Name: At_100uM_ABA_Mutants_cDNA_P Parameter: Treatment Value: 100uM ABA vs. No Treatment
  misc_feature: MA Experiment ID: 20000113 Result: Down-regulated in Transcription
  misc_feature: MA Experiment 20000113 PARAMETER Experiment Name: At_42deg_Heat_cDNA_P Parameter: Temperature (deg C) Value: 42 vs. 22
  misc_feature: MA Experiment 20000113 PARAMETER Experiment Name: At_42deg_Heat_cDNA_P Parameter: Timepoint (hr) Value: 8
  misc_feature: MA Experiment 20000113 PARAMETER Experiment Name: At_42deg_Heat_cDNA_P Parameter: Tissue Value: Aerial
  misc_feature: MA Experiment ID: 20000117 Result: Down-regulated in Transcription
  misc_feature: MA Experiment 20000117 PARAMETER Experiment Name: At_100uM_ABA_Mutants_cDNA_P Parameter: Plant Line Value: Columbia
  misc_feature: MA Experiment 20000117 PARAMETER Experiment Name: At_100uM_ABA_Mutants_cDNA_P Parameter: Timepoint (hr) Value: 6
  misc_feature: MA Experiment 20000117 PARAMETER Experiment Name: At_100uM_ABA_Mutants_cDNA_P Parameter: Tissue Value: Aerial
  misc_feature: MA Experiment 20000117 PARAMETER Experiment Name: At_100uM_ABA_Mutants_cDNA_P Parameter: Treatment Value: 100uM ABA vs. No Treatment
  misc_feature: MA Experiment ID: 20000180 Result: Down-regulated in Transcription
  misc_feature: MA Experiment 20000180 PARAMETER Experiment Name: At_Germinating_Seeds_P Parameter: Age (hr) Value: 24 vs. 0
  misc_feature: MA Experiment 20000180 PARAMETER Experiment Name: At_Germinating_Seeds_P Parameter: Tissue Value: Germinating Seeds
  misc_feature: MA Experiment ID: 20000184 Result: Up-regulated in Transcription
  misc_feature: MA Experiment 20000184 PARAMETER Experiment Name: At_Shoots__P Parameter: Age (day) Value: 7
  misc_feature: MA Experiment 20000184 PARAMETER Experiment Name: At_Shoots__P Parameter: Tissue Value: Shoots vs. Whole Plant
  misc_feature: MA Experiment ID: 20000185 Result: Down-regulated in Transcription
  misc_feature: MA Experiment 20000185 PARAMETER Experiment Name: At_Roots__P Parameter: Age (day) Value: 7 vs. 21
  misc_feature: MA Experiment 20000185 PARAMETER Experiment Name: At_Roots__P Parameter: Organism Value: A. thaliana
  misc_feature: MA Experiment 20000185 PARAMETER Experiment Name: At_Roots__P Parameter: Tissue Value: Roots vs. Whole Plant
  misc_feature: MA Experiment ID: 20000224 Result: Down-regulated in Transcription
  misc_feature: MA Experiment ID: 20000234 Result: Down-regulated in Transcription
  misc_feature: MA Experiment 20000234 PARAMETER Experiment Name: At_Siliques_P Parameter: Age (day) Value: 21
  misc_feature: MA Experiment 20000234 PARAMETER Experiment Name: At_Siliques_P Parameter: Organism Value: A. thaliana
  misc_feature: MA Experiment 20000234 PARAMETER Experiment Name: At_Siliques_P Parameter: Plant Line Value: WS
  misc_feature: MA Experiment 20000234 PARAMETER Experiment Name: At_Siliques_P Parameter: Tissue Value: Less Than 5mm Siliques vs. Whole Plant
  misc_feature: MA Experiment ID: 20000235 Result: Down-regulated in Transcription
  misc_feature: MA Experiment 20000235 PARAMETER Experiment Name: At_Siliques_P Parameter: Age (day) Value: 21
  misc_feature: MA Experiment 20000235 PARAMETER Experiment Name: At_Siliques_P Parameter: Organism Value: A. thaliana
  misc_feature: MA Experiment 20000235 PARAMETER Experiment Name: At_Siliques_P Parameter: Plant Line Value: WS
  misc_feature: MA Experiment 20000235 PARAMETER Experiment Name: At_Siliques_P Parameter: Tissue Value: 5-10mm Siliques vs. Whole Plant
  misc_feature: MA Experiment ID: 20000264 Result: Down-regulated in Transcription
  misc_feature: MA Experiment 20000264 PARAMETER Experiment Name: At_Open_Flower_P Parameter: Age (day) Value: 21
  misc_feature: MA Experiment 20000264 PARAMETER Experiment Name: At_Open_Flower_P Parameter: Plant Line Value: WS
  misc_feature: MA Experiment 20000264 PARAMETER Experiment Name: At_Open_Flower_P Parameter: Tissue Value: Open Flower vs. Whole Plant
  misc_feature: MA Experiment ID: 20000267 Result: Down-regulated in Transcription
  misc_feature: MA Experiment 20000267 PARAMETER Experiment Name: At_Drought_P Parameter: Age (day) Value: 7
  misc_feature: MA Experiment 20000267 PARAMETER Experiment Name: At_Drought_P Parameter: Organism Value: A. thaliana
  misc_feature: MA Experiment 20000267 PARAMETER Experiment Name: At_Drought_P Parameter: Plant Line Value: WS
  misc_feature: MA Experiment 20000267 PARAMETER Experiment Name: At_Drought_P Parameter: Timepoint (hr) Value: 6
  misc_feature: MA Experiment 20000267 PARAMETER Experiment Name: At_Drought_P Parameter: Tissue Value: Whole Plant
  misc_feature: MA Experiment 20000267 PARAMETER Experiment Name: At_Drought_P Parameter: Treatment Value: Drought vs. No Drought
  misc_feature: MA Experiment ID: 20000286 Result: Up-regulated in Transcription
  misc_feature: MA Experiment 20000286 PARAMETER Experiment Name: At_Open_Flower_P Parameter: Age (day) Value: 21
  misc_feature: MA Experiment 20000286 PARAMETER Experiment Name: At_Open_Flower_P Parameter: Plant Line Value: WS
  misc_feature: MA Experiment 20000286 PARAMETER Experiment Name: At_Open_Flower_P Parameter: Tissue Value: Half Open vs. Whole Plant
  misc_feature: MA Experiment ID: 20000437 Result: Down-regulated in Transcription
  misc_feature: MA Experiment 20000437 PARAMETER Experiment Name: At_Drought_P Parameter: Age (day) Value: 8
  misc_feature: MA Experiment 20000437 PARAMETER Experiment Name: At_Drought_P Parameter: Organism Value: A. thaliana
  misc_feature: MA Experiment 20000437 PARAMETER Experiment Name: At_Drought_P Parameter: Plant Line Value: WS
  misc_feature: MA Experiment 20000437 PARAMETER Experiment Name: At_Drought_P Parameter: Timepoint (hr) Value: 24
  misc_feature: MA Experiment 20000437 PARAMETER Experiment Name: At_Drought_P Parameter: Tissue Value: Whole Plant
  misc_feature: MA Experiment 20000437 PARAMETER Experiment Name: At_Drought_P Parameter: Treatment Value: Drought vs. No Drought
  misc_feature: MA Experiment ID: 20000438 Result: Up-regulated in Transcription
  misc_feature: MA Experiment 20000438 PARAMETER Experiment Name: At_Shoots__P Parameter: Age (day) Value: 14
  misc_feature: MA Experiment 20000438 PARAMETER Experiment Name: At_Shoots__P Parameter: Tissue Value: Shoots vs. Whole Plant
  misc_feature: MA Experiment ID: 20000439 Result: Down-regulated in Transcription
  misc_feature: MA Experiment 20000439 PARAMETER Experiment Name: At_Roots__P Parameter: Age (day) Value: 14 vs. 21
  misc_feature: MA Experiment 20000439 PARAMETER Experiment Name: At_Roots__P Parameter: Organism Value: A. thaliana
  misc_feature: MA Experiment 20000439 PARAMETER Experiment Name: At_Roots__P Parameter: Tissue Value: Roots vs. Whole Plant
  misc_feature: MA Experiment ID: 20000573 Result: Down-regulated in Transcription
  misc_feature: MA Experiment 20000573 PARAMETER Experiment Name: At_100uM_ABA_Mutants__P Parameter: Organism Value: A. thaliana
  misc_feature: MA Experiment 20000573 PARAMETER Experiment Name: At_100uM_ABA_Mutants__P Parameter: Plant Line Value: CS22 vs. Ler wt
  misc_feature: MA Experiment 20000573 PARAMETER Experiment Name: At_100uM_ABA_Mutants__P Parameter: Timepoint (hr) Value: N/A
  misc_feature: MA Experiment 20000573 PARAMETER Experiment Name: At_100uM_ABA_Mutants__P Parameter: Tissue Value: Whole Plant
  misc_feature: MA Experiment 20000573 PARAMETER Experiment Name: At_100uM_ABA_Mutants__P Parameter: Treatment Value: None
  misc_feature: MA Experiment ID: 20001554 Result: Down-regulated in Transcription
  misc_feature: MA Experiment 20001554 PARAMETER Experiment Name: At_Drought_Soil_Dry_P Parameter: Age (day) Value: 21
  misc_feature: MA Experiment 20001554 PARAMETER Experiment Name: At_Drought_Soil_Dry_P Parameter: Organism Value: A. thaliana
  misc_feature: MA Experiment 20001554 PARAMETER Experiment Name: At_Drought_Soil_Dry_P Parameter: Plant Line Value: WS
  misc_feature: MA Experiment 20001554 PARAMETER Experiment Name: At_Drought_Soil_Dry_P Parameter: Post Timepoint (hr) Value: None
  misc_feature: MA Experiment 20001554 PARAMETER Experiment Name: At_Drought_Soil_Dry_P Parameter: Post-Treatment Value: None
  misc_feature: MA Experiment 20001554 PARAMETER Experiment Name: At_Drought_Soil_Dry_P Parameter: Timepoint (day) Value: 7
  misc_feature: MA Experiment 20001554 PARAMETER Experiment Name: At_Drought_Soil_Dry_P Parameter: Treatment Value: Drought vs. No Drought
  misc_feature: MA Experiment ID: 20001555 Result: Down-regulated in Transcription
  misc_feature: MA Experiment 20001555 PARAMETER Experiment Name: At_Drought_Soil_Dry_P Parameter: Age (day) Value: 24
  misc_feature: MA Experiment 20001555 PARAMETER Experiment Name: At_Drought_Soil_Dry_P Parameter: Organism Value: A. thaliana
  misc_feature: MA Experiment 20001555 PARAMETER Experiment Name: At_Drought_Soil_Dry_P Parameter: Plant Line Value: WS
  misc_feature: MA Experiment 20001555 PARAMETER Experiment Name: At_Drought_Soil_Dry_P Parameter: Post Timepoint (hr) Value: None
  misc_feature: MA Experiment 20001555 PARAMETER Experiment Name: At_Drought_Soil_Dry_P Parameter: Post-Treatment Value: None
  misc_feature: MA Experiment 20001555 PARAMETER Experiment Name: At_Drought_Soil_Dry_P Parameter: Timepoint (day) Value: 10
  misc_feature: MA Experiment 20001555 PARAMETER Experiment Name: At_Drought_Soil_Dry_P Parameter: Treatment Value: Drought vs. No Drought
  misc_feature: MA Experiment ID: 20001558 Result: Up-regulated in Transcription
  misc_feature: MA Experiment 20001558 PARAMETER Experiment Name: At_Drought_Soil_Dry_P Parameter: Age (day) Value: 27
  misc_feature: MA Experiment 20001558 PARAMETER Experiment Name: At_Drought_Soil_Dry_P Parameter: Organism Value: A. thaliana
  misc_feature: MA Experiment 20001558 PARAMETER Experiment Name: At_Drought_Soil_Dry_P Parameter: Plant Line Value: WS
  misc_feature: MA Experiment 20001558 PARAMETER Experiment Name: At_Drought_Soil_Dry_P Parameter: Post Timepoint (hr) Value: 6
  misc_feature: MA Experiment 20001558 PARAMETER Experiment Name: At_Drought_Soil_Dry_P Parameter: Post-Treatment Value: Re-Water vs. No Drought
  misc_feature: MA Experiment 20001558 PARAMETER Experiment Name: At_Drought_Soil_Dry_P Parameter: Timepoint (day) Value: 13
  misc_feature: MA Experiment 20001558 PARAMETER Experiment Name: At_Drought_Soil_Dry_P Parameter: Treatment Value: Drought vs. No Drought
  misc_feature: MA Experiment ID: 20001761 Result: Up-regulated in Transcription
  misc_feature: MA Experiment 20001761 PARAMETER Experiment Name: At_50mM_NH4NO3_L-to-H_P Parameter: Timepoint (hr) Value: 4
  misc_feature: MA Experiment 20001761 PARAMETER Experiment Name: At_50mM_NH4NO3_L-to-H_P Parameter: Tissue Value: Siliques
  misc_feature: MA Experiment 20001761 PARAMETER Experiment Name: At_50mM_NH4NO3_L-to-H_P Parameter: Treatment Value: 50mM NH4NO3 vs 100mM Mannitol
  misc_feature: MA Experiment ID: 20001904 Result: Down-regulated in Transcription
  misc_feature: MA Experiment 20001904 PARAMETER Experiment Name: At_Drought_Reproduction_P Parameter: Age (day) Value: 37
  misc_feature: MA Experiment 20001904 PARAMETER Experiment Name: At_Drought_Reproduction_P Parameter: Organism Value: A. thaliana
  misc_feature: MA Experiment 20001904 PARAMETER Experiment Name: At_Drought_Reproduction_P Parameter: Plant Line Value: WS
  misc_feature: MA Experiment 20001904 PARAMETER Experiment Name: At_Drought_Reproduction_P Parameter: Timepoint (day) Value: 7
  misc_feature: MA Experiment 20001904 PARAMETER Experiment Name: At_Drought_Reproduction_P Parameter: Tissue Value: Rosettes
  misc_feature: MA Experiment 20001904 PARAMETER Experiment Name: At_Drought_Reproduction_P Parameter: Treatment Value: Drought vs. No Drought
  misc_feature: MA Experiment ID: 20001905 Result: Down-regulated in Transcription
  misc_feature: MA Experiment 20001905 PARAMETER Experiment Name: At_Drought_Reproduction_P Parameter: Age (day) Value: 40
  misc_feature: MA Experiment 20001905 PARAMETER Experiment Name: At_Drought_Reproduction_P Parameter: Organism Value: A. thaliana
  misc_feature: MA Experiment 20001905 PARAMETER Experiment Name: At_Drought_Reproduction_P Parameter: Plant Line Value: WS
  misc_feature: MA Experiment 20001905 PARAMETER Experiment Name: At_Drought_Reproduction_P Parameter: Timepoint (day) Value: 10
  misc_feature: MA Experiment 20001905 PARAMETER Experiment Name: At_Drought_Reproduction_P Parameter: Tissue Value: Rosettes
  misc_feature: MA Experiment 20001905 PARAMETER Experiment Name: At_Drought_Reproduction_P Parameter: Treatment Value: Drought vs. No Drought
  misc_feature: MA Experiment ID: 20001906 Result: Down-regulated in Transcription
  misc_feature: MA Experiment 20001906 PARAMETER Experiment Name: At_Drought_Reproduction_P Parameter: Age (day) Value: 35
  misc_feature: MA Experiment 20001906 PARAMETER Experiment Name: At_Drought_Reproduction_P Parameter: Organism Value: A. thaliana
  misc_feature: MA Experiment 20001906 PARAMETER Experiment Name: At_Drought_Reproduction_P Parameter: Plant Line Value: WS
  misc_feature: MA Experiment 20001906 PARAMETER Experiment Name: At_Drought_Reproduction_P Parameter: Timepoint (day) Value: 5
  misc_feature: MA Experiment 20001906 PARAMETER Experiment Name: At_Drought_Reproduction_P Parameter: Tissue Value: Siliques
  misc_feature: MA Experiment 20001906 PARAMETER Experiment Name: At_Drought_Reproduction_P Parameter: Treatment Value: Drought vs. No Drought

SEQ ID NO: 91945 - protein, 366 aa, Arabidopsis thaliana; identical to SEQ ID NO: 35908
  peptide (1)..(366): Ceres Seq. ID no. 12706263
  misc_feature (42)..(364): Pfam Name: Protein of unknown function, DUF642 Pfam Description: Protein of unknown function, DUF642
  misc_feature (1)..(366): Homolog of NCBI NO: 15239049 NR Description: putative protein; protein id: At5g11420.1, by cDNA: 25522., supported by cDNA: gi_15028264, supported by
  misc_feature (1)..(366): Homolog of NCBI NO: 23397043 NR Description: unknown protein [Arabidopsis thaliana]
  misc_feature (1)..(366): Homolog of NCBI NO: 21554402 NR Description: unknown [Arabidopsis thaliana]
  misc_feature (1)..(366): Homolog of NCBI NO: 15239438 NR Description: putative protein; protein id: At5g25460.1, by cDNA: 1351., supported by cDNA: gi_14423449, supported by gi_15809821 [Arabidopsis thaliana]
  misc_feature (1)..(366): Homolog of NCBI NO: 21537379 NR Description: unknown [Arabidopsis thaliana]
  misc_feature (1)..(366): Homolog of NCBI NO: 15809822 NR Description: AT5g25460/F18G18_200 [Arabidopsis thaliana]
  misc_feature (1)..(366): Homolog of NCBI NO: 7488898 NR Description: hypothetical protein - castor bean
  misc_feature (6)..(366): Homolog of NCBI NO: 18418018 NR Description: putative protein; protein id: At4g32460.1, by cDNA: 37529. [Arabidopsis thaliana]
  misc_feature (42)..(366): Homolog of NCBI NO: 7486632 NR Description: hypothetical protein F8B4.160 - Arabidopsis >gi|4049348|emb|CAA22573.1| putative protein [Arabidopsis >gi|7270150|emb|CAB79963.1| putative protein [Arabidopsis
  misc_feature (8)..(365): Homolog of NCBI NO: 7488741 NR Description: hypothetical protein precursor - alfalfa

SEQ ID NO: 91946 - protein, 340 aa, Arabidopsis thaliana; identical to SEQ ID NO: 35909
  peptide (1)..(340): Ceres Seq. ID no. 12706264
  misc_feature (16)..(338): Pfam Name: Protein of unknown function, DUF642 Pfam Description: Protein of unknown function, DUF642
  misc_feature (1)..(340): Homolog of NCBI NO: 15239049 NR Description: putative protein; protein id: At5g11420.1, by cDNA: 25522., supported by cDNA: gi_15028264, supported by
  misc_feature (1)..(340): Homolog of NCBI NO: 23397043 NR Description: unknown protein [Arabidopsis thaliana]
  misc_feature (1)..(340): Homolog of NCBI NO: 21554402 NR Description: unknown [Arabidopsis thaliana]
  misc_feature (1)..(340): Homolog of NCBI NO: 15239438 NR Description: putative protein; protein id: At5g25460.1, by cDNA: 1351., supported by cDNA: gi_14423449, supported by gi_15809821 [Arabidopsis thaliana]
  misc_feature (1)..(340): Homolog of NCBI NO: 21537379 NR Description: unknown [Arabidopsis thaliana]
  misc_feature (1)..(340): Homolog of NCBI NO: 15809822 NR Description: AT5g25460/F18G18_200 [Arabidopsis thaliana]
  misc_feature (1)..(340): Homolog of NCBI NO: 7488898 NR Description: hypothetical protein - castor bean
  misc_feature (1)..(340): Homolog of NCBI NO: 18418018 NR Description: putative protein; protein id: At4g32460.1, by cDNA: 37529. [Arabidopsis thaliana]
  misc_feature (16)..(340): Homolog of NCBI NO: 7486632 NR Description: hypothetical protein F8B4.160 - Arabidopsis >gi|4049348|emb|CAA22573.1| putative protein [Arabidopsis >gi|7270150|emb|CAB79963.1| putative protein [Arabidopsis
  misc_feature (1)..(339): Homolog of NCBI NO: 7488741 NR Description: hypothetical protein precursor - alfalfa

SEQ ID NO: 91947 - protein, 325 aa, Arabidopsis thaliana; identical to SEQ ID NO: 35910
  peptide (1)..(325): Ceres Seq. ID no. 12706265
  misc_feature (1)..(323): Pfam Name: Protein of unknown function, DUF642 Pfam Description: Protein of unknown function, DUF642
  misc_feature (1)..(325): Homolog of NCBI NO: 15239049 NR Description: putative protein; protein id: At5g11420.1, by cDNA: 25522., supported by cDNA: gi_15028264, supported by
  misc_feature (1)..(325): Homolog of NCBI NO: 23397043 NR Description: unknown protein [Arabidopsis thaliana]
  misc_feature (1)..(325): Homolog of NCBI NO: 21554402 NR Description: unknown [Arabidopsis thaliana]
  misc_feature (1)..(325): Homolog of NCBI NO: 15239438 NR Description: putative protein; protein id: At5g25460.1, by cDNA: 1351., supported by cDNA: gi_14423449, supported by gi_15809821 [Arabidopsis thaliana]
  misc_feature (1)..(325): Homolog of NCBI NO: 21537379 NR Description: unknown [Arabidopsis thaliana]
  misc_feature (1)..(325): Homolog of NCBI NO: 15809822 NR Description: AT5g25460/F18G18_200 [Arabidopsis thaliana]
  misc_feature (1)..(325): Homolog of NCBI NO: 7488898 NR Description: hypothetical protein - castor bean
  misc_feature (1)..(325): Homolog of NCBI NO: 18418018 NR Description: putative protein; protein id: At4g32460.1, by cDNA: 37529. [Arabidopsis thaliana]
  misc_feature (1)..(325): Homolog of NCBI NO: 7486632 NR Description: hypothetical protein F8B4.160 - Arabidopsis >gi|4049348|emb|CAA22573.1| putative protein [Arabidopsis >gi|7270150|emb|CAB79963.1| putative protein [Arabidopsis
  misc_feature (1)..(324): Homolog of NCBI NO: 7488741 NR Description: hypothetical protein precursor - alfalfa

SEQ ID NO: 91948 - DNA, 1155 bp, Arabidopsis thaliana; identical to SEQ ID NO: 88192
  misc_feature (1)..(1155): Ceres Seq. ID no. 12706276
  misc_feature: MA Experiment ID: 108488 Result: Down-regulated in Transcription
  misc_feature: MA Experiment ID: 108576 Result: Up-regulated in Transcription
  misc_feature: MA Experiment 108576 PARAMETER Experiment Name: At_42deg_Heat_cDNA_P Parameter: Temperature (deg C) Value: 42 vs. 22
  misc_feature: MA Experiment 108576 PARAMETER Experiment Name: At_42deg_Heat_cDNA_P Parameter: Timepoint (hr) Value: 1
  misc_feature: MA Experiment 108576 PARAMETER Experiment Name: At_42deg_Heat_cDNA_P Parameter: Tissue Value: Aerial
  misc_feature: MA Experiment ID: 20000224 Result: Up-regulated in Transcription
  misc_feature: MA Experiment ID: 20000227 Result: Up-regulated in Transcription
  misc_feature: MA Experiment 20000227 PARAMETER Experiment Name: At_Root-Tips-vs-Tops_P Parameter: Tissue Value: Root Tips vs. Root Tops
  misc_feature: MA Experiment ID: 20000439 Result: Up-regulated in Transcription
  misc_feature: MA Experiment 20000439 PARAMETER Experiment Name: At_Roots__P Parameter: Age (day) Value: 14 vs. 21
  misc_feature: MA Experiment 20000439 PARAMETER Experiment Name: At_Roots__P Parameter: Organism Value: A. thaliana
  misc_feature: MA Experiment 20000439 PARAMETER Experiment Name: At_Roots__P Parameter: Tissue Value: Roots vs. Whole Plant
  misc_feature: MA Experiment ID: 20000794 Result: Up-regulated in Transcription
  misc_feature: MA Experiment 20000794 PARAMETER Experiment Name: At_Petals_P Parameter: Age (day) Value: 23-25 days
  misc_feature: MA Experiment 20000794 PARAMETER Experiment Name: At_Petals_P Parameter: Plant Line Value: WS
  misc_feature: MA Experiment 20000794 PARAMETER Experiment Name: At_Petals_P Parameter: Tissue Value: Petals vs. Whole plant
  misc_feature: MA Experiment ID: 20001757 Result: Down-regulated in Transcription
  misc_feature: MA Experiment 20001757 PARAMETER Experiment Name: At_50mM_NH4NO3_L-to-H_P Parameter: Timepoint (hr) Value: 6
  misc_feature: MA Experiment 20001757 PARAMETER Experiment Name: At_50mM_NH4NO3_L-to-H_P Parameter: Tissue Value: Leaf
  misc_feature: MA Experiment 20001757 PARAMETER Experiment Name: At_50mM_NH4NO3_L-to-H_P Parameter: Treatment Value: 50mM NH4NO3 vs 100mM Mannitol
  misc_feature: MA Experiment ID: 20001905 Result: Up-regulated in Transcription
  misc_feature: MA Experiment 20001905 PARAMETER Experiment Name: At_Drought_Reproduction_P Parameter: Age (day) Value: 40
  misc_feature: MA Experiment 20001905 PARAMETER Experiment Name: At_Drought_Reproduction_P Parameter: Organism Value: A. thaliana
  misc_feature: MA Experiment 20001905 PARAMETER Experiment Name: At_Drought_Reproduction_P Parameter: Plant Line Value: WS
  misc_feature: MA Experiment 20001905 PARAMETER Experiment Name: At_Drought_Reproduction_P Parameter: Timepoint (day) Value: 10
  misc_feature: MA Experiment 20001905 PARAMETER Experiment Name: At_Drought_Reproduction_P Parameter: Tissue Value: Rosettes
  misc_feature: MA Experiment 20001905 PARAMETER Experiment Name: At_Drought_Reproduction_P Parameter: Treatment Value: Drought vs. No Drought

SEQ ID NO: 91949 - protein, 215 aa, Arabidopsis thaliana; identical to SEQ ID NO: 25265
  peptide (1)..(215): Ceres Seq. ID no. 12706277
  misc_feature (7)..(99): Pfam Name: Domain of unknown function (DUF814) Pfam Description: Domain of unknown function (DUF814)
  misc_feature (1)..(215): Homolog of NCBI NO: 15239074 NR Description: putative protein; protein id: At5g11500.1, by cDNA: 40193., supported by cDNA: gi_13878174 [Arabidopsis
  misc_feature (1)..(215): Homolog of NCBI NO: 21593571 NR Description: unknown [Arabidopsis thaliana]
  misc_feature (1)..(215): Homolog of NCBI NO: 13878175 NR Description: unknown protein [Arabidopsis thaliana]
  misc_feature (1)..(215): Homolog of NCBI NO: 34909556 NR Description: P0046E05.9 [Oryza sativa (japonica
  misc_feature (1)..(199): Homolog of NCBI NO: 14042911 NR Description: unnamed protein product [Homo sapiens]
  misc_feature (1)..(199): Homolog of NCBI NO: 29165654 NR Description: Similar to RIKEN cDNA 2610528H13 gene [Homo
  misc_feature (1)..(199): Homolog of NCBI NO: 34874343 NR Description: similar to RIKEN cDNA 2610528H13 [Rattus
  misc_feature (1)..(199): Homolog of NCBI NO: 22164768 NR Description: RIKEN cDNA 2610528H13 [Mus musculus] Similar to hypothetical protein FLJ10853 [Mus musculus] unnamed protein product [Mus musculus]
  misc_feature (1)..(215): Homolog of NCBI NO: 33416640 NR Description: Unknown (protein for MGC:68866) [Xenopus laevis]
  misc_feature (1)..(215): Homolog of NCBI NO: 24640291 NR Description: CG4593-PA [Drosophila melanogaster]

SEQ ID NO: 91950 - protein, 198 aa, Arabidopsis thaliana; identical to SEQ ID NO: 25266
  peptide (1)..(198): Ceres Seq. ID no. 12706278
  misc_feature (1)..(82): Pfam Name: Domain of unknown function (DUF814) Pfam Description: Domain of unknown function (DUF814)
  misc_feature (1)..(198): Homolog of NCBI NO: 15239074 NR Description: putative protein; protein id: At5g11500.1, by cDNA: 40193., supported by cDNA: gi_13878174 [Arabidopsis
  misc_feature (1)..(198): Homolog of NCBI NO: 21593571 NR Description: unknown [Arabidopsis thaliana]
  misc_feature (1)..(198): Homolog of NCBI NO: 13878175 NR Description: unknown protein [Arabidopsis thaliana]
  misc_feature (1)..(198): Homolog of NCBI NO: 34909556 NR Description: P0046E05.9 [Oryza sativa (japonica
  misc_feature (1)..(182): Homolog of NCBI NO: 14042911 NR Description: unnamed protein product [Homo sapiens]
  misc_feature (1)..(182): Homolog of NCBI NO: 29165654 NR Description: Similar to RIKEN cDNA 2610528H13 gene [Homo
  misc_feature (1)..(182): Homolog of NCBI NO: 34874343 NR Description: similar to RIKEN cDNA 2610528H13 [Rattus
  misc_feature (1)..(182): Homolog of NCBI NO: 22164768 NR Description: RIKEN cDNA 2610528H13 [Mus musculus] Similar to hypothetical protein FLJ10853 [Mus musculus] unnamed protein product [Mus musculus]
  misc_feature (1)..(198): Homolog of NCBI NO: 33416640 NR Description: Unknown (protein for MGC:68866) [Xenopus laevis]
  misc_feature (1)..(198): Homolog of NCBI NO: 24640291 NR Description: CG4593-PA [Drosophila melanogaster]

SEQ ID NO: 91951 - protein, 172 aa, Arabidopsis thaliana; identical to SEQ ID NO: 25267
  peptide (1)..(172): Ceres Seq. ID no. 12706279
  misc_feature (1)..(56): Pfam Name: Domain of unknown function (DUF814) Pfam Description: Domain of unknown function (DUF814)
  misc_feature (1)..(172): Homolog of NCBI NO: 15239074 NR Description: putative protein; protein id: At5g11500.1, by cDNA: 40193., supported by cDNA: gi_13878174 [Arabidopsis
  misc_feature (1)..(172): Homolog of NCBI NO: 21593571 NR Description: unknown [Arabidopsis thaliana]
  misc_feature (1)..(172): Homolog of NCBI NO: 13878175 NR Description: unknown protein [Arabidopsis thaliana]
  misc_feature (1)..(172): Homolog of NCBI NO: 34909556 NR Description: P0046E05.9 [Oryza sativa (japonica
  misc_feature (1)..(156): Homolog of NCBI NO: 14042911 NR Description: unnamed protein product [Homo sapiens]
  misc_feature (1)..(156): Homolog of NCBI NO: 29165654 NR Description: Similar to RIKEN cDNA 2610528H13 gene [Homo
  misc_feature (1)..(156): Homolog of NCBI NO: 34874343 NR Description: similar to RIKEN cDNA 2610528H13 [Rattus
  misc_feature (1)..(156): Homolog of NCBI NO: 22164768 NR Description: RIKEN cDNA 2610528H13 [Mus musculus] Similar to hypothetical protein FLJ10853 [Mus musculus] unnamed protein product [Mus musculus]
  misc_feature (1)..(172): Homolog of NCBI NO: 33416640 NR Description: Unknown (protein for MGC:68866) [Xenopus laevis]
  misc_feature (1)..(172): Homolog of NCBI NO: 24640291 NR Description: CG4593-PA [Drosophila melanogaster]

SEQ ID NO: 91952 - DNA, 2020 bp, Arabidopsis thaliana; identical to SEQ ID NO: 88196
  misc_feature (1)..(2020): Ceres Seq. ID no. 12706323
  misc_feature: MA Experiment ID: 108573 Result: Up-regulated in Transcription
  misc_feature: MA Experiment 108573 PARAMETER Experiment Name: At_Drought_cDNA_P Parameter: Timepoint (hr) Value: 6
  misc_feature: MA Experiment 108573 PARAMETER Experiment Name: At_Drought_cDNA_P Parameter: Tissue Value: Aerial
  misc_feature: MA Experiment 108573 PARAMETER Experiment Name: At_Drought_cDNA_P Parameter: Treatment Value: Drought vs. No Drought
  misc_feature: MA Experiment ID: 108668 Result: Up-regulated in Transcription
  misc_feature: MA Experiment 108668 PARAMETER Experiment Name: At_2mM_SA_cDNA_P Parameter: Plant Line Value: WS
  misc_feature: MA Experiment 108668 PARAMETER Experiment Name: At_2mM_SA_cDNA_P Parameter: Timepoint (hr) Value: 6
  misc_feature: MA Experiment 108668 PARAMETER Experiment Name: At_2mM_SA_cDNA_P Parameter: Treatment Value: 2mM SA vs. No Treatment
  misc_feature: MA Experiment ID: 20000182 Result: Up-regulated in Transcription
  misc_feature: MA Experiment 20000182 PARAMETER Experiment Name: At_2mM_SA_P Parameter: Age (day) Value: 14
  misc_feature: MA Experiment 20000182 PARAMETER Experiment Name: At_2mM_SA_P Parameter: Organism Value: A. thaliana
  misc_feature: MA Experiment 20000182 PARAMETER Experiment Name: At_2mM_SA_P Parameter: Plant Line Value: WS
  misc_feature: MA Experiment 20000182 PARAMETER Experiment Name: At_2mM_SA_P Parameter: Timepoint (hr) Value: 6
  misc_feature: MA Experiment 20000182 PARAMETER Experiment Name: At_2mM_SA_P Parameter: Tissue Value: Aerial
  misc_feature: MA Experiment 20000182 PARAMETER Experiment Name: At_2mM_SA_P Parameter: Treatment Value: 2mM SA vs. No Treatment

SEQ ID NO: 91953 - protein, 386 aa, Arabidopsis thaliana; identical to SEQ ID NO: 28879
  peptide (1)..(386): Ceres Seq. ID no. 12706324
  misc_feature (154)..(265): Pfam Name: Arabidopsis protein of unknown function, DUF266 Pfam Description: Arabidopsis protein of unknown function, DUF266
  misc_feature (1)..(386): Homolog of NCBI NO: 15239155 NR Description: putative protein; protein id: At5g11730.1, by cDNA: gi_20260569 [Arabidopsis thaliana]
  misc_feature (3)..(384): Homolog of NCBI NO: 15239557 NR Description: putative protein; protein id: At5g25970.1 thaliana] >gi|5107829|gb|AAD40142.1|AF149413_23 contains to several Arabidopsis thaliana hypothetical proteins including
  misc_feature (8)..(386): Homolog of NCBI NO: 18402952 NR Description: expressed protein; protein id: At3g21310.1,
  misc_feature (8)..(386): Homolog of NCBI NO: 21554566 NR Description: unknown [Arabidopsis thaliana]
  misc_feature (27)..(384): Homolog of NCBI NO: 15218028 NR Description: hypothetical protein; protein id: At1g51770.1
  misc_feature (8)..(345): Homolog of NCBI NO: 9280235 NR Description: gb|AAD40142.1~gene_id:MXL8.19~strong similarity
  misc_feature (70)..(386): Homolog of NCBI NO: 15221386 NR Description: hypothetical protein; protein id: At1g68390.1
  misc_feature (78)..(386): Homolog of NCBI NO: 15218485 NR Description: unknown protein; protein id: At1g10280.1 thaliana] >gi|4914330|gb|AAD32878.1|AC005489_16 F14N23.16
  misc_feature (71)..(386): Homolog of NCBI NO: 38344090 NR Description: OSJNBb0056F09.13 [Oryza sativa (japonica
  misc_feature (88)..(386): Homolog of NCBI NO: 15237293 NR Description: putative protein; protein id: At5g16170.1

SEQ ID NO: 91954 - protein, 297 aa, Arabidopsis thaliana; identical to SEQ ID NO: 28880
  peptide (1)..(297): Ceres Seq. ID no. 12706325
  misc_feature (65)..(176): Pfam Name: Arabidopsis protein of unknown function, DUF266 Pfam Description: Arabidopsis protein of unknown function, DUF266
  misc_feature (1)..(297): Homolog of NCBI NO: 15239155 NR Description: putative protein; protein id: At5g11730.1, by cDNA: gi_20260569 [Arabidopsis thaliana]
  misc_feature (1)..(295): Homolog of NCBI NO: 15239557 NR Description: putative protein; protein id: At5g25970.1 thaliana] >gi|5107829|gb|AAD40142.1|AF149413_23 contains to several Arabidopsis thaliana hypothetical proteins including
  misc_feature (1)..(297): Homolog of NCBI NO: 18402952 NR Description: expressed protein; protein id: At3g21310.1,
  misc_feature (1)..(297): Homolog of NCBI NO: 21554566 NR Description: unknown [Arabidopsis thaliana]
  misc_feature (1)..(295): Homolog of NCBI NO: 15218028 NR Description: hypothetical protein; protein id: At1g51770.1
  misc_feature (1)..(256): Homolog of NCBI NO: 9280235 NR Description: gb|AAD40142.1~gene_id:MXL8.19~strong similarity
  misc_feature (1)..(297): Homolog of NCBI NO: 15221386 NR Description: hypothetical protein; protein id: At1g68390.1
  misc_feature (1)..(297): Homolog of NCBI NO: 15218485 NR Description: unknown protein; protein id: At1g10280.1 thaliana] >gi|4914330|gb|AAD32878.1|AC005489_16 F14N23.16
  misc_feature (1)..(297): Homolog of NCBI NO: 38344090 NR Description: OSJNBb0056F09.13 [Oryza sativa (japonica
  misc_feature (1)..(297): Homolog of NCBI NO: 15237293 NR Description: putative protein; protein id: At5g16170.1

SEQ ID NO: 91955 - protein, 294 aa, Arabidopsis thaliana; identical to SEQ ID NO: 28881
  peptide (1)..(294): Ceres Seq. ID no. 12706326
  misc_feature (62)..(173): Pfam Name: Arabidopsis protein of unknown function, DUF266 Pfam Description: Arabidopsis protein of unknown function, DUF266
  misc_feature (1)..(294): Homolog of NCBI NO: 15239155 NR Description: putative protein; protein id: At5g11730.1, by cDNA: gi_20260569 [Arabidopsis thaliana]
  misc_feature (1)..(292): Homolog of NCBI NO: 15239557 NR Description: putative protein; protein id: At5g25970.1 thaliana] >gi|5107829|gb|AAD40142.1|AF149413_23 contains to several Arabidopsis thaliana hypothetical proteins including
  misc_feature (1)..(294): Homolog of NCBI NO: 18402952 NR Description: expressed protein; protein id: At3g21310.1,
  misc_feature (1)..(294): Homolog of NCBI NO: 21554566 NR Description: unknown [Arabidopsis thaliana]
  misc_feature (1)..(292): Homolog of NCBI NO: 15218028 NR Description: hypothetical protein; protein id: At1g51770.1
  misc_feature (1)..(253): Homolog of NCBI NO: 9280235 NR Description: gb|AAD40142.1~gene_id:MXL8.19~strong similarity
  misc_feature (1)..(294): Homolog of NCBI NO: 15221386 NR Description: hypothetical protein; protein id: At1g68390.1
  misc_feature (1)..(294): Homolog of NCBI NO: 15218485 NR Description: unknown protein; protein id: At1g10280.1 thaliana] >gi|4914330|gb|AAD32878.1|AC005489_16 F14N23.16
  misc_feature (1)..(294): Homolog of NCBI NO: 38344090 NR Description: OSJNBb0056F09.13 [Oryza sativa (japonica
  misc_feature (1)..(294): Homolog of NCBI NO: 15237293 NR Description: putative protein; protein id: At5g16170.1

SEQ ID NO: 91956 - DNA, 3744 bp, Arabidopsis thaliana; identical to SEQ ID NO: 88200
  misc_feature (1)..(3744): Ceres Seq. ID no. 12706359
  misc_feature: MA Experiment ID: 20000171 Result: Up-regulated in Transcription
  misc_feature: MA Experiment 20000171 PARAMETER Experiment Name: At_42deg_Heat_P Parameter: Age (day) Value: 14
  misc_feature: MA Experiment 20000171 PARAMETER Experiment Name: At_42deg_Heat_P Parameter: Organism Value: A. thaliana
  misc_feature: MA Experiment 20000171 PARAMETER Experiment Name: At_42deg_Heat_P Parameter: Plant Line Value: WS
  misc_feature: MA Experiment 20000171 PARAMETER Experiment Name: At_42deg_Heat_P Parameter: Temperature (deg C) Value: 42 vs. 22
  misc_feature: MA Experiment 20000171 PARAMETER Experiment Name: At_42deg_Heat_P Parameter: Timepoint (hr) Value: 1
  misc_feature: MA Experiment 20000171 PARAMETER Experiment Name: At_42deg_Heat_P Parameter: Tissue Value: Aerial

SEQ ID NO: 91957 - protein, 1247 aa, Arabidopsis thaliana; identical to SEQ ID NO: 88201
  peptide (1)..(1247): Ceres Seq. ID no. 12706360
  misc_feature (712)..(746): Pfam Name: PPR repeat Pfam Description: PPR repeat
  misc_feature (608)..(1229): Homolog of NCBI NO: 15220337 NR Description: hypothetical protein; protein id: At1g11290.1
  misc_feature (616)..(1220): Homolog of NCBI NO: 34897884 NR Description: Similar to Arabidopsis thaliana DNA chromosome 4,
  misc_feature (613)..(1216): Homolog of NCBI NO: 15234006 NR Description: putative protein; protein id: At4g18750.1
  misc_feature (610)..(1223): Homolog of NCBI NO: 34906110 NR Description: P0020E09.15 [Oryza sativa (japonica
  misc_feature (814)..(1223): Homolog of NCBI NO: 21741755 NR Description: OSJNBa0060B20.9 [Oryza sativa (japonica
  misc_feature (613)..(857): Homolog of NCBI NO: 21741755 NR Description: OSJNBa0060B20.9 [Oryza sativa (japonica
  misc_feature (665)..(1216): Homolog of NCBI NO: 11994419 NR Description: selenium-binding protein-like [Arabidopsis
  misc_feature (665)..(1216): Homolog of NCBI NO: 15230593 NR Description: unknown protein; protein id: At3g12770.1
  misc_feature (612)..(1233): Homolog of NCBI NO: 18409250 NR Description: PPR-repeat protein, putative; protein id: [Arabidopsis thaliana] >gi|12325094|gb|AAG52503.1|AC018364_21
  misc_feature (613)..(1230): Homolog of NCBI NO: 34897084 NR Description: hypothetical protein [Oryza sativa (japonica group)] >gi|12957718|gb|AAK09236.1| hypothetical protein [Oryza

SEQ ID NO: 91958 - protein, 1144 aa, Arabidopsis thaliana; identical to SEQ ID NO: 88202
  peptide (1)..(1144): Ceres Seq. ID no. 12706361
  misc_feature (609)..(643): Pfam Name: PPR repeat Pfam Description: PPR repeat
  misc_feature (505)..(1126): Homolog of NCBI NO: 15220337 NR Description: hypothetical protein; protein id: At1g11290.1
  misc_feature (513)..(1117): Homolog of NCBI NO: 34897884 NR Description: Similar to Arabidopsis thaliana DNA chromosome 4,
  misc_feature (510)..(1113): Homolog of NCBI NO: 15234006 NR Description: putative protein; protein id: At4g18750.1
  misc_feature (507)..(1120): Homolog of NCBI NO: 34906110 NR Description: P0020E09.15 [Oryza sativa (japonica
  misc_feature (711)..(1120): Homolog of NCBI NO: 21741755 NR Description: OSJNBa0060B20.9 [Oryza sativa (japonica
  misc_feature (510)..(754): Homolog of NCBI NO: 21741755 NR Description: OSJNBa0060B20.9 [Oryza sativa (japonica
  misc_feature (562)..(1113): Homolog of NCBI NO: 11994419 NR Description: selenium-binding protein-like [Arabidopsis
  misc_feature (562)..(1113): Homolog of NCBI NO: 15230593 NR Description: unknown protein; protein id: At3g12770.1
  misc_feature (509)..(1130): Homolog of NCBI NO: 18409250 NR Description: PPR-repeat protein, putative; protein id: [Arabidopsis thaliana] >gi|12325094|gb|AAG52503.1|AC018364_21
  misc_feature (510)..(1127): Homolog of NCBI NO: 34897084 NR Description: hypothetical protein [Oryza sativa (japonica group)] >gi|12957718|gb|AAK09236.1| hypothetical protein [Oryza

SEQ ID NO: 91959 - protein, 1138 aa, Arabidopsis thaliana; identical to SEQ ID NO: 88203
  peptide (1)..(1138): Ceres Seq. ID no. 12706362
  misc_feature (603)..(637): Pfam Name: PPR repeat Pfam Description: PPR repeat
  misc_feature (499)..(1120): Homolog of NCBI NO: 15220337 NR Description: hypothetical protein; protein id: At1g11290.1
  misc_feature (507)..(1111): Homolog of NCBI NO: 34897884 NR Description: Similar to Arabidopsis thaliana DNA chromosome 4,
  misc_feature (504)..(1107): Homolog of NCBI NO: 15234006 NR Description: putative protein; protein id: At4g18750.1
  misc_feature (501)..(1114): Homolog of NCBI NO: 34906110 NR Description: P0020E09.15 [Oryza sativa (japonica
  misc_feature (705)..(1114): Homolog of NCBI NO: 21741755 NR Description: OSJNBa0060B20.9 [Oryza sativa (japonica
  misc_feature (504)..(748): Homolog of NCBI NO: 21741755 NR Description: OSJNBa0060B20.9 [Oryza sativa (japonica
  misc_feature (556)..(1107): Homolog of NCBI NO: 11994419 NR Description: selenium-binding protein-like [Arabidopsis
  misc_feature (556)..(1107): Homolog of NCBI NO: 15230593 NR Description: unknown protein; protein id: At3g12770.1
  misc_feature (503)..(1124): Homolog of NCBI NO: 18409250 NR Description: PPR-repeat protein, putative; protein id: [Arabidopsis thaliana] >gi|12325094|gb|AAG52503.1|AC018364_21
  misc_feature (504)..(1121): Homolog of NCBI NO: 34897084 NR Description: hypothetical protein [Oryza sativa (japonica group)] >gi|12957718|gb|AAK09236.1| hypothetical protein [Oryza

SEQ ID NO: 91960 - DNA, 2307 bp, Arabidopsis thaliana; identical to SEQ ID NO: 88204
  misc_feature (1)..(2307): Ceres Seq. ID no. 12706402
  misc_feature: MA Experiment ID: 20000327 Result: Down-regulated in Transcription
  misc_feature: MA Experiment 20000327 PARAMETER Experiment Name: At_42deg_Heat_Sub_P Parameter: Age (day) Value: 14
  misc_feature: MA Experiment 20000327 PARAMETER Experiment Name: At_42deg_Heat_Sub_P Parameter: Organism Value: A. thaliana
  misc_feature: MA Experiment 20000327 PARAMETER Experiment Name: At_42deg_Heat_Sub_P Parameter: Plant Line Value: WS
  misc_feature: MA Experiment 20000327 PARAMETER Experiment Name: At_42deg_Heat_Sub_P Parameter: Temperature (deg C) Value: 42 vs. 22
  misc_feature: MA Experiment 20000327 PARAMETER Experiment Name: At_42deg_Heat_Sub_P Parameter: Timepoint (hr) Value: 1
  misc_feature: MA Experiment 20000327 PARAMETER Experiment Name: At_42deg_Heat_Sub_P Parameter: Tissue Value: Aerial
  misc_feature: MA Experiment ID: 20000328 Result: Down-regulated in Transcription
  misc_feature: MA Experiment 20000328 PARAMETER Experiment Name: At_42deg_Heat_Sub_P Parameter: Age (day) Value: 14
  misc_feature: MA Experiment 20000328 PARAMETER Experiment Name: At_42deg_Heat_Sub_P Parameter: Organism Value: A. thaliana
  misc_feature: MA Experiment 20000328 PARAMETER Experiment Name: At_42deg_Heat_Sub_P Parameter: Plant Line Value: WS
  misc_feature: MA Experiment 20000328 PARAMETER Experiment Name: At_42deg_Heat_Sub_P Parameter: Temperature (deg C) Value: 42 vs. 22
  misc_feature: MA Experiment 20000328 PARAMETER Experiment Name: At_42deg_Heat_Sub_P Parameter: Timepoint (hr) Value: 6
  misc_feature: MA Experiment 20000328 PARAMETER Experiment Name: At_42deg_Heat_Sub_P Parameter: Tissue Value: Aerial
  misc_feature: MA Experiment ID: 20000348 Result: Down-regulated in Transcription
  misc_feature: MA Experiment 20000348 PARAMETER Experiment Name: At_100uM_ABA_Sub_P Parameter: Age (day) Value: 14
  misc_feature: MA Experiment 20000348 PARAMETER Experiment Name: At_100uM_ABA_Sub_P Parameter: Organism Value: A. thaliana
  misc_feature: MA Experiment 20000348 PARAMETER Experiment Name: At_100uM_ABA_Sub_P Parameter: Plant Line Value: WS
  misc_feature: MA Experiment 20000348 PARAMETER Experiment Name: At_100uM_ABA_Sub_P Parameter: Timepoint (hr) Value: 1
  misc_feature: MA Experiment 20000348 PARAMETER Experiment Name: At_100uM_ABA_Sub_P Parameter: Tissue Value: Aerial
  misc_feature: MA Experiment 20000348 PARAMETER Experiment Name: At_100uM_ABA_Sub_P Parameter: Treatment Value: 100uM ABA vs. No Treatment
  misc_feature: MA Experiment ID: 20000355 Result: Up-regulated in Transcription
  misc_feature: MA Experiment 20000355 PARAMETER Experiment Name: At_Siliques_Sub_P Parameter: Age (day) Value: 21
  misc_feature: MA Experiment 20000355 PARAMETER Experiment Name: At_Siliques_Sub_P Parameter: Organism Value: A. thaliana
  misc_feature: MA Experiment 20000355 PARAMETER Experiment Name: At_Siliques_Sub_P Parameter: Plant Line Value: WS
  misc_feature: MA Experiment 20000355 PARAMETER Experiment Name: At_Siliques_Sub_P Parameter: Tissue Value: Less Than 5mm Siliques vs. Whole Plant
  misc_feature: MA Experiment ID: 20000440 Result: Up-regulated in Transcription
  misc_feature: MA Experiment 20000440 PARAMETER Experiment Name: At_Closed-Flower__Sub_P Parameter: Tissue Value: Closed Flower vs. Whole Plant

SEQ ID NO: 91961 - protein, 768 aa, Arabidopsis thaliana; identical to SEQ ID NO: 88205
  peptide (1)..(768): Ceres Seq. ID no. 12706403
  misc_feature (267)..(533): Pfam Name: GMC oxidoreductase Pfam Description: GMC oxidoreductase
  misc_feature (69)..(767): Homolog of NCBI NO: 14532706 NR Description: unknown protein [Arabidopsis thaliana]
  misc_feature (69)..(767): Homolog of NCBI NO: 15235348 NR Description: putative protein; protein id: At4g28570.1, by cDNA: 19314., supported by cDNA: gi_14532705 [Arabidopsis
  misc_feature (69)..(767): Homolog of NCBI NO: 21554016 NR Description: unknown [Arabidopsis thaliana]
  misc_feature (176)..(767): Homolog of NCBI NO: 37535318 NR Description: putative alcohol oxidase [Oryza sativa (japonica group)] >gi|16905154|gb|AAL31024.1| putative alcohol oxidase sativa] >gi|31432640|gb|AAP54248.1| putative alcohol oxidase
  misc_feature (34)..(138): Homolog of NCBI NO: 37535318 NR Description: putative alcohol oxidase [Oryza sativa (japonica group)] >gi|16905154|gb|AAL31024.1| putative alcohol oxidase sativa] >gi|31432640|gb|AAP54248.1| putative alcohol oxidase
  misc_feature (191)..(760): Homolog of NCBI NO: 18403753 NR Description: expressed protein; protein id: At3g23410.1, by cDNA: gi_13605691 [Arabidopsis thaliana] contains similarity to long chain fatty alcohol
  misc_feature (38)..(203): Homolog of NCBI NO: 18403753 NR Description: expressed protein; protein id: At3g23410.1, by cDNA: gi_13605691 [Arabidopsis thaliana] contains similarity to long chain fatty alcohol
  misc_feature (191)..(760): Homolog of NCBI NO: 22798796 NR Description: alcohol oxidase [Arabidopsis thaliana]
  misc_feature (106)..(203): Homolog of NCBI NO: 22798796 NR Description: alcohol oxidase [Arabidopsis thaliana]
  misc_feature (175)..(768): Homolog of NCBI NO: 16905151 NR Description: putative alcohol oxidase [Oryza sativa]

SEQ ID NO: 91962 - protein, 726 aa, Arabidopsis thaliana; identical to SEQ ID NO: 88206
  peptide (1)..(726): Ceres Seq. ID no. 12706404
  misc_feature (225)..(491): Pfam Name: GMC oxidoreductase Pfam Description: GMC oxidoreductase
  misc_feature (27)..(725): Homolog of NCBI NO: 14532706 NR Description: unknown protein [Arabidopsis thaliana]
  misc_feature (27)..(725): Homolog of NCBI NO: 15235348 NR Description: putative protein; protein id: At4g28570.1, by cDNA: 19314., supported by cDNA: gi_14532705 [Arabidopsis
  misc_feature (27)..(725): Homolog of NCBI NO: 21554016 NR Description: unknown [Arabidopsis thaliana]
  misc_feature (134)..(725): Homolog of NCBI NO: 37535318 NR Description: putative alcohol oxidase [Oryza sativa (japonica group)] >gi|16905154|gb|AAL31024.1| putative alcohol oxidase sativa] >gi|31432640|gb|AAP54248.1| putative alcohol oxidase
  misc_feature (1)..(96): Homolog of NCBI NO: 37535318 NR Description: putative alcohol oxidase [Oryza sativa (japonica group)] >gi|16905154|gb|AAL31024.1| putative alcohol oxidase sativa] >gi|31432640|gb|AAP54248.1| putative alcohol oxidase
  misc_feature (149)..(718): Homolog of NCBI NO: 18403753 NR Description: expressed protein; protein id: At3g23410.1, by cDNA: gi_13605691 [Arabidopsis thaliana] contains similarity to long chain fatty alcohol
  misc_feature (1)..(161): Homolog of NCBI NO: 18403753 NR Description: expressed protein; protein id: At3g23410.1, by cDNA: gi_13605691 [Arabidopsis thaliana] contains similarity to long chain fatty alcohol
  misc_feature (149)..(718): Homolog of NCBI NO: 22798796 NR Description: alcohol oxidase [Arabidopsis thaliana]
  misc_feature (64)..(161): Homolog of NCBI NO: 22798796 NR Description: alcohol oxidase [Arabidopsis thaliana]
  misc_feature (133)..(726): Homolog of NCBI NO: 16905151 NR Description: putative alcohol oxidase [Oryza sativa]

SEQ ID NO: 91963 - protein, 679 aa, Arabidopsis thaliana; identical to SEQ ID NO: 88207
  peptide (1)..(679): Ceres Seq. ID no. 12706405
  misc_feature (178)..(444): Pfam Name: GMC oxidoreductase Pfam Description: GMC oxidoreductase
  misc_feature (1)..(678): Homolog of NCBI NO: 14532706 NR Description: unknown protein [Arabidopsis thaliana]
  misc_feature (1)..(678): Homolog of NCBI NO: 15235348 NR Description: putative protein; protein id: At4g28570.1, by cDNA: 19314., supported by cDNA: gi_14532705 [Arabidopsis
  misc_feature (1)..(678): Homolog of NCBI NO: 21554016 NR Description: unknown [Arabidopsis thaliana]
  misc_feature (87)..(678): Homolog of NCBI NO: 37535318 NR Description: putative alcohol oxidase [Oryza sativa (japonica group)] >gi|16905154|gb|AAL31024.1| putative alcohol oxidase sativa] >gi|31432640|gb|AAP54248.1| putative alcohol oxidase
  misc_feature (1)..(49): Homolog of NCBI NO: 37535318 NR Description: putative alcohol oxidase [Oryza sativa (japonica group)] >gi|16905154|gb|AAL31024.1| putative alcohol oxidase sativa] >gi|31432640|gb|AAP54248.1| putative alcohol oxidase
  misc_feature (102)..(671): Homolog of NCBI NO: 18403753 NR Description: expressed protein; protein id: At3g23410.1, by cDNA: gi_13605691 [Arabidopsis thaliana] contains similarity to long chain fatty alcohol
  misc_feature (1)..(114): Homolog of NCBI NO: 18403753 NR Description: expressed protein; protein id: At3g23410.1, by cDNA: gi_13605691 [Arabidopsis thaliana] contains similarity to long chain fatty alcohol
  misc_feature (102)..(671): Homolog of NCBI NO: 22798796 NR Description: alcohol oxidase [Arabidopsis thaliana]
  misc_feature (17)..(114): Homolog of NCBI NO: 22798796 NR Description: alcohol oxidase [Arabidopsis thaliana]
  misc_feature (86)..(679): Homolog of NCBI NO: 16905151 NR Description: putative alcohol oxidase [Oryza sativa]

SEQ ID NO: 91964 - DNA, 1719 bp, Arabidopsis thaliana; identical to SEQ ID NO: 88208
  misc_feature (1)..(1719): Ceres Seq. ID no. 12706427
  misc_feature: MA Experiment ID: 108461 Result: Down-regulated in Transcription
  misc_feature: MA Experiment 108461 PARAMETER Experiment Name: At_Germinating_Seeds_cDNA_P Parameter: Age (day) Value: 1 vs. 0
  misc_feature: MA Experiment 108461 PARAMETER Experiment Name: At_Germinating_Seeds_cDNA_P Parameter: Tissue Value: Germinating Seeds
  misc_feature: MA Experiment ID: 108561 Result: Up-regulated in Transcription
  misc_feature: MA Experiment 108561 PARAMETER Experiment Name: At_100uM_ABA_cDNA_P Parameter: Timepoint (hr) Value: 6
  misc_feature: MA Experiment 108561 PARAMETER Experiment Name: At_100uM_ABA_cDNA_P Parameter: Tissue Value: Aerial
  misc_feature: MA Experiment 108561 PARAMETER Experiment Name: At_100uM_ABA_cDNA_P Parameter: Treatment Value: 100uM ABA vs. No Treatment
  misc_feature: MA Experiment ID: 108573 Result: Up-regulated in Transcription
  misc_feature: MA Experiment 108573 PARAMETER Experiment Name: At_Drought_cDNA_P Parameter: Timepoint (hr) Value: 6
  misc_feature: MA Experiment 108573 PARAMETER Experiment Name: At_Drought_cDNA_P Parameter: Tissue Value: Aerial
  misc_feature: MA Experiment 108573 PARAMETER Experiment Name: At_Drought_cDNA_P Parameter: Treatment Value: Drought vs. No Drought
  misc_feature: MA Experiment ID: 108574 Result: Up-regulated in Transcription
  misc_feature: MA Experiment 108574 PARAMETER Experiment Name: At_Wounding__cDNA_P Parameter: Timepoint (hr) Value: 1
  misc_feature: MA Experiment 108574 PARAMETER Experiment Name: At_Wounding__cDNA_P Parameter: Tissue Value: Aerial
  misc_feature: MA Experiment 108574 PARAMETER Experiment Name: At_Wounding__cDNA_P Parameter: Treatment Value: Wounding vs. No Wounding

SEQ ID NO: 91965 - protein, 572 aa, Arabidopsis thaliana; identical to SEQ ID NO: 38704
  peptide (1)..(572): Ceres Seq. ID no. 12706428
  misc_feature (344)..(508): Pfam Name: Sugar (and other) transporter Pfam Description: Sugar (and other) transporter
  misc_feature (1)..(572): Homolog of NCBI NO: 18415316 NR Description: putative protein; protein id: At4g19450.1, by cDNA: 100165. [Arabidopsis thaliana]
  misc_feature (1)..(572): Homolog of NCBI NO: 21536488 NR Description: unknown [Arabidopsis thaliana]
  misc_feature (142)..(572): Homolog of NCBI NO: 7487718 NR Description: hypothetical protein T5K18.230 - Arabidopsis >gi|3080375|emb|CAA18632.1| putative protein [Arabidopsis >gi|7268740|emb|CAB78947.1| putative protein [Arabidopsis
  misc_feature (1)..(313): Homolog of NCBI NO: 15222361 NR Description: hypothetical protein; protein id: At1g31470.1
  misc_feature (291)..(566): Homolog of NCBI NO: 15222361 NR Description: hypothetical protein; protein id: At1g31470.1
  misc_feature (277)..(567): Homolog of NCBI NO: 34907888 NR Description: P0031D02.33 [Oryza sativa (japonica
  misc_feature (5)..(256): Homolog of NCBI NO: 34907888 NR Description: P0031D02.33 [Oryza sativa (japonica
  misc_feature (174)..(565): Homolog of NCBI NO: 15232155 NR Description: hypothetical protein; protein id: At3g01630.1 thaliana] >gi|6016721|gb|AAF01547.1|AC009325_17 hypothetical
  misc_feature (6)..(298): Homolog of NCBI NO: 15232155 NR Description: hypothetical protein; protein id: At3g01630.1 thaliana] >gi|6016721|gb|AAF01547.1|AC009325_17 hypothetical
  misc_feature (6)..(298): Homolog of NCBI NO: 28393720 NR Description: unknown protein [Arabidopsis thaliana]

SEQ ID NO: 91966 - protein, 564 aa, Arabidopsis thaliana; identical to SEQ ID NO: 38705
  peptide (1)..(564): Ceres Seq. ID no. 12706429
  misc_feature (336)..(500): Pfam Name: Sugar (and other) transporter Pfam Description: Sugar (and other) transporter
  misc_feature (1)..(564): Homolog of NCBI NO: 18415316 NR Description: putative protein; protein id: At4g19450.1, by cDNA: 100165. [Arabidopsis thaliana]
  misc_feature (1)..(564): Homolog of NCBI NO: 21536488 NR Description: unknown [Arabidopsis thaliana]
  misc_feature (134)..(564): Homolog of NCBI NO: 7487718 NR Description: hypothetical protein T5K18.230 - Arabidopsis >gi|3080375|emb|CAA18632.1| putative protein [Arabidopsis >gi|7268740|emb|CAB78947.1| putative protein [Arabidopsis
  misc_feature (1)..(305): Homolog of NCBI NO: 15222361 NR Description: hypothetical protein; protein id: At1g31470.1
  misc_feature (283)..(558): Homolog of NCBI NO: 15222361 NR Description: hypothetical protein; protein id: At1g31470.1
  misc_feature (269)..(559): Homolog of NCBI NO: 34907888 NR Description: P0031D02.33 [Oryza sativa (japonica
  misc_feature (1)..(248): Homolog of NCBI NO: 34907888 NR Description: P0031D02.33 [Oryza sativa (japonica
  misc_feature (166)..(557): Homolog of NCBI NO: 15232155 NR Description: hypothetical protein; protein id: At3g01630.1 thaliana] >gi|6016721|gb|AAF01547.1|AC009325_17 hypothetical
  misc_feature (1)..(290): Homolog of NCBI NO: 15232155 NR Description: hypothetical protein; protein id: At3g01630.1 thaliana] >gi|6016721|gb|AAF01547.1|AC009325_17 hypothetical
  misc_feature (1)..(290): Homolog of NCBI NO: 28393720 NR Description: unknown protein [Arabidopsis thaliana]

SEQ ID NO: 91967 - protein, 506 aa, Arabidopsis thaliana; identical to SEQ ID NO: 38706
  peptide (1)..(506): Ceres Seq. ID no. 12706430
  misc_feature (278)..(442): Pfam Name: Sugar (and other) transporter Pfam Description: Sugar (and other) transporter
  misc_feature (1)..(506): Homolog of NCBI NO: 18415316 NR Description: putative protein; protein id: At4g19450.1, by cDNA: 100165. [Arabidopsis thaliana]
  misc_feature (1)..(506): Homolog of NCBI NO: 21536488 NR Description: unknown [Arabidopsis thaliana]
  misc_feature (76)..(506): Homolog of NCBI NO: 7487718 NR Description: hypothetical protein T5K18.230 - Arabidopsis >gi|3080375|emb|CAA18632.1| putative protein [Arabidopsis >gi|7268740|emb|CAB78947.1| putative protein [Arabidopsis
  misc_feature (1)..(247): Homolog of NCBI NO: 15222361 NR Description: hypothetical protein; protein id: At1g31470.1
  misc_feature (225)..(500): Homolog of NCBI NO: 15222361 NR Description: hypothetical protein; protein id: At1g31470.1
  misc_feature (211)..(501): Homolog of NCBI NO: 34907888 NR Description: P0031D02.33 [Oryza sativa (japonica
  misc_feature (1)..(190): Homolog of NCBI NO: 34907888 NR Description: P0031D02.33 [Oryza sativa (japonica
  misc_feature (108)..(499): Homolog of NCBI NO: 15232155 NR Description: hypothetical protein; protein id: At3g01630.1 thaliana] >gi|6016721|gb|AAF01547.1|AC009325_17 hypothetical
  misc_feature (1)..(232): Homolog of NCBI NO: 15232155 NR Description: hypothetical protein; protein id: At3g01630.1 thaliana] >gi|6016721|gb|AAF01547.1|AC009325_17 hypothetical
  misc_feature (1)..(232): Homolog of NCBI NO: 28393720 NR Description: unknown protein [Arabidopsis thaliana]

SEQ ID NO: 91968 - DNA, 1267 bp, Arabidopsis thaliana; identical to SEQ ID NO: 88212
  misc_feature (1)..(1267): Ceres Seq. ID no. 12706519
  misc_feature: MA Experiment ID: 108462 Result: Down-regulated in Transcription
  misc_feature: MA Experiment 108462 PARAMETER Experiment Name: At_Germinating_Seeds_cDNA_P Parameter: Age (day) Value: 2 vs. 0
  misc_feature: MA Experiment 108462 PARAMETER Experiment Name: At_Germinating_Seeds_cDNA_P Parameter: Tissue Value: Germinating Seeds
  misc_feature: MA Experiment ID: 108463 Result: Down-regulated in Transcription
  misc_feature: MA Experiment 108463 PARAMETER Experiment Name: At_Germinating_Seeds_cDNA_P Parameter: Age (day) Value: 3 vs. 0
  misc_feature: MA Experiment 108463 PARAMETER Experiment Name: At_Germinating_Seeds_cDNA_P Parameter: Tissue Value: Germinating Seeds
  misc_feature: MA Experiment ID: 108464 Result: Down-regulated in Transcription
  misc_feature: MA Experiment 108464 PARAMETER Experiment Name: At_Germinating_Seeds_cDNA_P Parameter: Age (day) Value: 4 vs. 0
  misc_feature: MA Experiment 108464 PARAMETER Experiment Name: At_Germinating_Seeds_cDNA_P Parameter: Tissue Value: Germinating Seeds
  misc_feature: MA Experiment ID: 108573 Result: Down-regulated in Transcription
  misc_feature: MA Experiment 108573 PARAMETER Experiment Name: At_Drought_cDNA_P Parameter: Timepoint (hr) Value: 6
  misc_feature: MA Experiment 108573 PARAMETER Experiment Name: At_Drought_cDNA_P Parameter: Tissue Value: Aerial
  misc_feature: MA Experiment 108573 PARAMETER Experiment Name: At_Drought_cDNA_P Parameter: Treatment Value: Drought vs. No Drought

SEQ ID NO: 91969 - protein, 371 aa, Arabidopsis thaliana; identical to SEQ ID NO: 88213
  peptide (1)..(371): Ceres Seq. ID no. 12706520
  misc_feature (1)..(371): Pfam Name: Protein of unknown function (DUF731) Pfam Description: Protein of unknown function (DUF731)
  misc_feature (1)..(371): Homolog of NCBI NO: 18415421 NR Description: expressed protein; protein id: At4g20010.1, by cDNA: 40232. [Arabidopsis thaliana] >gi|7485726|pir||T04885
  misc_feature (1)..(371): Homolog of NCBI NO: 26451527 NR Description: unknown protein [Arabidopsis thaliana]
  misc_feature (61)..(367): Homolog of NCBI NO: 2660671 NR Description: hypothetical protein [Arabidopsis thaliana]
  misc_feature (61)..(367): Homolog of NCBI NO: 18422482 NR Description: Expressed protein; protein id: At5g44785.1, by cDNA: 121432. [Arabidopsis thaliana] unknown protein [Arabidopsis thaliana]
  misc_feature (1)..(70): Homolog of NCBI NO: 2660671 NR Description: hypothetical protein [Arabidopsis thaliana]
  misc_feature (1)..(70): Homolog of NCBI NO: 18422482 NR Description: Expressed protein; protein id: At5g44785.1, by cDNA: 121432. [Arabidopsis thaliana] unknown protein [Arabidopsis thaliana]
  misc_feature (61)..(367): Homolog of NCBI NO: 21537140 NR Description: unknown [Arabidopsis thaliana]
  misc_feature (1)..(70): Homolog of NCBI NO: 21537140 NR Description: unknown [Arabidopsis thaliana]
  misc_feature (81)..(369): Homolog of NCBI NO: 18397761 NR Description: expressed protein; protein id: At1g31010.1, by cDNA: 25903. [Arabidopsis thaliana] >gi|25341922|pir||G86435
  misc_feature (81)..(369): Homolog of NCBI NO: 21554639 NR Description: unknown [Arabidopsis thaliana]

SEQ ID NO: 91970 - protein, 195 aa, Arabidopsis thaliana; identical to SEQ ID NO: 25290
  peptide (1)..(195): Ceres Seq. ID no. 12706521
  misc_feature (1)..(195): Pfam Name: Protein of unknown function (DUF731) Pfam Description: Protein of unknown function (DUF731)
  misc_feature (1)..(195): Homolog of NCBI NO: 18415421 NR Description: expressed protein; protein id: At4g20010.1, by cDNA: 40232. [Arabidopsis thaliana] >gi|7485726|pir||T04885
  misc_feature (1)..(195): Homolog of NCBI NO: 26451527 NR Description: unknown protein [Arabidopsis thaliana]
  misc_feature (1)..(191): Homolog of NCBI NO: 2660671 NR Description: hypothetical protein [Arabidopsis thaliana]
  misc_feature (1)..(191): Homolog of NCBI NO: 18422482 NR Description: Expressed protein; protein id: At5g44785.1, by cDNA: 121432. [Arabidopsis thaliana] unknown protein [Arabidopsis thaliana]
  misc_feature (1)..(191): Homolog of NCBI NO: 21537140 NR Description: unknown [Arabidopsis thaliana]
  misc_feature (1)..(193): Homolog of NCBI NO: 18397761 NR Description: expressed protein; protein id: At1g31010.1, by cDNA: 25903. [Arabidopsis thaliana] >gi|25341922|pir||G86435
  misc_feature (1)..(193): Homolog of NCBI NO: 21554639 NR Description: unknown [Arabidopsis thaliana]
  misc_feature (56)..(191): Homolog of NCBI NO: 18422482 NR Description: Expressed protein; protein id: At5g44785.1, by cDNA: 121432. [Arabidopsis thaliana] unknown protein [Arabidopsis thaliana]
  misc_feature (56)..(191): Homolog of NCBI NO: 21537140 NR Description: unknown [Arabidopsis thaliana]
  misc_feature (1)..(153): Homolog of NCBI NO: 19386812 NR Description: B1147A04.4 [Oryza sativa (japonica

SEQ ID NO: 91971 - DNA, 1221 bp, Arabidopsis thaliana; identical to SEQ ID NO: 88215
  misc_feature (1)..(1221): Ceres Seq. ID no. 12706522
  misc_feature: MA Experiment ID: 20000171 Result: Up-regulated in Transcription
  misc_feature: MA Experiment 20000171 PARAMETER Experiment Name: At_42deg_Heat_P Parameter: Age (day) Value: 14
  misc_feature: MA Experiment 20000171 PARAMETER Experiment Name: At_42deg_Heat_P Parameter: Organism Value: A. thaliana
  misc_feature: MA Experiment 20000171 PARAMETER Experiment Name: At_42deg_Heat_P Parameter: Plant Line Value: WS
  misc_feature: MA Experiment 20000171 PARAMETER Experiment Name: At_42deg_Heat_P Parameter: Temperature (deg C) Value: 42 vs. 22
  misc_feature: MA Experiment 20000171 PARAMETER Experiment Name: At_42deg_Heat_P Parameter: Timepoint (hr) Value: 1
  misc_feature: MA Experiment 20000171 PARAMETER Experiment Name: At_42deg_Heat_P Parameter: Tissue Value: Aerial
  misc_feature: MA Experiment ID: 20000173 Result: Up-regulated in Transcription
  misc_feature: MA Experiment 20000173 PARAMETER Experiment Name: At_42deg_Heat_P Parameter: Age (day) Value: 14
  misc_feature: MA Experiment 20000173 PARAMETER Experiment Name: At_42deg_Heat_P Parameter: Organism Value: A. thaliana
  misc_feature: MA Experiment 20000173 PARAMETER Experiment Name: At_42deg_Heat_P Parameter: Plant Line Value: WS
  misc_feature: MA Experiment 20000173 PARAMETER Experiment Name: At_42deg_Heat_P Parameter: Temperature (deg C) Value: 42 vs. 22
  misc_feature: MA Experiment 20000173 PARAMETER Experiment Name: At_42deg_Heat_P Parameter: Timepoint (hr) Value: 6
  misc_feature: MA Experiment 20000173 PARAMETER Experiment Name: At_42deg_Heat_P Parameter: Tissue Value: Aerial
  misc_feature: MA Experiment ID: 20000180 Result: Down-regulated in Transcription
  misc_feature: MA Experiment 20000180 PARAMETER Experiment Name: At_Germinating_Seeds_P Parameter: Age (hr) Value: 24 vs. 0
  misc_feature: MA Experiment 20000180 PARAMETER Experiment Name: At_Germinating_Seeds_P Parameter: Tissue Value: Germinating Seeds
  misc_feature: MA Experiment ID: 20001247 Result: Down-regulated in Transcription
  misc_feature: MA Experiment 20001247 PARAMETER Experiment Name: At_Far-red-induction_P Parameter: Age (day) Value: 7
  misc_feature: MA Experiment 20001247 PARAMETER Experiment Name: At_Far-red-induction_P Parameter: Light Value: Far-red vs. White
  misc_feature: MA Experiment 20001247 PARAMETER Experiment Name: At_Far-red-induction_P Parameter: Organism Value: A. thaliana
  misc_feature: MA Experiment 20001247 PARAMETER Experiment Name: At_Far-red-induction_P Parameter: Plant Line Value: Columbia
  misc_feature: MA Experiment 20001247 PARAMETER Experiment Name: At_Far-red-induction_P Parameter: Timepoint (hr) Value: 1
  misc_feature: MA Experiment 20001247 PARAMETER Experiment Name: At_Far-red-induction_P Parameter: Tissue Value: Whole Plant
  misc_feature: MA Experiment ID: 20001556 Result: Up-regulated in Transcription
  misc_feature: MA Experiment 20001556 PARAMETER Experiment Name: At_Drought_Soil_Dry_P Parameter: Age (day) Value: 26
  misc_feature: MA Experiment 20001556 PARAMETER Experiment Name: At_Drought_Soil_Dry_P Parameter: Organism Value: A. thaliana
  misc_feature: MA Experiment 20001556 PARAMETER Experiment Name: At_Drought_Soil_Dry_P Parameter: Plant Line Value: WS
  misc_feature: MA Experiment 20001556 PARAMETER Experiment Name: At_Drought_Soil_Dry_P Parameter: Post Timepoint (hr) Value: None
  misc_feature: MA Experiment 20001556 PARAMETER Experiment Name: At_Drought_Soil_Dry_P Parameter: Post-Treatment Value: None
  misc_feature: MA Experiment 20001556 PARAMETER Experiment Name: At_Drought_Soil_Dry_P Parameter: Timepoint (day) Value: 12
  misc_feature: MA Experiment 20001556 PARAMETER Experiment Name: At_Drought_Soil_Dry_P Parameter: Treatment Value: Drought vs. No Drought
  misc_feature: MA Experiment ID: 20001558 Result: Up-regulated in Transcription
  misc_feature: MA Experiment 20001558 PARAMETER Experiment Name: At_Drought_Soil_Dry_P Parameter: Age (day) Value: 27
  misc_feature: MA Experiment 20001558 PARAMETER Experiment Name: At_Drought_Soil_Dry_P Parameter: Organism Value: A. thaliana
  misc_feature: MA Experiment 20001558 PARAMETER Experiment Name: At_Drought_Soil_Dry_P Parameter: Plant Line Value: WS
  misc_feature: MA Experiment 20001558 PARAMETER Experiment Name: At_Drought_Soil_Dry_P Parameter: Post Timepoint (hr) Value: 6
  misc_feature: MA Experiment 20001558 PARAMETER Experiment Name: At_Drought_Soil_Dry_P Parameter: Post-Treatment Value: Re-Water vs. No Drought
  misc_feature: MA Experiment 20001558 PARAMETER Experiment Name: At_Drought_Soil_Dry_P Parameter: Timepoint (day) Value: 13
  misc_feature: MA Experiment 20001558 PARAMETER Experiment Name: At_Drought_Soil_Dry_P Parameter: Treatment Value: Drought vs. No Drought
  misc_feature: MA Experiment ID: 20001757 Result: Up-regulated in Transcription
  misc_feature: MA Experiment 20001757 PARAMETER Experiment Name: At_50mM_NH4NO3_L-to-H_P Parameter: Timepoint (hr) Value: 6
  misc_feature: MA Experiment 20001757 PARAMETER Experiment Name: At_50mM_NH4NO3_L-to-H_P Parameter: Tissue Value: Leaf
  misc_feature: MA Experiment 20001757 PARAMETER Experiment Name: At_50mM_NH4NO3_L-to-H_P Parameter: Treatment Value: 50mM NH4NO3 vs 100mM Mannitol

SEQ ID NO: 91972 - protein, 406 aa, Arabidopsis thaliana; identical to SEQ ID NO: 88216
  peptide (1)..(406): Ceres Seq. ID no. 12706523
  misc_feature (191)..(399): Pfam Name: High molecular weight glutenin subunit Pfam Description: High molecular weight glutenin subunit
  misc_feature (1)..(399): Homolog of NCBI NO: 15235263 NR Description: DAG-like protein; protein id: At4g20020.1
  misc_feature (229)..(406): Homolog of NCBI NO: 19310564 NR Description: putative DAG protein [Arabidopsis thaliana]
  misc_feature (1)..(403): Homolog of NCBI NO: 15241580 NR Description: unknown protein; protein id: At5g44780.1 thaliana] >gi|2660672|gb|AAC79143.1| similar to pMS10 protein thaliana] >gi|9758382|dbj|BAB08831.1| gene_id:K23L20.12~unknown
  misc_feature (77)..(389): Homolog of NCBI NO: 18400602 NR Description: expressed protein; protein id: At3g15000.1, by cDNA: gi_16226542 [Arabidopsis thaliana] Unknown mitochondrial protein At3g15000
  misc_feature (5)..(227): Homolog of NCBI NO: 21593052 NR Description: DAG protein, putative [Arabidopsis thaliana]
  misc_feature (24)..(210): Homolog of NCBI NO: 38636775 NR Description: putative DAG protein [Oryza sativa (japonica
  misc_feature (1)..(199): Homolog of NCBI NO: 6014904 NR Description: DAG PROTEIN, CHLOROPLAST PRECURSOR
  misc_feature (5)..(227): Homolog of NCBI NO: 15220382 NR Description: DAG protein, putative; protein id: At1g11430.1, by cDNA: 35647. [Arabidopsis thaliana] T23J18.10 [Arabidopsis thaliana] >gi|26450103|dbj|BAC42171.1|
  misc_feature (1)..(206): Homolog of NCBI NO: 27754695 NR Description: putative DAG protein [Arabidopsis thaliana]
  misc_feature (1)..(206): Homolog of NCBI NO: 15230785 NR Description: DAG protein, putative; protein id: At3g06790.1 thaliana] >gi|7549634|gb|AAF63819.1| DAG protein, putative

SEQ ID NO: 91973 - protein, 404 aa, Arabidopsis thaliana; identical to SEQ ID NO: 88217
  peptide (1)..(404): Ceres Seq. ID no. 12706524
  misc_feature (189)..(397): Pfam Name: High molecular weight glutenin subunit Pfam Description: High molecular weight glutenin subunit
  misc_feature (1)..(397): Homolog of NCBI NO: 15235263 NR Description: DAG-like protein; protein id: At4g20020.1
  misc_feature (227)..(404): Homolog of NCBI NO: 19310564 NR Description: putative DAG protein [Arabidopsis thaliana]
  misc_feature (1)..(401): Homolog of NCBI NO: 15241580 NR Description: unknown protein; protein id: At5g44780.1 thaliana] >gi|2660672|gb|AAC79143.1| similar to pMS10 protein thaliana] >gi|9758382|dbj|BAB08831.1| gene_id:K23L20.12~unknown
  misc_feature (75)..(387): Homolog of NCBI NO: 18400602 NR Description: expressed protein; protein id: At3g15000.1, by cDNA: gi_16226542 [Arabidopsis thaliana] Unknown mitochondrial protein At3g15000
  misc_feature (3)..(225): Homolog of NCBI NO: 21593052 NR Description: DAG protein, putative [Arabidopsis thaliana]
  misc_feature (22)..(208): Homolog of NCBI NO: 38636775 NR Description: putative DAG protein [Oryza sativa (japonica
  misc_feature (1)..(197): Homolog of NCBI NO: 6014904 NR Description: DAG PROTEIN, CHLOROPLAST PRECURSOR
  misc_feature (3)..(225): Homolog of NCBI NO: 15220382 NR Description: DAG protein, putative; protein id: At1g11430.1, by cDNA: 35647. [Arabidopsis thaliana] T23J18.10 [Arabidopsis thaliana] >gi|26450103|dbj|BAC42171.1|
  misc_feature (1)..(204): Homolog of NCBI NO: 27754695 NR Description: putative DAG protein [Arabidopsis thaliana]
  misc_feature (1)..(204): Homolog of NCBI NO: 15230785 NR Description: DAG protein, putative; protein id: At3g06790.1 thaliana] >gi|7549634|gb|AAF63819.1| DAG protein, putative

SEQ ID NO: 91974 - protein, 313 aa, Arabidopsis thaliana; identical to SEQ ID NO: 76789
  peptide (1)..(313): Ceres Seq. ID no. 12706525
  misc_feature (98)..(306): Pfam Name: High molecular weight glutenin subunit Pfam Description: High molecular weight glutenin subunit
  misc_feature (1)..(306): Homolog of NCBI NO: 15235263 NR Description: DAG-like protein; protein id: At4g20020.1
  misc_feature (136)..(313): Homolog of NCBI NO: 19310564 NR Description: putative DAG protein [Arabidopsis thaliana]
  misc_feature (1)..(310): Homolog of NCBI NO: 15241580 NR Description: unknown protein; protein id: At5g44780.1 thaliana] >gi|2660672|gb|AAC79143.1| similar to pMS10 protein thaliana] >gi|9758382|dbj|BAB08831.1| gene_id:K23L20.12~unknown
  misc_feature (1)..(296): Homolog of NCBI NO: 18400602 NR Description: expressed protein; protein id: At3g15000.1, by cDNA: gi_16226542 [Arabidopsis thaliana] Unknown mitochondrial protein At3g15000
  misc_feature (1)..(134): Homolog of NCBI NO: 21593052 NR Description: DAG protein, putative [Arabidopsis thaliana]
  misc_feature (1)..(117): Homolog of NCBI NO: 38636775 NR Description: putative DAG protein [Oryza sativa (japonica
  misc_feature (1)..(106): Homolog of NCBI NO: 6014904 NR Description: DAG PROTEIN, CHLOROPLAST PRECURSOR
  misc_feature (1)..(134): Homolog of NCBI NO: 15220382 NR Description: DAG protein, putative; protein id: At1g11430.1, by cDNA: 35647. [Arabidopsis thaliana] T23J18.10 [Arabidopsis thaliana] >gi|26450103|dbj|BAC42171.1|
  misc_feature (1)..(113): Homolog of NCBI NO: 27754695 NR Description: putative DAG protein [Arabidopsis thaliana]
  misc_feature (1)..(113): Homolog of NCBI NO: 15230785 NR Description: DAG protein, putative; protein id: At3g06790.1 thaliana] >gi|7549634|gb|AAF63819.1| DAG protein, putative

SEQ ID NO: 91975 - DNA, 1609 bp, Arabidopsis thaliana; identical to SEQ ID NO: 88219
  misc_feature (1)..(1609): Ceres Seq. ID no. 12706529
  misc_feature: MA Experiment ID: 108473 Result: Down-regulated in Transcription
  misc_feature: MA Experiment 108473 PARAMETER Experiment Name: At_Drought_Flowers_cDNA_P Parameter: Timepoint (hr) Value: 7 d
  misc_feature: MA Experiment 108473 PARAMETER Experiment Name: At_Drought_Flowers_cDNA_P Parameter: Tissue Value: Flower
  misc_feature: MA Experiment 108473 PARAMETER Experiment Name: At_Drought_Flowers_cDNA_P Parameter: Treatment Value: Drought vs. No Drought
  misc_feature: MA Experiment ID: 108474 Result: Down-regulated in Transcription
  misc_feature: MA Experiment 108474 PARAMETER Experiment Name: At_Drought_Flowers_cDNA_P Parameter: Timepoint (hr) Value: null
  misc_feature: MA Experiment 108474 PARAMETER Experiment Name: At_Drought_Flowers_cDNA_P Parameter: Treatment Value: Drought vs. No Drought
  misc_feature: MA Experiment ID: 108501 Result: Down-regulated in Transcription
  misc_feature: MA Experiment 108501 PARAMETER Experiment Name: At_ap2_floral_buds_cDNA_P Parameter: Plant Line Value: ap2 (Ler.)
  misc_feature: MA Experiment 108501 PARAMETER Experiment Name: At_ap2_floral_buds_cDNA_P Parameter: Tissue Value: Closed Flower
  misc_feature: MA Experiment ID: 108595 Result: Up-regulated in Transcription
  misc_feature: MA Experiment 108595 PARAMETER Experiment Name: At_Ler-pi_Ovule_cDNA_P Parameter: Plant Line Value: null
  misc_feature: MA Experiment ID: 20000171 Result: Up-regulated in Transcription
  misc_feature: MA Experiment 20000171 PARAMETER Experiment Name: At_42deg_Heat_P Parameter: Age (day) Value: 14
  misc_feature: MA Experiment 20000171 PARAMETER Experiment Name: At_42deg_Heat_P Parameter: Organism Value: A. thaliana
  misc_feature: MA Experiment 20000171 PARAMETER Experiment Name: At_42deg_Heat_P Parameter: Plant Line Value: WS
  misc_feature: MA Experiment 20000171 PARAMETER Experiment Name: At_42deg_Heat_P Parameter: Temperature (deg C) Value: 42 vs. 22
  misc_feature: MA Experiment 20000171 PARAMETER Experiment Name: At_42deg_Heat_P Parameter: Timepoint (hr) Value: 1
  misc_feature: MA Experiment 20000171 PARAMETER Experiment Name: At_42deg_Heat_P Parameter: Tissue Value: Aerial
  misc_feature: MA Experiment ID: 20000173 Result: Up-regulated in Transcription
  misc_feature: MA Experiment 20000173 PARAMETER Experiment Name: At_42deg_Heat_P Parameter: Age (day) Value: 14
  misc_feature: MA Experiment 20000173 PARAMETER Experiment Name: At_42deg_Heat_P Parameter: Organism Value: A. thaliana
  misc_feature: MA Experiment 20000173 PARAMETER Experiment Name: At_42deg_Heat_P Parameter: Plant Line Value: WS
  misc_feature: MA Experiment 20000173 PARAMETER Experiment Name: At_42deg_Heat_P Parameter: Temperature (deg C) Value: 42 vs. 22
  misc_feature: MA Experiment 20000173 PARAMETER Experiment Name: At_42deg_Heat_P Parameter: Timepoint (hr) Value: 6
  misc_feature: MA Experiment 20000173 PARAMETER Experiment Name: At_42deg_Heat_P Parameter: Tissue Value: Aerial
  misc_feature: MA Experiment ID: 20000184 Result: Down-regulated in Transcription
  misc_feature: MA Experiment 20000184 PARAMETER Experiment Name: At_Shoots__P Parameter: Age (day) Value: 7
  misc_feature: MA Experiment 20000184 PARAMETER Experiment Name: At_Shoots__P Parameter: Tissue Value: Shoots vs. Whole Plant
  misc_feature: MA Experiment ID: 20000185 Result: Down-regulated in Transcription
  misc_feature: MA Experiment 20000185 PARAMETER Experiment Name: At_Roots__P Parameter: Age (day) Value: 7 vs. 21
  misc_feature: MA Experiment 20000185 PARAMETER Experiment Name: At_Roots__P Parameter: Organism Value: A. thaliana
  misc_feature: MA Experiment 20000185 PARAMETER Experiment Name: At_Roots__P Parameter: Tissue Value: Roots vs. Whole Plant
  misc_feature: MA Experiment ID: 20000234 Result: Up-regulated in Transcription
  misc_feature: MA Experiment 20000234 PARAMETER Experiment Name: At_Siliques_P Parameter: Age (day) Value: 21
  misc_feature: MA Experiment 20000234 PARAMETER Experiment Name: At_Siliques_P Parameter: Organism Value: A. thaliana
  misc_feature: MA Experiment 20000234 PARAMETER Experiment Name: At_Siliques_P Parameter: Plant Line Value: WS
  misc_feature: MA Experiment 20000234 PARAMETER Experiment Name: At_Siliques_P Parameter: Tissue Value: Less Than 5mm Siliques vs. Whole Plant
  misc_feature: MA Experiment ID: 20000235 Result: Up-regulated in Transcription
  misc_feature: MA Experiment 20000235 PARAMETER Experiment Name: At_Siliques_P Parameter: Age (day) Value: 21
  misc_feature: MA Experiment 20000235 PARAMETER Experiment Name: At_Siliques_P Parameter: Organism Value: A. thaliana
  misc_feature: MA Experiment 20000235 PARAMETER Experiment Name: At_Siliques_P Parameter: Plant Line Value: WS
  misc_feature: MA Experiment 20000235 PARAMETER Experiment Name: At_Siliques_P Parameter: Tissue Value: 5-10mm Siliques vs. Whole Plant
  misc_feature: MA Experiment ID: 20000265 Result: Up-regulated in Transcription
  misc_feature: MA Experiment 20000265 PARAMETER Experiment Name: At_Open_Flower_P Parameter: Age (day) Value: 21
  misc_feature: MA Experiment 20000265 PARAMETER Experiment Name: At_Open_Flower_P Parameter: Plant Line Value: WS
  misc_feature: MA Experiment 20000265 PARAMETER Experiment Name: At_Open_Flower_P Parameter: Tissue Value: Closed Flower vs. Whole Plant
  misc_feature: MA Experiment ID: 20000286 Result: Up-regulated in Transcription
  misc_feature: MA Experiment 20000286 PARAMETER Experiment Name: At_Open_Flower_P Parameter: Age (day) Value: 21
  misc_feature: MA Experiment 20000286 PARAMETER Experiment Name: At_Open_Flower_P Parameter: Plant Line Value: WS
  misc_feature: MA Experiment 20000286 PARAMETER Experiment Name: At_Open_Flower_P Parameter: Tissue Value: Half Open vs. Whole Plant
  misc_feature: MA Experiment ID: 20000438 Result: Down-regulated in Transcription
  misc_feature: MA Experiment 20000438 PARAMETER Experiment Name: At_Shoots__P Parameter: Age (day) Value: 14
  misc_feature: MA Experiment 20000438 PARAMETER Experiment Name: At_Shoots__P Parameter: Tissue Value: Shoots vs. Whole Plant
  misc_feature: MA Experiment ID: 20001760 Result: Up-regulated in Transcription
  misc_feature: MA Experiment 20001760 PARAMETER Experiment Name: At_50mM_NH4NO3_L-to-H_P Parameter: Timepoint (hr) Value: 2
  misc_feature: MA Experiment 20001760 PARAMETER Experiment Name: At_50mM_NH4NO3_L-to-H_P Parameter: Tissue Value: Siliques
  misc_feature: MA Experiment 20001760 PARAMETER Experiment Name: At_50mM_NH4NO3_L-to-H_P Parameter: Treatment Value: 50mM NH4NO3 vs 100mM Mannitol
  misc_feature: MA Experiment ID: 20001773 Result: Up-regulated in Transcription
  misc_feature: MA Experiment 20001773 PARAMETER Experiment Name: At_Far-red-enriched-adult_P Parameter: Age (day) Value: 30
  misc_feature: MA Experiment 20001773 PARAMETER Experiment Name: At_Far-red-enriched-adult_P Parameter: Light Value: Far-red enriched vs. White
  misc_feature: MA Experiment 20001773 PARAMETER Experiment Name: At_Far-red-enriched-adult_P Parameter: Organism Value: A. thaliana
  misc_feature: MA Experiment 20001773 PARAMETER Experiment Name: At_Far-red-enriched-adult_P Parameter: Plant Line Value: Columbia
  misc_feature: MA Experiment 20001773 PARAMETER Experiment Name: At_Far-red-enriched-adult_P Parameter: Timepoint (hr) Value: 48
  misc_feature: MA Experiment 20001773 PARAMETER Experiment Name: At_Far-red-enriched-adult_P Parameter: Tissue Value: Aerial

SEQ ID NO: 91976 - protein, 481 aa, Arabidopsis thaliana; identical to SEQ ID NO: 88220
  peptide (1)..(481): Ceres Seq. ID no. 12706530
  misc_feature (1)..(481): Homolog of NCBI NO: 15235269 NR Description: putative protein; protein id: At4g20050.1
  misc_feature (38)..(479): Homolog of NCBI NO: 38347355 NR Description: OSJNBa0070C17.16 [Oryza sativa (japonica
  misc_feature (119)..(479): Homolog of NCBI NO: 7485728 NR Description: hypothetical protein F18F4.140 - Arabidopsis >gi|2827658|emb|CAA16612.1| putative protein [Arabidopsis >gi|7268799|emb|CAB79004.1| putative protein [Arabidopsis
  misc_feature (119)..(479): Homolog of NCBI NO: 18415427 NR Description: putative protein; protein id: At4g20040.1, by cDNA: gi_16226215 [Arabidopsis thaliana] AT4g20040/F18F4_140 [Arabidopsis thaliana]

SEQ ID NO: 91977 - protein, 472 aa, Arabidopsis thaliana; identical to SEQ ID NO: 88221
  peptide (1)..(472): Ceres Seq. ID no. 12706531
  misc_feature (1)..(472): Homolog of NCBI NO: 15235269 NR Description: putative protein; protein id: At4g20050.1
  misc_feature (29)..(470): Homolog of NCBI NO: 38347355 NR Description: OSJNBa0070C17.16 [Oryza sativa (japonica
  misc_feature (110)..(470): Homolog of NCBI NO: 7485728 NR Description: hypothetical protein F18F4.140 - Arabidopsis >gi|2827658|emb|CAA16612.1| putative protein [Arabidopsis >gi|7268799|emb|CAB79004.1| putative protein [Arabidopsis
  misc_feature (110)..(470): Homolog of NCBI NO: 18415427 NR Description: putative protein; protein id: At4g20040.1, by cDNA: gi_16226215 [Arabidopsis thaliana] AT4g20040/F18F4_140 [Arabidopsis thaliana]

SEQ ID NO: 91978 - protein, 465 aa, Arabidopsis thaliana; identical to SEQ ID NO: 88222
  peptide (1)..(465): Ceres Seq. ID no. 12706532
  misc_feature (1)..(465): Homolog of NCBI NO: 15235269 NR Description: putative protein; protein id: At4g20050.1
  misc_feature (22)..(463): Homolog of NCBI NO: 38347355 NR Description: OSJNBa0070C17.16 [Oryza sativa (japonica
  misc_feature (103)..(463): Homolog of NCBI NO: 7485728 NR Description: hypothetical protein F18F4.140 - Arabidopsis >gi|2827658|emb|CAA16612.1| putative protein [Arabidopsis >gi|7268799|emb|CAB79004.1| putative protein [Arabidopsis
  misc_feature (103)..(463): Homolog of NCBI NO: 18415427 NR Description: putative protein; protein id: At4g20040.1, by cDNA: gi_16226215 [Arabidopsis thaliana] AT4g20040/F18F4_140 [Arabidopsis thaliana]

SEQ ID NO: 91979 - DNA, 2028 bp, Arabidopsis thaliana; identical to SEQ ID NO: 88223
  misc_feature (1)..(2028): Ceres Seq. ID no. 12706533
  misc_feature: MA Experiment ID: 20001451 Result: Down-regulated in Transcription
  misc_feature: MA Experiment 20001451 PARAMETER Experiment Name: At_Far-red-induction_P Parameter: Age (day) Value: 7
  misc_feature: MA Experiment 20001451 PARAMETER Experiment Name: At_Far-red-induction_P Parameter: Light Value: Far-red vs. White
  misc_feature: MA Experiment 20001451 PARAMETER Experiment Name: At_Far-red-induction_P Parameter: Organism Value: A. thaliana
  misc_feature: MA Experiment 20001451 PARAMETER Experiment Name: At_Far-red-induction_P Parameter: Plant Line Value: Columbia
  misc_feature: MA Experiment 20001451 PARAMETER Experiment Name: At_Far-red-induction_P Parameter: Timepoint (hr) Value: 24
  misc_feature: MA Experiment 20001451 PARAMETER Experiment Name: At_Far-red-induction_P Parameter: Tissue Value: Whole Plant

SEQ ID NO: 91980 - protein, 675 aa, Arabidopsis thaliana; identical to SEQ ID NO: 88224
  peptide (1)..(675): Ceres Seq. ID no. 12706534
  misc_feature (433)..(467): Pfam Name: PPR repeat Pfam Description: PPR repeat
  misc_feature (42)..(605): Homolog of NCBI NO: 15237662 NR Description: putative protein; protein id: At5g64320.1
  misc_feature (10)..(614): Homolog of NCBI NO: 15231863 NR Description: putative protein; protein id: At3g53700.1, by cDNA: gi_15982930 [Arabidopsis thaliana]
  misc_feature (99)..(608): Homolog of NCBI NO: 34908368 NR Description: P0529E05.10 [Oryza sativa (japonica
  misc_feature (115)..(586): Homolog of NCBI NO: 15242446 NR Description: putative protein; protein id: At5g39710.1
  misc_feature (185)..(614): Homolog of NCBI NO: 15218325 NR Description: hypothetical protein; protein id: At1g09900.1
  misc_feature (62)..(614): Homolog of NCBI NO: 34896698 NR Description: putative pentatricopeptide repeat protein [Oryza
  misc_feature (62)..(602): Homolog of NCBI NO: 15221300 NR Description: hypothetical protein; protein id: At1g74580.1
  misc_feature (78)..(574): Homolog of NCBI NO: 15231863 NR Description: putative protein; protein id: At3g53700.1, by cDNA: gi_15982930 [Arabidopsis thaliana]
  misc_feature (180)..(603): Homolog of NCBI NO: 34910106 NR Description: B1100D10.28 [Oryza sativa (japonica
  misc_feature (114)..(656): Homolog of NCBI NO: 33859440 NR Description: PPR protein [Oryza sativa (indica cultivar-group)]

SEQ ID NO: 91981 - protein, 628 aa, Arabidopsis thaliana; identical to SEQ ID NO: 88225
  peptide (1)..(628): Ceres Seq. ID no. 12706535
  misc_feature (386)..(420): Pfam Name: PPR repeat Pfam Description: PPR repeat
  misc_feature (1)..(558): Homolog of NCBI NO: 15237662 NR Description: putative protein; protein id: At5g64320.1
  misc_feature (1)..(567): Homolog of NCBI NO: 15231863 NR Description: putative protein; protein id: At3g53700.1, by cDNA: gi_15982930 [Arabidopsis thaliana]
  misc_feature (52)..(561): Homolog of NCBI NO: 34908368 NR Description: P0529E05.10 [Oryza sativa (japonica
  misc_feature (68)..(539): Homolog of NCBI NO: 15242446 NR Description: putative protein; protein id: At5g39710.1
  misc_feature (138)..(567): Homolog of NCBI NO: 15218325 NR Description: hypothetical protein; protein id: At1g09900.1
  misc_feature (15)..(567): Homolog of NCBI NO: 34896698 NR Description: putative pentatricopeptide repeat protein [Oryza
  misc_feature (15)..(555): Homolog of NCBI NO: 15221300 NR Description: hypothetical protein; protein id: At1g74580.1
  misc_feature (31)..(527): Homolog of NCBI NO: 15231863 NR Description: putative protein; protein id: At3g53700.1, by cDNA: gi_15982930 [Arabidopsis thaliana]
  misc_feature (133)..(556): Homolog of NCBI NO: 34910106 NR Description: B1100D10.28 [Oryza sativa (japonica
  misc_feature (67)..(609): Homolog of NCBI NO: 33859440 NR Description: PPR protein [Oryza sativa (indica cultivar-group)]

SEQ ID NO: 91982 - protein, 613 aa, Arabidopsis thaliana; identical to SEQ ID NO: 88226
  peptide (1)..(613): Ceres Seq. ID no. 12706536
  misc_feature (371)..(405): Pfam Name: PPR repeat Pfam Description: PPR repeat
  misc_feature (1)..(543): Homolog of NCBI NO: 15237662 NR Description: putative protein; protein id: At5g64320.1
  misc_feature (1)..(552): Homolog of NCBI NO: 15231863 NR Description: putative protein; protein id: At3g53700.1, by cDNA: gi_15982930 [Arabidopsis thaliana]
  misc_feature (37)..(546): Homolog of NCBI NO: 34908368 NR Description: P0529E05.10 [Oryza sativa (japonica
  misc_feature (53)..(524): Homolog of NCBI NO: 15242446 NR Description: putative protein; protein id: At5g39710.1
  misc_feature (123)..(552): Homolog of NCBI NO: 15218325 NR Description: hypothetical protein; protein id: At1g09900.1
  misc_feature (1)..(552): Homolog of NCBI NO: 34896698 NR Description: putative pentatricopeptide repeat protein [Oryza
  misc_feature (1)..(540): Homolog of NCBI NO: 15221300 NR Description: hypothetical protein; protein id: At1g74580.1
  misc_feature (16)..(512): Homolog of NCBI NO: 15231863 NR Description: putative protein; protein id: At3g53700.1, by cDNA: gi_15982930 [Arabidopsis thaliana]
  misc_feature (118)..(541): Homolog of NCBI NO: 34910106 NR Description: B1100D10.28 [Oryza sativa (japonica
  misc_feature (52)..(594): Homolog of NCBI NO: 33859440 NR Description: PPR protein [Oryza sativa (indica cultivar-group)]

SEQ ID NO: 91983 - DNA, 3633 bp, Arabidopsis thaliana; identical to SEQ ID NO: 88227
  misc_feature (1)..(3633): Ceres Seq. ID no. 12706545
  misc_feature: MA Experiment ID: 20000438 Result: Up-regulated in Transcription
  misc_feature: MA Experiment 20000438 PARAMETER Experiment Name: At_Shoots__P Parameter: Age (day) Value: 14
  misc_feature: MA Experiment 20000438 PARAMETER Experiment Name: At_Shoots__P Parameter: Tissue Value: Shoots vs. Whole Plant
  misc_feature: MA Experiment ID: 20000439 Result: Up-regulated in Transcription
  misc_feature: MA Experiment 20000439 PARAMETER Experiment Name: At_Roots__P Parameter: Age (day) Value: 14 vs. 21
  misc_feature: MA Experiment 20000439 PARAMETER Experiment Name: At_Roots__P Parameter: Organism Value: A. thaliana
  misc_feature: MA Experiment 20000439 PARAMETER Experiment Name: At_Roots__P Parameter: Tissue Value: Roots vs. Whole Plant

SEQ ID NO: 91984 - protein, 1210 aa, Arabidopsis thaliana; identical to SEQ ID NO: 88228
  peptide (1)..(1210): Ceres Seq. ID no. 12706546
  misc_feature (54)..(1210): Homolog of NCBI NO: 15235318 NR Description: leucine-rich repeat transmembrane protein kinase, protein id: At4g20140.1 [Arabidopsis thaliana]
  misc_feature (65)..(962): Homolog of NCBI NO: 9758374 NR Description: receptor-like protein kinase [Arabidopsis
  misc_feature (226)..(901): Homolog of NCBI NO: 15237562 NR Description: leucine-rich repeat transmembrane protein kinase, protein id: At5g63930.1 [Arabidopsis thaliana]
  misc_feature (902)..(1206): Homolog of NCBI NO: 15237562 NR Description: leucine-rich repeat transmembrane protein kinase, protein id: At5g63930.1 [Arabidopsis thaliana]
  misc_feature (227)..(898): Homolog of NCBI NO: 15225805 NR Description: putative receptor-like protein kinase; protein id:
  misc_feature (899)..(1206): Homolog of NCBI NO: 15225805 NR Description: putative receptor-like protein kinase; protein id:
  misc_feature (1)..(688): Homolog of NCBI NO: 15237562 NR Description: leucine-rich repeat transmembrane protein kinase, protein id: At5g63930.1 [Arabidopsis thaliana]
  misc_feature (6)..(1199): Homolog of NCBI NO: 15240747 NR Description: receptor-like protein kinase-like protein;
  misc_feature (6)..(1199): Homolog of NCBI NO: 23304947 NR Description: extra sporogenous cells [Arabidopsis thaliana]
  misc_feature (5)..(705): Homolog of NCBI NO: 15225805 NR Description: putative receptor-like protein kinase; protein id:

SEQ ID NO: 91985 - protein, 1040 aa, Arabidopsis thaliana; identical to SEQ ID NO: 88229
  peptide (1)..(1040): Ceres Seq. ID no. 12706547
  misc_feature (1)..(1040): Homolog of NCBI NO: 15235318 NR Description: leucine-rich repeat transmembrane protein kinase, protein id: At4g20140.1 [Arabidopsis thaliana]
  misc_feature (1)..(792): Homolog of NCBI NO: 9758374 NR Description: receptor-like protein kinase [Arabidopsis
  misc_feature (56)..(731): Homolog of NCBI NO: 15237562 NR Description: leucine-rich repeat transmembrane protein kinase, protein id: At5g63930.1 [Arabidopsis thaliana]
  misc_feature (732)..(1036): Homolog of NCBI NO: 15237562 NR Description: leucine-rich repeat transmembrane protein kinase, protein id: At5g63930.1 [Arabidopsis thaliana]
  misc_feature (57)..(728): Homolog of NCBI NO: 15225805 NR Description: putative receptor-like protein kinase; protein id:
  misc_feature (729)..(1036): Homolog of NCBI NO: 15225805 NR Description: putative receptor-like protein kinase; protein id:
  misc_feature (1)..(518): Homolog of NCBI NO: 15237562 NR Description: leucine-rich repeat transmembrane protein kinase, protein id: At5g63930.1 [Arabidopsis thaliana]
  misc_feature (1)..(1029): Homolog of NCBI NO: 15240747 NR Description: receptor-like protein kinase-like protein;
  misc_feature (1)..(1029): Homolog of NCBI NO: 23304947 NR Description: extra sporogenous cells [Arabidopsis thaliana]
  misc_feature (1)..(535): Homolog of NCBI NO: 15225805 NR Description: putative receptor-like protein kinase; protein id:

SEQ ID NO: 91986 - protein, 985 aa, Arabidopsis thaliana; identical to SEQ ID NO: 88230
  peptide (1)..(985): Ceres Seq. ID no. 12706548
  misc_feature (1)..(985): Homolog of NCBI NO: 15235318 NR Description: leucine-rich repeat transmembrane protein kinase, protein id: At4g20140.1 [Arabidopsis thaliana]
  misc_feature (1)..(737): Homolog of NCBI NO: 9758374 NR Description: receptor-like protein kinase [Arabidopsis
  misc_feature (1)..(676): Homolog of NCBI NO: 15237562 NR Description: leucine-rich repeat transmembrane protein kinase, protein id: At5g63930.1 [Arabidopsis thaliana]
  misc_feature (677)..(981): Homolog of NCBI NO: 15237562 NR Description: leucine-rich repeat transmembrane protein kinase, protein id: At5g63930.1 [Arabidopsis thaliana]
  misc_feature (2)..(673): Homolog of NCBI NO: 15225805 NR Description: putative receptor-like protein kinase; protein id:
  misc_feature (674)..(981): Homolog of NCBI NO: 15225805 NR Description: putative receptor-like protein kinase; protein id:
  misc_feature (1)..(463): Homolog of NCBI NO: 15237562 NR Description: leucine-rich repeat transmembrane protein kinase, protein id: At5g63930.1 [Arabidopsis thaliana]
  misc_feature (1)..(974): Homolog of NCBI NO: 15240747 NR Description: receptor-like protein kinase-like protein;
  misc_feature (1)..(974): Homolog of NCBI NO: 23304947 NR Description: extra sporogenous cells [Arabidopsis thaliana]
  misc_feature (1)..(480): Homolog of NCBI NO: 15225805 NR Description: putative receptor-like protein kinase; protein id:

SEQ ID NO: 91987 - DNA, 858 bp, Arabidopsis thaliana; identical to SEQ ID NO: 88231
  misc_feature (1)..(858): Ceres Seq. ID no. 12706558
  misc_feature: MA Experiment ID: 20000227 Result: Down-regulated in Transcription
  misc_feature: MA Experiment 20000227 PARAMETER Experiment Name: At_Root-Tips-vs-Tops_P Parameter: Tissue Value: Root Tips vs. Root Tops
  misc_feature: MA Experiment ID: 20000439 Result: Up-regulated in Transcription
  misc_feature: MA Experiment 20000439 PARAMETER Experiment Name: At_Roots__P Parameter: Age (day) Value: 14 vs. 21
  misc_feature: MA Experiment 20000439 PARAMETER Experiment Name: At_Roots__P Parameter: Organism Value: A. thaliana
  misc_feature: MA Experiment 20000439 PARAMETER Experiment Name: At_Roots__P Parameter: Tissue Value: Roots vs. Whole Plant
  misc_feature: MA Experiment ID: 20000451 Result: Down-regulated in Transcription
  misc_feature: MA Experiment 20000451 PARAMETER Experiment Name: At_CS6879_Shoots-Roots_P Parameter: Age (day) Value: 14
  misc_feature: MA Experiment 20000451 PARAMETER Experiment Name: At_CS6879_Shoots-Roots_P Parameter: Organism Value: A. thaliana
  misc_feature: MA Experiment 20000451 PARAMETER Experiment Name: At_CS6879_Shoots-Roots_P Parameter: Plant Line Value: CS6879 vs. WS
  misc_feature: MA Experiment 20000451 PARAMETER Experiment Name: At_CS6879_Shoots-Roots_P Parameter: Tissue Value: Roots

SEQ ID NO: 91988 - protein, 285 aa, Arabidopsis thaliana; identical to SEQ ID NO: 88232
  peptide (1)..(285): Ceres Seq. ID no. 12706559
  misc_feature (1)..(110): Pfam Name: Cytochrome P450 Pfam Description: Cytochrome P450
  misc_feature (98)..(285): Homolog of NCBI NO: 13878368 NR Description: CYTOCHROME P450 71A28
  misc_feature (1)..(110): Homolog of NCBI NO: 13878368 NR Description: CYTOCHROME P450 71A28
  misc_feature (40)..(285): Homolog of NCBI NO: 22328826 NR Description: menthofuran synthase(cytochrome p450 family),
  misc_feature (98)..(285): Homolog of NCBI NO: 7430654 NR Description: probable cytochrome P450 F1C12.160 - Arabidopsis >gi|2982441|emb|CAA18249.1| cytochrome p450 like protein thaliana] >gi|7268819|emb|CAB79024.1| cytochrome p450 like
  misc_feature (1)..(98): Homolog of NCBI NO: 7430654 NR Description: probable cytochrome P450 F1C12.160 - Arabidopsis >gi|2982441|emb|CAA18249.1| cytochrome p450 like protein thaliana] >gi|7268819|emb|CAB79024.1| cytochrome p450 like
  misc_feature (94)..(279): Homolog of NCBI NO: 13878406 NR Description: Cytochrome P450 71A20 >gi|7430641|pir||T06288
  misc_feature (40)..(110): Homolog of NCBI NO: 13878406 NR Description: Cytochrome P450 71A20 >gi|7430641|pir||T06288
  misc_feature (1)..(30): Homolog of NCBI NO: 13878406 NR Description: Cytochrome P450 71A20 >gi|7430641|pir||T06288
  misc_feature (109)..(279): Homolog of NCBI NO: 15235661 NR Description: cytochrome p450 family; protein id: At4g13290.1
  misc_feature (28)..(110): Homolog of NCBI NO: 15235661 NR Description: cytochrome p450 family; protein id: At4g13290.1

SEQ ID NO: 91989 - protein, 272 aa, Arabidopsis thaliana; identical to SEQ ID NO: 88233
  peptide (1)..(272): Ceres Seq. ID no. 12706560
  misc_feature (1)..(97): Pfam Name: Cytochrome P450 Pfam Description: Cytochrome P450
  misc_feature (85)..(272): Homolog of NCBI NO: 13878368 NR Description: CYTOCHROME P450 71A28
  misc_feature (1)..(97): Homolog of NCBI NO: 13878368 NR Description: CYTOCHROME P450 71A28
  misc_feature (27)..(272): Homolog of NCBI NO: 22328826 NR Description: menthofuran synthase(cytochrome p450 family),
  misc_feature (85)..(272): Homolog of NCBI NO: 7430654 NR Description: probable cytochrome P450 F1C12.160 - Arabidopsis >gi|2982441|emb|CAA18249.1| cytochrome p450 like protein thaliana] >gi|7268819|emb|CAB79024.1| cytochrome p450 like
  misc_feature (1)..(85): Homolog of NCBI NO: 7430654 NR Description: probable cytochrome P450 F1C12.160 - Arabidopsis >gi|2982441|emb|CAA18249.1| cytochrome p450 like protein thaliana] >gi|7268819|emb|CAB79024.1| cytochrome p450 like
  misc_feature (81)..(266): Homolog of NCBI NO: 13878406 NR Description: Cytochrome P450 71A20 >gi|7430641|pir||T06288
  misc_feature (27)..(97): Homolog of NCBI NO: 13878406 NR Description: Cytochrome P450 71A20 >gi|7430641|pir||T06288
  misc_feature (1)..(17): Homolog of NCBI NO: 13878406 NR Description: Cytochrome P450 71A20 >gi|7430641|pir||T06288
  misc_feature (96)..(266): Homolog of NCBI NO: 15235661 NR Description: cytochrome p450 family; protein id: At4g13290.1
  misc_feature (15)..(97): Homolog of NCBI NO: 15235661 NR Description: cytochrome p450 family; protein id: At4g13290.1

SEQ ID NO: 91990 - protein, 219 aa, Arabidopsis thaliana; identical to SEQ ID NO: 88234
  peptide (1)..(219): Ceres Seq. ID no. 12706561
  misc_feature (32)..(219): Pfam Name: Cytochrome P450 Pfam Description: Cytochrome P450
  misc_feature (32)..(219): Homolog of NCBI NO: 13878368 NR Description: CYTOCHROME P450 71A28
  misc_feature (1)..(44): Homolog of NCBI NO: 13878368 NR Description: CYTOCHROME P450 71A28
  misc_feature (1)..(219): Homolog of NCBI NO: 22328826 NR Description: menthofuran synthase(cytochrome p450 family),
  misc_feature (32)..(219): Homolog of NCBI NO: 7430654 NR Description: probable cytochrome P450 F1C12.160 - Arabidopsis >gi|2982441|emb|CAA18249.1| cytochrome p450 like protein thaliana] >gi|7268819|emb|CAB79024.1| cytochrome p450 like
  misc_feature (1)..(32): Homolog of NCBI NO: 7430654 NR Description: probable cytochrome P450 F1C12.160 - Arabidopsis >gi|2982441|emb|CAA18249.1| cytochrome p450 like protein thaliana] >gi|7268819|emb|CAB79024.1| cytochrome p450 like
  misc_feature (28)..(213): Homolog of NCBI NO: 13878406 NR Description: Cytochrome P450 71A20 >gi|7430641|pir||T06288
  misc_feature (1)..(44): Homolog of NCBI NO: 13878406 NR Description: Cytochrome P450 71A20 >gi|7430641|pir||T06288
  misc_feature (43)..(213): Homolog of NCBI NO: 15235661 NR Description: cytochrome p450 family; protein id: At4g13290.1
  misc_feature (1)..(44): Homolog of NCBI NO: 15235661 NR Description: cytochrome p450 family; protein id: At4g13290.1
  misc_feature (32)..(216): Homolog of NCBI NO: 13878362 NR Description: Cytochrome P450 71A12 >gi|25282591|pir||C84712

SEQ ID NO: 91991 - DNA, 4626 bp, Arabidopsis thaliana; identical to SEQ ID NO: 88235
  misc_feature (1)..(4626): Ceres Seq. ID no. 12706578
  misc_feature: MA Experiment ID: 20000495 Result: Down-regulated in Transcription
  misc_feature: MA Experiment 20000495 PARAMETER Experiment Name: At_Guard_Cells_P Parameter: Harvest Date Value: 8/2/2002
  misc_feature: MA Experiment 20000495 PARAMETER Experiment Name: At_Guard_Cells_P Parameter: Organism Value: A. thaliana
  misc_feature: MA Experiment 20000495 PARAMETER Experiment Name: At_Guard_Cells_P Parameter: Tissue Value: Guard Cells vs. Leaves

SEQ ID NO: 91992 - protein, 1541 aa, Arabidopsis thaliana; identical to SEQ ID NO: 88236
  peptide (1)..(1541): Ceres Seq. ID no. 12706579
  misc_feature (627)..(698): Pfam Name: Flavin containing amine oxidoreductase Pfam Description: Flavin containing amine oxidoreductase
  misc_feature (319)..(1241): Homolog of NCBI NO: 37536384 NR Description: putative polyamine oxidase [Oryza sativa cultivar- group)] >gi|22002131|gb|AAM88615.1| putative polyamine
  misc_feature (1273)..(1537): Homolog of NCBI NO: 37536384 NR Description: putative polyamine oxidase [Oryza sativa cultivar- group)] >gi|22002131|gb|AAM88615.1| putative polyamine
  misc_feature (319)..(1202): Homolog of NCBI NO: 22213173 NR Description: putative polyamine oxidase, 3'-partial [Oryza
  misc_feature (1306)..(1519): Homolog of NCBI NO: 15234890 NR Description: hypothetical protein; protein id: At4g16320.1
  misc_feature (1306)..(1518): Homolog of NCBI NO: 9368355 NR Description: hypothetical protein [Brassica napus]
  misc_feature (801)..(1103): Homolog of NCBI NO: 39930515 NR Description: RIKEN cDNA 1810043O07 [Mus musculus]
  misc_feature (611)..(772): Homolog of NCBI NO: 39930515 NR Description: RIKEN cDNA 1810043O07 [Mus musculus]
  misc_feature (801)..(1103): Homolog of NCBI NO: 30794500 NR Description: KIAA0601 protein; FAD-binding protein BRAF35-HDAC
  misc_feature (619)..(772): Homolog of NCBI NO: 30794500 NR Description: KIAA0601 protein; FAD-binding protein BRAF35-HDAC
  misc_feature (801)..(1103): Homolog of NCBI NO: 16741682 NR Description: Unknown (protein for IMAGE:3917412) [Homo sapiens]

SEQ ID NO: 91993 - protein, 1506 aa, Arabidopsis thaliana; identical to SEQ ID NO: 88237
  peptide (1)..(1506): Ceres Seq. ID no. 12706580
  misc_feature (592)..(663): Pfam Name: Flavin containing amine oxidoreductase Pfam Description: Flavin containing amine oxidoreductase
  misc_feature (284)..(1206): Homolog of NCBI NO: 37536384 NR Description: putative polyamine oxidase [Oryza sativa cultivar- group)] >gi|22002131|gb|AAM88615.1| putative polyamine
  misc_feature (1238)..(1502): Homolog of NCBI NO: 37536384 NR Description: putative polyamine oxidase [Oryza sativa cultivar- group)] >gi|22002131|gb|AAM88615.1| putative polyamine
  misc_feature (284)..(1167): Homolog of NCBI NO: 22213173 NR Description: putative polyamine oxidase, 3'-partial [Oryza
  misc_feature (1271)..(1484): Homolog of NCBI NO: 15234890 NR Description: hypothetical protein; protein id: At4g16320.1
  misc_feature (1271)..(1483): Homolog of NCBI NO: 9368355 NR Description: hypothetical protein [Brassica napus]
  misc_feature (766)..(1068): Homolog of NCBI NO: 39930515 NR Description: RIKEN cDNA 1810043O07 [Mus musculus]
  misc_feature (576)..(737): Homolog of NCBI NO: 39930515 NR Description: RIKEN cDNA 1810043O07 [Mus musculus]
  misc_feature (766)..(1068): Homolog of NCBI NO: 30794500 NR Description: KIAA0601 protein; FAD-binding protein BRAF35-HDAC
  misc_feature (584)..(737): Homolog of NCBI NO: 30794500 NR Description: KIAA0601 protein; FAD-binding protein BRAF35-HDAC
  misc_feature (766)..(1068): Homolog of NCBI NO: 16741682 NR Description: Unknown (protein for IMAGE:3917412) [Homo sapiens]

SEQ ID NO: 91994 - protein, 1468 aa, Arabidopsis thaliana; identical to SEQ ID NO: 88238
  peptide (1)..(1468): Ceres Seq. ID no. 12706581
  misc_feature (554)..(625): Pfam Name: Flavin containing amine oxidoreductase Pfam Description: Flavin containing amine oxidoreductase
  misc_feature (246)..(1168): Homolog of NCBI NO: 37536384 NR Description: putative polyamine oxidase [Oryza sativa cultivar- group)] >gi|22002131|gb|AAM88615.1| putative polyamine
  misc_feature (1200)..(1464): Homolog of NCBI NO: 37536384 NR Description: putative polyamine oxidase [Oryza sativa cultivar- group)] >gi|22002131|gb|AAM88615.1| putative polyamine
  misc_feature (246)..(1129): Homolog of NCBI NO: 22213173 NR Description: putative polyamine oxidase, 3'-partial [Oryza
  misc_feature (1233)..(1446): Homolog of NCBI NO: 15234890 NR Description: hypothetical protein; protein id: At4g16320.1
  misc_feature (1233)..(1445): Homolog of NCBI NO: 9368355 NR Description: hypothetical protein [Brassica napus]
  misc_feature (728)..(1030): Homolog of NCBI NO: 39930515 NR Description: RIKEN cDNA 1810043O07 [Mus musculus]
  misc_feature (538)..(699): Homolog of NCBI NO: 39930515 NR Description: RIKEN cDNA 1810043O07 [Mus musculus]
  misc_feature (728)..(1030): Homolog of NCBI NO: 30794500 NR Description: KIAA0601 protein; FAD-binding protein BRAF35-HDAC
  misc_feature (546)..(699): Homolog of NCBI NO: 30794500 NR Description: KIAA0601 protein; FAD-binding protein BRAF35-HDAC
  misc_feature (728)..(1030): Homolog of NCBI NO: 16741682 NR Description: Unknown (protein for IMAGE:3917412) [Homo sapiens]

SEQ ID NO: 91995 - DNA, 678 bp, Arabidopsis thaliana; identical to SEQ ID NO: 88239
  misc_feature (1)..(678): Ceres Seq. ID no. 12706590
  misc_feature: MA Experiment ID: 20000180 Result: Up-regulated in Transcription
  misc_feature: MA Experiment 20000180 PARAMETER Experiment Name: At_Germinating_Seeds_P Parameter: Age (hr) Value: 24 vs. 0
  misc_feature: MA Experiment 20000180 PARAMETER Experiment Name: At_Germinating_Seeds_P Parameter: Tissue Value: Germinating Seeds
  misc_feature: MA Experiment ID: 20000185 Result: Up-regulated in Transcription
  misc_feature: MA Experiment 20000185 PARAMETER Experiment Name: At_Roots__P Parameter: Age (day) Value: 7 vs. 21
  misc_feature: MA Experiment 20000185 PARAMETER Experiment Name: At_Roots__P Parameter: Organism Value: A. thaliana
  misc_feature: MA Experiment 20000185 PARAMETER Experiment Name: At_Roots__P Parameter: Tissue Value: Roots vs. Whole Plant
  misc_feature: MA Experiment ID: 20000264 Result: Up-regulated in Transcription
  misc_feature: MA Experiment 20000264 PARAMETER Experiment Name: At_Open_Flower_P Parameter: Age (day) Value: 21
  misc_feature: MA Experiment 20000264 PARAMETER Experiment Name: At_Open_Flower_P Parameter: Plant Line Value: WS
  misc_feature: MA Experiment 20000264 PARAMETER Experiment Name: At_Open_Flower_P Parameter: Tissue Value: Open Flower vs. Whole Plant
  misc_feature: MA Experiment ID: 20000286 Result: Up-regulated in Transcription
  misc_feature: MA Experiment 20000286 PARAMETER Experiment Name: At_Open_Flower_P Parameter: Age (day) Value: 21
  misc_feature: MA Experiment 20000286 PARAMETER Experiment Name: At_Open_Flower_P Parameter: Plant Line Value: WS
  misc_feature: MA Experiment 20000286 PARAMETER Experiment Name: At_Open_Flower_P Parameter: Tissue Value: Half Open vs. Whole Plant
  misc_feature: MA Experiment ID: 20000437 Result: Down-regulated in Transcription
  misc_feature: MA Experiment 20000437 PARAMETER Experiment Name: At_Drought_P Parameter: Age (day) Value: 8
  misc_feature: MA Experiment 20000437 PARAMETER Experiment Name: At_Drought_P Parameter: Organism Value: A. thaliana
  misc_feature: MA Experiment 20000437 PARAMETER Experiment Name: At_Drought_P Parameter: Plant Line Value: WS
  misc_feature: MA Experiment 20000437 PARAMETER Experiment Name: At_Drought_P Parameter: Timepoint (hr) Value: 24
  misc_feature: MA Experiment 20000437 PARAMETER Experiment Name: At_Drought_P Parameter: Tissue Value: Whole Plant
  misc_feature: MA Experiment 20000437 PARAMETER Experiment Name: At_Drought_P Parameter: Treatment Value: Drought vs. No Drought
  misc_feature: MA Experiment ID: 20000439 Result: Up-regulated in Transcription
  misc_feature: MA Experiment 20000439 PARAMETER Experiment Name: At_Roots__P Parameter: Age (day) Value: 14 vs. 21
  misc_feature: MA Experiment 20000439 PARAMETER Experiment Name: At_Roots__P Parameter: Organism Value: A. thaliana
  misc_feature: MA Experiment 20000439 PARAMETER Experiment Name: At_Roots__P Parameter: Tissue Value: Roots vs. Whole Plant
  misc_feature: MA Experiment ID: 20000460 Result: Down-regulated in Transcription
  misc_feature: MA Experiment 20000460 PARAMETER Experiment Name: At_10percent_PEG_P Parameter: Age (day) Value: 12
  misc_feature: MA Experiment 20000460 PARAMETER Experiment Name: At_10percent_PEG_P Parameter: Organism Value: A. thaliana
  misc_feature: MA Experiment 20000460 PARAMETER Experiment Name: At_10percent_PEG_P Parameter: Plant Line Value: WS
  misc_feature: MA Experiment 20000460 PARAMETER Experiment Name: At_10percent_PEG_P Parameter: Timepoint (day) Value: 12
  misc_feature: MA Experiment 20000460 PARAMETER Experiment Name: At_10percent_PEG_P Parameter: Tissue Value: Whole Plant
  misc_feature: MA Experiment 20000460 PARAMETER Experiment Name: At_10percent_PEG_P Parameter: Treatment Value: 10percent PEG vs. No Treatment
  misc_feature: MA Experiment ID: 20000794 Result: Up-regulated in Transcription
  misc_feature: MA Experiment 20000794 PARAMETER Experiment Name: At_Petals_P Parameter: Age (day) Value: 23-25 days
  misc_feature: MA Experiment 20000794 PARAMETER Experiment Name: At_Petals_P Parameter: Plant Line Value: WS
  misc_feature: MA Experiment 20000794 PARAMETER Experiment Name: At_Petals_P Parameter: Tissue Value: Petals vs. Whole plant

SEQ ID NO: 91996 - protein, 225 aa, Arabidopsis thaliana; identical to SEQ ID NO: 81789
  peptide (1)..(225): Ceres Seq. ID no. 12706591
  misc_feature (160)..(188): Pfam Name: EF hand Pfam Description: EF hand
  misc_feature (1)..(225): Homolog of NCBI NO: 18414640 NR Description: expressed protein; protein id: At4g16350.1, by cDNA: gi_11065942, supported by cDNA: gi_13448026 [Arabidopsis
  misc_feature (1)..(225): Homolog of NCBI NO: 13448027 NR Description: SOS3-like calcium binding protein [Arabidopsis
  misc_feature (1)..(219): Homolog of NCBI NO: 16924116 NR Description: putative calcineurin B-like protein [Oryza sativa]
  misc_feature (1)..(219): Homolog of NCBI NO: 22137326 NR Description: calcineurin B [Pisum sativum]
  misc_feature (1)..(219): Homolog of NCBI NO: 15241101 NR Description: calcineurin B-like protein 2 (gb|AAC26009.1); id: At5g55990.2, supported by cDNA: 37280., supported by cDNA: supported by cDNA: gi_3309083 [Arabidopsis thaliana] protein 2
  misc_feature (1)..(219): Homolog of NCBI NO: 15236778 NR Description: calcineurin B-like protein 3; protein id: supported by cDNA: gi_18253012, supported by cDNA: gi_3309085
  misc_feature (1)..(219): Homolog of NCBI NO: 21593228 NR Description: calcineurin B-like protein 2 [Arabidopsis
  misc_feature (1)..(219): Homolog of NCBI NO: 30687272 NR Description: calcineurin B-like protein 3 (CBL3) [Arabidopsis
  misc_feature (29)..(213): Homolog of NCBI NO: 38493047 NR Description: Chain A, The Crystal Structure Of The Calcium
  misc_feature (28)..(218): Homolog of NCBI NO: 18414931 NR Description: calcineurin B-like protein 1; protein id: supported by cDNA: gi_3309081 [Arabidopsis thaliana]

SEQ ID NO: 91997 - protein, 224 aa, Arabidopsis thaliana; identical to SEQ ID NO: 81790
  peptide (1)..(224): Ceres Seq. ID no. 12706592
  misc_feature (159)..(187): Pfam Name: EF hand Pfam Description: EF hand
  misc_feature (1)..(224): Homolog of NCBI NO: 18414640 NR Description: expressed protein; protein id: At4g16350.1, by cDNA: gi_11065942, supported by cDNA: gi_13448026 [Arabidopsis
  misc_feature (1)..(224): Homolog of NCBI NO: 13448027 NR Description: SOS3-like calcium binding protein [Arabidopsis
  misc_feature (1)..(218): Homolog of NCBI NO: 16924116 NR Description: putative calcineurin B-like protein [Oryza sativa]
  misc_feature (1)..(218): Homolog of NCBI NO: 22137326 NR Description: calcineurin B [Pisum sativum]
  misc_feature (1)..(218): Homolog of NCBI NO: 15241101 NR Description: calcineurin B-like protein 2 (gb|AAC26009.1); id: At5g55990.2, supported by cDNA: 37280., supported by cDNA: supported by cDNA: gi_3309083 [Arabidopsis thaliana] protein 2
  misc_feature (1)..(218): Homolog of NCBI NO: 15236778 NR Description: calcineurin B-like protein 3; protein id: supported by cDNA: gi_18253012, supported by cDNA: gi_3309085
  misc_feature (1)..(218): Homolog of NCBI NO: 21593228 NR Description: calcineurin B-like protein 2 [Arabidopsis
  misc_feature (1)..(218): Homolog of NCBI NO: 30687272 NR Description: calcineurin B-like protein 3 (CBL3) [Arabidopsis
  misc_feature (28)..(212): Homolog of NCBI NO: 38493047 NR Description: Chain A, The Crystal Structure Of The Calcium
  misc_feature (27)..(217): Homolog of NCBI NO: 18414931 NR Description: calcineurin B-like protein 1; protein id: supported by cDNA: gi_3309081 [Arabidopsis thaliana]

SEQ ID NO: 91998 - protein, 154 aa, Arabidopsis thaliana; identical to SEQ ID NO: 88242
  peptide (1)..(154): Ceres Seq. ID no. 12706593
  misc_feature (89)..(117): Pfam Name: EF hand Pfam Description: EF hand
  misc_feature (1)..(154): Homolog of NCBI NO: 18414640 NR Description: expressed protein; protein id: At4g16350.1, by cDNA: gi_11065942, supported by cDNA: gi_13448026 [Arabidopsis
  misc_feature (1)..(154): Homolog of NCBI NO: 13448027 NR Description: SOS3-like calcium binding protein [Arabidopsis
  misc_feature (1)..(148): Homolog of NCBI NO: 16924116 NR Description: putative calcineurin B-like protein [Oryza sativa]
  misc_feature (1)..(148): Homolog of NCBI NO: 22137326 NR Description: calcineurin B [Pisum sativum]
  misc_feature (1)..(148): Homolog of NCBI NO: 15241101 NR Description: calcineurin B-like protein 2 (gb|AAC26009.1); id: At5g55990.2, supported by cDNA: 37280., supported by cDNA: supported by cDNA: gi_3309083 [Arabidopsis thaliana] protein 2
  misc_feature (1)..(148): Homolog of NCBI NO: 15236778 NR Description: calcineurin B-like protein 3; protein id: supported by cDNA: gi_18253012, supported by cDNA: gi_3309085
  misc_feature (1)..(148): Homolog of NCBI NO: 21593228 NR Description: calcineurin B-like protein 2 [Arabidopsis
  misc_feature (1)..(148): Homolog of NCBI NO: 30687272 NR Description: calcineurin B-like protein 3 (CBL3) [Arabidopsis
  misc_feature (1)..(142): Homolog of NCBI NO: 38493047 NR Description: Chain A, The Crystal Structure Of The Calcium
  misc_feature (1)..(147): Homolog of NCBI NO: 18414931 NR Description: calcineurin B-like protein 1; protein id: supported by cDNA: gi_3309081 [Arabidopsis thaliana]

SEQ ID NO: 91999 - DNA, 774 bp, Arabidopsis thaliana; identical to SEQ ID NO: 88243
  misc_feature (1)..(774): Ceres Seq. ID no. 12706630
  misc_feature: MA Experiment ID: 20000179 Result: Down-regulated in Transcription
  misc_feature: MA Experiment 20000179 PARAMETER Experiment Name: At_Germinating_Seeds_P Parameter: Age (hr) Value: 6 vs. 0
  misc_feature: MA Experiment 20000179 PARAMETER Experiment Name: At_Germinating_Seeds_P Parameter: Tissue Value: Germinating Seeds
  misc_feature: MA Experiment ID: 20000180 Result: Down-regulated in Transcription
  misc_feature: MA Experiment 20000180 PARAMETER Experiment Name: At_Germinating_Seeds_P Parameter: Age (hr) Value: 24 vs. 0
  misc_feature: MA Experiment 20000180 PARAMETER Experiment Name: At_Germinating_Seeds_P Parameter: Tissue Value: Germinating Seeds
  misc_feature: MA Experiment ID: 20000227 Result: Up-regulated in Transcription
  misc_feature: MA Experiment 20000227 PARAMETER Experiment Name: At_Root-Tips-vs-Tops_P Parameter: Tissue Value: Root Tips vs. Root Tops
  misc_feature: MA Experiment ID: 20001905 Result: Up-regulated in Transcription
  misc_feature: MA Experiment 20001905 PARAMETER Experiment Name: At_Drought_Reproduction_P Parameter: Age (day) Value: 40
  misc_feature: MA Experiment 20001905 PARAMETER Experiment Name: At_Drought_Reproduction_P Parameter: Organism Value: A. thaliana
  misc_feature: MA Experiment 20001905 PARAMETER Experiment Name: At_Drought_Reproduction_P Parameter: Plant Line Value: WS
  misc_feature: MA Experiment 20001905 PARAMETER Experiment Name: At_Drought_Reproduction_P Parameter: Timepoint (day) Value: 10
  misc_feature: MA Experiment 20001905 PARAMETER Experiment Name: At_Drought_Reproduction_P Parameter: Tissue Value: Rosettes
  misc_feature: MA Experiment 20001905 PARAMETER Experiment Name: At_Drought_Reproduction_P Parameter: Treatment Value: Drought vs. No Drought

SEQ ID NO: 92000 - protein, 257 aa, Arabidopsis thaliana; identical to SEQ ID NO: 88244
  peptide (1)..(257): Ceres Seq. ID no. 12706631
  misc_feature (21)..(220): Pfam Name: Caldesmon Pfam Description: Caldesmon
  misc_feature (1)..(221): Homolog of NCBI NO: 7485079 NR Description: hypothetical protein - Arabidopsis thaliana hypothetical protein [Arabidopsis thaliana]
  misc_feature (1)..(221): Homolog of NCBI NO: 30683690 NR Description: expressed protein [Arabidopsis thaliana]
  misc_feature (121)..(215): Homolog of NCBI NO: 37535892 NR Description: hypothetical protein [Oryza sativa (japonica group)] >gi|22324964|gb|AAM95691.1| hypothetical protein [Oryza
  misc_feature (1)..(62): Homolog of NCBI NO: 37535892 NR Description: hypothetical protein [Oryza sativa (japonica group)] >gi|22324964|gb|AAM95691.1| hypothetical protein [Oryza
  misc_feature (107)..(221): Homolog of NCBI NO: 15227515 NR Description: unknown protein; protein id: At2g03010.1
  misc_feature (26)..(78): Homolog of NCBI NO: 15227515 NR Description: unknown protein; protein id: At2g03010.1
  misc_feature (7)..(216): Homolog of NCBI NO: 24308289 NR Description: LENG1 protein [Homo sapiens]
  misc_feature (1)..(58): Homolog of NCBI NO: 23489800 NR Description: hypothetical protein [Plasmodium yoelii yoelii]
  misc_feature (1)..(57): Homolog of NCBI NO: 16805228 NR Description: hypothetical protein [Plasmodium falciparum 3D7]

SEQ ID NO: 92001 - DNA, 665 bp, Arabidopsis thaliana; identical to SEQ ID NO: 88245
  misc_feature (1)..(665): Ceres Seq. ID no. 12706632
  misc_feature: MA Experiment ID: 108434 Result: Down-regulated in Transcription
  misc_feature: MA Experiment 108434 PARAMETER Experiment Name: At_Root_Tips_cDNA_P Parameter: Tissue Value: Root Tips
  misc_feature: MA Experiment ID: 108435 Result: Down-regulated in Transcription
  misc_feature: MA Experiment 108435 PARAMETER Experiment Name: At_stm_Mutants_cDNA_P Parameter: Plant Line Value: wt Landsburg vs stm
  misc_feature: MA Experiment 108435 PARAMETER Experiment Name: At_stm_Mutants_cDNA_P Parameter: Tissue Value: Shoot Apical Meristem Region
  misc_feature: MA Experiment ID: 108464 Result: Up-regulated in Transcription
  misc_feature: MA Experiment 108464 PARAMETER Experiment Name: At_Germinating_Seeds_cDNA_P Parameter: Age (day) Value: 4 vs. 0
  misc_feature: MA Experiment 108464 PARAMETER Experiment Name: At_Germinating_Seeds_cDNA_P Parameter: Tissue Value: Germinating Seeds
  misc_feature: MA Experiment ID: 108488 Result: Down-regulated in Transcription
  misc_feature: MA Experiment ID: 108501 Result: Down-regulated in Transcription
  misc_feature: MA Experiment 108501 PARAMETER Experiment Name: At_ap2_floral_buds_cDNA_P Parameter: Plant Line Value: ap2 (Ler.)
  misc_feature: MA Experiment 108501 PARAMETER Experiment Name: At_ap2_floral_buds_cDNA_P Parameter: Tissue Value: Closed Flower
  misc_feature: MA Experiment ID: 108573 Result: Up-regulated in Transcription
  misc_feature: MA Experiment 108573 PARAMETER Experiment Name: At_Drought_cDNA_P Parameter: Timepoint (hr) Value: 6
  misc_feature: MA Experiment 108573 PARAMETER Experiment Name: At_Drought_cDNA_P Parameter: Tissue Value: Aerial
  misc_feature: MA Experiment 108573 PARAMETER Experiment Name: At_Drought_cDNA_P Parameter: Treatment Value: Drought vs. No Drought
  misc_feature: MA Experiment ID: 108574 Result: Down-regulated in Transcription
  misc_feature: MA Experiment 108574 PARAMETER Experiment Name: At_Wounding__cDNA_P Parameter: Timepoint (hr) Value: 1
  misc_feature: MA Experiment 108574 PARAMETER Experiment Name: At_Wounding__cDNA_P Parameter: Tissue Value: Aerial
  misc_feature: MA Experiment 108574 PARAMETER Experiment Name: At_Wounding__cDNA_P Parameter: Treatment Value: Wounding vs. No Wounding
  misc_feature: MA Experiment ID: 108579 Result: Down-regulated in Transcription
  misc_feature: MA Experiment 108579 PARAMETER Experiment Name: At_4deg_Cold_cDNA_P Parameter: Temperature (deg C) Value: 4 vs. 22
  misc_feature: MA Experiment 108579 PARAMETER Experiment Name: At_4deg_Cold_cDNA_P Parameter: Timepoint (hr) Value: 6
  misc_feature: MA Experiment 108579 PARAMETER Experiment Name: At_4deg_Cold_cDNA_P Parameter: Tissue Value: Aerial
  misc_feature: MA Experiment ID: 20000111 Result: Down-regulated in Transcription
  misc_feature: MA Experiment 20000111 PARAMETER Experiment Name: At_42deg_Heat_cDNA_P Parameter: Temperature (deg C) Value: 42 vs. 22
  misc_feature: MA Experiment 20000111 PARAMETER Experiment Name: At_42deg_Heat_cDNA_P Parameter: Timepoint (hr) Value: 6
  misc_feature: MA Experiment 20000111 PARAMETER Experiment Name: At_42deg_Heat_cDNA_P Parameter: Tissue Value: Aerial
  misc_feature: MA Experiment ID: 20000213 Result: Down-regulated in Transcription
  misc_feature: MA Experiment 20000213 PARAMETER Experiment Name: At_4deg_Cold_P Parameter: Timepoint (hr) Value: 2
  misc_feature: MA Experiment ID: 20000224 Result: Down-regulated in Transcription
  misc_feature: MA Experiment ID: 20000234 Result: Down-regulated in Transcription
  misc_feature: MA Experiment 20000234 PARAMETER Experiment Name: At_Siliques_P Parameter: Age (day) Value: 21
  misc_feature: MA Experiment 20000234 PARAMETER Experiment Name: At_Siliques_P Parameter: Organism Value: A. thaliana
  misc_feature: MA Experiment 20000234 PARAMETER Experiment Name: At_Siliques_P Parameter: Plant Line Value: WS
  misc_feature: MA Experiment 20000234 PARAMETER Experiment Name: At_Siliques_P Parameter: Tissue Value: Less Than 5mm Siliques vs. Whole Plant
  misc_feature: MA Experiment ID: 20000286 Result: Down-regulated in Transcription
  misc_feature: MA Experiment 20000286 PARAMETER Experiment Name: At_Open_Flower_P Parameter: Age (day) Value: 21
  misc_feature: MA Experiment 20000286 PARAMETER Experiment Name: At_Open_Flower_P Parameter: Plant Line Value: WS
  misc_feature: MA Experiment 20000286 PARAMETER Experiment Name: At_Open_Flower_P Parameter: Tissue Value: Half Open vs. Whole Plant
  misc_feature: MA Experiment ID: 20001248 Result: Up-regulated in Transcription
  misc_feature: MA Experiment 20001248 PARAMETER Experiment Name: At_Far-red-induction_P Parameter: Age (day) Value: 7
  misc_feature: MA Experiment 20001248 PARAMETER Experiment Name: At_Far-red-induction_P Parameter: Light Value: Far-red vs. White
  misc_feature: MA Experiment 20001248 PARAMETER Experiment Name: At_Far-red-induction_P Parameter: Organism Value: A. thaliana
  misc_feature: MA Experiment 20001248 PARAMETER Experiment Name: At_Far-red-induction_P Parameter: Plant Line Value: Columbia
  misc_feature: MA Experiment 20001248 PARAMETER Experiment Name: At_Far-red-induction_P Parameter: Timepoint (hr) Value: 4
  misc_feature: MA Experiment 20001248 PARAMETER Experiment Name: At_Far-red-induction_P Parameter: Tissue Value: Whole Plant
  misc_feature: MA Experiment ID: 20001450 Result: Up-regulated in Transcription
  misc_feature: MA Experiment 20001450 PARAMETER Experiment Name: At_Far-red-induction_P Parameter: Age (day) Value: 7
  misc_feature: MA Experiment 20001450 PARAMETER Experiment Name: At_Far-red-induction_P Parameter: Light Value: Far-red vs. White
  misc_feature: MA Experiment 20001450 PARAMETER Experiment Name: At_Far-red-induction_P Parameter: Organism Value: A. thaliana
  misc_feature: MA Experiment 20001450 PARAMETER Experiment Name: At_Far-red-induction_P Parameter: Plant Line Value: Columbia
  misc_feature: MA Experiment 20001450 PARAMETER Experiment Name: At_Far-red-induction_P Parameter: Timepoint (hr) Value: 8
  misc_feature: MA Experiment 20001450 PARAMETER Experiment Name: At_Far-red-induction_P Parameter: Tissue Value: Whole Plant
  misc_feature: MA Experiment ID: 20001557 Result: Down-regulated in Transcription
  misc_feature: MA Experiment 20001557 PARAMETER Experiment Name: At_Drought_Soil_Dry_P Parameter: Age (day) Value: 27
  misc_feature: MA Experiment 20001557 PARAMETER Experiment Name: At_Drought_Soil_Dry_P Parameter: Organism Value: A. thaliana
  misc_feature: MA Experiment 20001557 PARAMETER Experiment Name: At_Drought_Soil_Dry_P Parameter: Plant Line Value: WS
  misc_feature: MA Experiment 20001557 PARAMETER Experiment Name: At_Drought_Soil_Dry_P Parameter: Post Timepoint (hr) Value: 3
  misc_feature: MA Experiment 20001557 PARAMETER Experiment Name: At_Drought_Soil_Dry_P Parameter: Post-Treatment Value: Re-Water vs. No Drought
  misc_feature: MA Experiment 20001557 PARAMETER Experiment Name: At_Drought_Soil_Dry_P Parameter: Timepoint (day) Value: 13
  misc_feature: MA Experiment 20001557 PARAMETER Experiment Name: At_Drought_Soil_Dry_P Parameter: Treatment Value: Drought vs. No Drought
  misc_feature: MA Experiment ID: 20001558 Result: Down-regulated in Transcription
  misc_feature: MA Experiment 20001558 PARAMETER Experiment Name: At_Drought_Soil_Dry_P Parameter: Age (day) Value: 27
  misc_feature: MA Experiment 20001558 PARAMETER Experiment Name: At_Drought_Soil_Dry_P Parameter: Organism Value: A. thaliana
  misc_feature: MA Experiment 20001558 PARAMETER Experiment Name: At_Drought_Soil_Dry_P Parameter: Plant Line Value: WS
  misc_feature: MA Experiment 20001558 PARAMETER Experiment Name: At_Drought_Soil_Dry_P Parameter: Post Timepoint (hr) Value: 6
  misc_feature: MA Experiment 20001558 PARAMETER Experiment Name: At_Drought_Soil_Dry_P Parameter: Post-Treatment Value: Re-Water vs. No Drought
  misc_feature: MA Experiment 20001558 PARAMETER Experiment Name: At_Drought_Soil_Dry_P Parameter: Timepoint (day) Value: 13
  misc_feature: MA Experiment 20001558 PARAMETER Experiment Name: At_Drought_Soil_Dry_P Parameter: Treatment Value: Drought vs. No Drought
  misc_feature: MA Experiment ID: 20001560 Result: Down-regulated in Transcription
  misc_feature: MA Experiment 20001560 PARAMETER Experiment Name: At_Drought_Soil_Dry_P Parameter: Age (day) Value: 28
  misc_feature: MA Experiment 20001560 PARAMETER Experiment Name: At_Drought_Soil_Dry_P Parameter: Organism Value: A. thaliana
  misc_feature: MA Experiment 20001560 PARAMETER Experiment Name: At_Drought_Soil_Dry_P Parameter: Plant Line Value: WS
  misc_feature: MA Experiment 20001560 PARAMETER Experiment Name: At_Drought_Soil_Dry_P Parameter: Post Timepoint (hr) Value: None
  misc_feature: MA Experiment 20001560 PARAMETER Experiment Name: At_Drought_Soil_Dry_P Parameter: Post-Treatment Value: None
  misc_feature: MA Experiment 20001560 PARAMETER Experiment Name: At_Drought_Soil_Dry_P Parameter: Timepoint (day) Value: 14
  misc_feature: MA Experiment 20001560 PARAMETER Experiment Name: At_Drought_Soil_Dry_P Parameter: Treatment Value: Drought vs. No Drought
  misc_feature: MA Experiment ID: 20001911 Result: Up-regulated in Transcription
  misc_feature: MA Experiment 20001911 PARAMETER Experiment Name: At_Drought_Reproduction_P Parameter: Age (day) Value: 40
  misc_feature: MA Experiment 20001911 PARAMETER Experiment Name: At_Drought_Reproduction_P Parameter: Organism Value: A. thaliana
  misc_feature: MA Experiment 20001911 PARAMETER Experiment Name: At_Drought_Reproduction_P Parameter: Plant Line Value: WS
  misc_feature: MA Experiment 20001911 PARAMETER Experiment Name: At_Drought_Reproduction_P Parameter: Timepoint (day) Value: 10
  misc_feature: MA Experiment 20001911 PARAMETER Experiment Name: At_Drought_Reproduction_P Parameter: Tissue Value: Flowers
  misc_feature: MA Experiment 20001911 PARAMETER Experiment Name: At_Drought_Reproduction_P Parameter: Treatment Value: Drought vs. No Drought

SEQ ID NO: 92002 - protein, 121 aa, Arabidopsis thaliana; identical to SEQ ID NO: 88246
  peptide (1)..(121): Ceres Seq. ID no. 12706633
  misc_feature (14)..(117): Pfam Name: Microtubule associated protein 1A/1B, light chain 3 Pfam Description: Microtubule associated protein 1A/1B, light
  misc_feature (14)..(89): Homolog of NCBI NO: 7446943 NR Description: hypothetical protein - Arabidopsis thaliana
  misc_feature (1)..(121): Homolog of NCBI NO: 18414683 NR Description: symbiosis-related like protein; protein id: supported by cDNA: 17851., supported by cDNA: gi_17979226, by cDNA: gi_19912160, supported by cDNA: gi_20147098 [Arabidopsis
  misc_feature (1)..(117): Homolog of NCBI NO: 21615419 NR Description: microtubule associated protein [Cicer arietinum]
  misc_feature (1)..(120): Homolog of NCBI NO: 15724332 NR Description: At2g45170/T14P1.2 [Arabidopsis thaliana]
  misc_feature (1)..(120): Homolog of NCBI NO: 15225418 NR Description: putative microtubule-associated protein; protein At2g45170.1, supported by cDNA: gi_15724331, supported by cDNA: supported by cDNA: gi_19912158 [Arabidopsis thaliana] autophagy
  misc_feature (1)..(117): Homolog of NCBI NO: 40253647 NR Description: putative microtubial binding protein [Oryza
  misc_feature (1)..(117): Homolog of NCBI NO: 15232387 NR Description: putative protein; protein id: At3g60640.1, by cDNA: 4756., supported by cDNA: gi_17065535, supported by
  misc_feature (1)..(117): Homolog of NCBI NO: 21592920 NR Description: putative microtubule-associated protein
  misc_feature (1)..(117): Homolog of NCBI NO: 15224577 NR Description: putative microtubule-associated protein; protein At2g05630.1, supported by cDNA: 3416., supported by cDNA:
  misc_feature (1)..(117): Homolog of NCBI NO: 34595981 NR Description: microtubule-associated protein 1 light chain 3

SEQ ID NO: 92003 - protein, 62 aa, Arabidopsis thaliana; identical to SEQ ID NO: 88247
  peptide (1)..(62): Ceres Seq. ID no. 12706634
  misc_feature (7)..(62): Homolog of NCBI NO: 7446943 NR Description: hypothetical protein - Arabidopsis thaliana

SEQ ID NO: 92004 - DNA, 828 bp, Arabidopsis thaliana; identical to SEQ ID NO: 88248
  misc_feature (1)..(828): Ceres Seq. ID no. 12706635
  misc_feature: MA Experiment ID: 20000179 Result: Down-regulated in Transcription
  misc_feature: MA Experiment 20000179 PARAMETER Experiment Name: At_Germinating_Seeds_P Parameter: Age (hr) Value: 6 vs. 0
  misc_feature: MA Experiment 20000179 PARAMETER Experiment Name: At_Germinating_Seeds_P Parameter: Tissue Value: Germinating Seeds
  misc_feature: MA Experiment ID: 20000180 Result: Down-regulated in Transcription
  misc_feature: MA Experiment 20000180 PARAMETER Experiment Name: At_Germinating_Seeds_P Parameter: Age (hr) Value: 24 vs. 0
  misc_feature: MA Experiment 20000180 PARAMETER Experiment Name: At_Germinating_Seeds_P Parameter: Tissue Value: Germinating Seeds
  misc_feature: MA Experiment ID: 20000227 Result: Up-regulated in Transcription
  misc_feature: MA Experiment 20000227 PARAMETER Experiment Name: At_Root-Tips-vs-Tops_P Parameter: Tissue Value: Root Tips vs. Root Tops
  misc_feature: MA Experiment ID: 20001905 Result: Up-regulated in Transcription
  misc_feature: MA Experiment 20001905 PARAMETER Experiment Name: At_Drought_Reproduction_P Parameter: Age (day) Value: 40
  misc_feature: MA Experiment 20001905 PARAMETER Experiment Name: At_Drought_Reproduction_P Parameter: Organism Value: A. thaliana
  misc_feature: MA Experiment 20001905 PARAMETER Experiment Name: At_Drought_Reproduction_P Parameter: Plant Line Value: WS
  misc_feature: MA Experiment 20001905 PARAMETER Experiment Name: At_Drought_Reproduction_P Parameter: Timepoint (day) Value: 10
  misc_feature: MA Experiment 20001905 PARAMETER Experiment Name: At_Drought_Reproduction_P Parameter: Tissue Value: Rosettes
  misc_feature: MA Experiment 20001905 PARAMETER Experiment Name: At_Drought_Reproduction_P Parameter: Treatment Value: Drought vs. No Drought

SEQ ID NO: 92005 - protein, 275 aa, Arabidopsis thaliana; identical to SEQ ID NO: 88249
  peptide (1)..(275): Ceres Seq. ID no. 12706636
  misc_feature (41)..(244): Homolog of NCBI NO: 7485079 NR Description: hypothetical protein - Arabidopsis thaliana hypothetical protein [Arabidopsis thaliana]
  misc_feature (41)..(244): Homolog of NCBI NO: 30683690 NR Description: expressed protein [Arabidopsis thaliana]
  misc_feature (1)..(103): Homolog of NCBI NO: 7485079 NR Description: hypothetical protein - Arabidopsis thaliana hypothetical protein [Arabidopsis thaliana]
  misc_feature (1)..(103): Homolog of NCBI NO: 30683690 NR Description: expressed protein [Arabidopsis thaliana]
  misc_feature (1)..(238): Homolog of NCBI NO: 37535892 NR Description: hypothetical protein [Oryza sativa (japonica group)] >gi|22324964|gb|AAM95691.1| hypothetical protein [Oryza
  misc_feature (130)..(244): Homolog of NCBI NO: 15227515 NR Description: unknown protein; protein id: At2g03010.1
  misc_feature (26)..(78): Homolog of NCBI NO: 15227515 NR Description: unknown protein; protein id: At2g03010.1
  misc_feature (1)..(58): Homolog of NCBI NO: 23489800 NR Description: hypothetical protein [Plasmodium yoelii yoelii]

SEQ ID NO: 92006 - DNA, 1563 bp, Arabidopsis thaliana; identical to SEQ ID NO: 88250
  misc_feature (1)..(1563): Ceres Seq. ID no. 12706649
  misc_feature: MA Experiment ID: 20000182 Result: Down-regulated in Transcription
  misc_feature: MA Experiment 20000182 PARAMETER Experiment Name: At_2mM_SA_P Parameter: Age (day) Value: 14
  misc_feature: MA Experiment 20000182 PARAMETER Experiment Name: At_2mM_SA_P Parameter: Organism Value: A. thaliana
  misc_feature: MA Experiment 20000182 PARAMETER Experiment Name: At_2mM_SA_P Parameter: Plant Line Value: WS
  misc_feature: MA Experiment 20000182 PARAMETER Experiment Name: At_2mM_SA_P Parameter: Timepoint (hr) Value: 6
  misc_feature: MA Experiment 20000182 PARAMETER Experiment Name: At_2mM_SA_P Parameter: Tissue Value: Aerial
  misc_feature: MA Experiment 20000182 PARAMETER Experiment Name: At_2mM_SA_P Parameter: Treatment Value: 2mM SA vs. No Treatment
  misc_feature: MA Experiment ID: 20000185 Result: Down-regulated in Transcription
  misc_feature: MA Experiment 20000185 PARAMETER Experiment Name: At_Roots__P Parameter: Age (day) Value: 7 vs. 21
  misc_feature: MA Experiment 20000185 PARAMETER Experiment Name: At_Roots__P Parameter: Organism Value: A. thaliana
  misc_feature: MA Experiment 20000185 PARAMETER Experiment Name: At_Roots__P Parameter: Tissue Value: Roots vs. Whole Plant
  misc_feature: MA Experiment ID: 20000234 Result: Up-regulated in Transcription
  misc_feature: MA Experiment 20000234 PARAMETER Experiment Name: At_Siliques_P Parameter: Age (day) Value: 21
  misc_feature: MA Experiment 20000234 PARAMETER Experiment Name: At_Siliques_P Parameter: Organism Value: A. thaliana
  misc_feature: MA Experiment 20000234 PARAMETER Experiment Name: At_Siliques_P Parameter: Plant Line Value: WS
  misc_feature: MA Experiment 20000234 PARAMETER Experiment Name: At_Siliques_P Parameter: Tissue Value: Less Than 5mm Siliques vs. Whole Plant
  misc_feature: MA Experiment ID: 20000235 Result: Up-regulated in Transcription
  misc_feature: MA Experiment 20000235 PARAMETER Experiment Name: At_Siliques_P Parameter: Age (day) Value: 21
  misc_feature: MA Experiment 20000235 PARAMETER Experiment Name: At_Siliques_P Parameter: Organism Value: A. thaliana
  misc_feature: MA Experiment 20000235 PARAMETER Experiment Name: At_Siliques_P Parameter: Plant Line Value: WS
  misc_feature: MA Experiment 20000235 PARAMETER Experiment Name: At_Siliques_P Parameter: Tissue Value: 5-10mm Siliques vs. Whole Plant
  misc_feature: MA Experiment ID: 20000265 Result: Up-regulated in Transcription
  misc_feature: MA Experiment 20000265 PARAMETER Experiment Name: At_Open_Flower_P Parameter: Age (day) Value: 21
  misc_feature: MA Experiment 20000265 PARAMETER Experiment Name: At_Open_Flower_P Parameter: Plant Line Value: WS
  misc_feature: MA Experiment 20000265 PARAMETER Experiment Name: At_Open_Flower_P Parameter: Tissue Value: Closed Flower vs. Whole Plant
  misc_feature: MA Experiment ID: 20000286 Result: Up-regulated in Transcription
  misc_feature: MA Experiment 20000286 PARAMETER Experiment Name: At_Open_Flower_P Parameter: Age (day) Value: 21
  misc_feature: MA Experiment 20000286 PARAMETER Experiment Name: At_Open_Flower_P Parameter: Plant Line Value: WS
  misc_feature: MA Experiment 20000286 PARAMETER Experiment Name: At_Open_Flower_P Parameter: Tissue Value: Half Open vs. Whole Plant
  misc_feature: MA Experiment ID: 20000308 Result: Up-regulated in Transcription
  misc_feature: MA Experiment 20000308 PARAMETER Experiment Name: At_100mM_NaCl__P Parameter: Age (day) Value: 17
  misc_feature: MA Experiment 20000308 PARAMETER Experiment Name: At_100mM_NaCl__P Parameter: Organism Value: A. thaliana
  misc_feature: MA Experiment 20000308 PARAMETER Experiment Name: At_100mM_NaCl__P Parameter: Plant Line Value: WS
  misc_feature: MA Experiment 20000308 PARAMETER Experiment Name: At_100mM_NaCl__P Parameter: Timepoint (hr) Value: 72
  misc_feature: MA Experiment 20000308 PARAMETER Experiment Name: At_100mM_NaCl__P Parameter: Tissue Value: Whole Plant
  misc_feature: MA Experiment 20000308 PARAMETER Experiment Name: At_100mM_NaCl__P Parameter: Treatment Value: 100mM NaCl vs. No Treatment
  misc_feature: MA Experiment ID: 20000437 Result: Down-regulated in Transcription
  misc_feature: MA Experiment 20000437 PARAMETER Experiment Name: At_Drought_P Parameter: Age (day) Value: 8
  misc_feature: MA Experiment 20000437 PARAMETER Experiment Name: At_Drought_P Parameter: Organism Value: A. thaliana
  misc_feature: MA Experiment 20000437 PARAMETER Experiment Name: At_Drought_P Parameter: Plant Line Value: WS
  misc_feature: MA Experiment 20000437 PARAMETER Experiment Name: At_Drought_P Parameter: Timepoint (hr) Value: 24
  misc_feature: MA Experiment 20000437 PARAMETER Experiment Name: At_Drought_P Parameter: Tissue Value: Whole Plant
  misc_feature: MA Experiment 20000437 PARAMETER Experiment Name: At_Drought_P Parameter: Treatment Value: Drought vs. No Drought
  misc_feature: MA Experiment ID: 20000438 Result: Down-regulated in Transcription
  misc_feature: MA Experiment 20000438 PARAMETER Experiment Name: At_Shoots__P Parameter: Age (day) Value: 14
  misc_feature: MA Experiment 20000438 PARAMETER Experiment Name: At_Shoots__P Parameter: Tissue Value: Shoots vs. Whole Plant
  misc_feature: MA Experiment ID: 20000439 Result: Down-regulated in Transcription
  misc_feature: MA Experiment 20000439 PARAMETER Experiment Name: At_Roots__P Parameter: Age (day) Value: 14 vs. 21
  misc_feature: MA Experiment 20000439 PARAMETER Experiment Name: At_Roots__P Parameter: Organism Value: A. thaliana
  misc_feature: MA Experiment 20000439 PARAMETER Experiment Name: At_Roots__P Parameter: Tissue Value: Roots vs. Whole Plant
  misc_feature: MA Experiment ID: 20000441 Result: Down-regulated in Transcription
  misc_feature: MA Experiment 20000441 PARAMETER Experiment Name: At_1uM_BR-BRZ__P Parameter: Tissue Value: Shoot Apices
  misc_feature: MA Experiment 20000441 PARAMETER Experiment Name: At_1uM_BR-BRZ__P Parameter: Treatment Value: 1uM BR vs. No Treatment
  misc_feature: MA Experiment ID: 20000443 Result: Down-regulated in Transcription
  misc_feature: MA Experiment 20000443 PARAMETER Experiment Name: At_1uM_BR-BRZ__P Parameter: Tissue Value: Shoot Apices
  misc_feature: MA Experiment 20000443 PARAMETER Experiment Name: At_1uM_BR-BRZ__P Parameter: Treatment Value: 1uM BRZ vs. No Treatment
  misc_feature: MA Experiment ID: 20000453 Result: Up-regulated in Transcription
  misc_feature: MA Experiment 20000453 PARAMETER Experiment Name: At_100uM_ABA_P Parameter: Age (day) Value: 15
  misc_feature: MA Experiment 20000453 PARAMETER Experiment Name: At_100uM_ABA_P Parameter: Organism Value: A. thaliana
  misc_feature: MA Experiment 20000453 PARAMETER Experiment Name: At_100uM_ABA_P Parameter: Plant Line Value: WS
  misc_feature: MA Experiment 20000453 PARAMETER Experiment Name: At_100uM_ABA_P Parameter: Timepoint (hr) Value: 24
  misc_feature: MA Experiment 20000453 PARAMETER Experiment Name: At_100uM_ABA_P Parameter: Tissue Value: Aerial
  misc_feature: MA Experiment 20000453 PARAMETER Experiment Name: At_100uM_ABA_P Parameter: Treatment Value: 100uM ABA vs. No Treatment
  misc_feature: MA Experiment ID: 20000455 Result: Up-regulated in Transcription
  misc_feature: MA Experiment 20000455 PARAMETER Experiment Name: At_100uM_ABA_P Parameter: Age (day) Value: 16
  misc_feature: MA Experiment 20000455 PARAMETER Experiment Name: At_100uM_ABA_P Parameter: Organism Value: A. thaliana
  misc_feature: MA Experiment 20000455 PARAMETER Experiment Name: At_100uM_ABA_P Parameter: Plant Line Value: WS
  misc_feature: MA Experiment 20000455 PARAMETER Experiment Name: At_100uM_ABA_P Parameter: Timepoint (hr) Value: 48
  misc_feature: MA Experiment 20000455 PARAMETER Experiment Name: At_100uM_ABA_P Parameter: Tissue Value: Aerial
  misc_feature: MA Experiment 20000455 PARAMETER Experiment Name: At_100uM_ABA_P Parameter: Treatment Value: 100uM ABA vs. No Treatment
  misc_feature: MA Experiment ID: 20000456 Result: Down-regulated in Transcription
  misc_feature: MA Experiment 20000456 PARAMETER Experiment Name: At_100uM_BA_P Parameter: Age (day) Value: 14
  misc_feature: MA Experiment 20000456 PARAMETER Experiment Name: At_100uM_BA_P Parameter: Organism Value: A. thaliana
  misc_feature: MA Experiment 20000456 PARAMETER Experiment Name: At_100uM_BA_P Parameter: Plant Line Value: WS
  misc_feature: MA Experiment 20000456 PARAMETER Experiment Name: At_100uM_BA_P Parameter: Timepoint (hr) Value: 6
  misc_feature: MA Experiment 20000456 PARAMETER Experiment Name: At_100uM_BA_P Parameter: Tissue Value: Aerial
  misc_feature: MA Experiment 20000456 PARAMETER Experiment Name: At_100uM_BA_P Parameter: Treatment Value: 100uM BA vs. No Treatment
  misc_feature: MA Experiment ID: 20000495 Result: Down-regulated in Transcription
  misc_feature: MA Experiment 20000495 PARAMETER Experiment Name: At_Guard_Cells_P Parameter: Harvest Date Value: 8/2/2002
  misc_feature: MA Experiment 20000495 PARAMETER Experiment Name: At_Guard_Cells_P Parameter: Organism Value: A. thaliana
  misc_feature: MA Experiment 20000495 PARAMETER Experiment Name: At_Guard_Cells_P Parameter: Tissue Value: Guard Cells vs. Leaves
  misc_feature: MA Experiment ID: 20001554 Result: Up-regulated in Transcription
  misc_feature: MA Experiment 20001554 PARAMETER Experiment Name: At_Drought_Soil_Dry_P Parameter: Age (day) Value: 21
  misc_feature: MA Experiment 20001554 PARAMETER Experiment Name: At_Drought_Soil_Dry_P Parameter: Organism Value: A. thaliana
  misc_feature: MA Experiment 20001554 PARAMETER Experiment Name: At_Drought_Soil_Dry_P Parameter: Plant Line Value: WS
  misc_feature: MA Experiment 20001554 PARAMETER Experiment Name: At_Drought_Soil_Dry_P Parameter: Post Timepoint (hr) Value: None
  misc_feature: MA Experiment 20001554 PARAMETER Experiment Name: At_Drought_Soil_Dry_P Parameter: Post-Treatment Value: None
  misc_feature: MA Experiment 20001554 PARAMETER Experiment Name: At_Drought_Soil_Dry_P Parameter: Timepoint (day) Value: 7
  misc_feature: MA Experiment 20001554 PARAMETER Experiment Name: At_Drought_Soil_Dry_P Parameter: Treatment Value: Drought vs. No Drought
  misc_feature: MA Experiment ID: 20001555 Result: Up-regulated in Transcription
  misc_feature: MA Experiment 20001555 PARAMETER Experiment Name: At_Drought_Soil_Dry_P Parameter: Age (day) Value: 24
  misc_feature: MA Experiment 20001555 PARAMETER Experiment Name: At_Drought_Soil_Dry_P Parameter: Organism Value: A. thaliana
  misc_feature: MA Experiment 20001555 PARAMETER Experiment Name: At_Drought_Soil_Dry_P Parameter: Plant Line Value: WS
  misc_feature: MA Experiment 20001555 PARAMETER Experiment Name: At_Drought_Soil_Dry_P Parameter: Post Timepoint (hr) Value: None
  misc_feature: MA Experiment 20001555 PARAMETER Experiment Name: At_Drought_Soil_Dry_P Parameter: Post-Treatment Value: None
  misc_feature: MA Experiment 20001555 PARAMETER Experiment Name: At_Drought_Soil_Dry_P Parameter: Timepoint (day) Value: 10
  misc_feature: MA Experiment 20001555 PARAMETER Experiment Name: At_Drought_Soil_Dry_P Parameter: Treatment Value: Drought vs. No Drought
  misc_feature: MA Experiment ID: 20001556 Result: Up-regulated in Transcription
  misc_feature: MA Experiment 20001556 PARAMETER Experiment Name: At_Drought_Soil_Dry_P Parameter: Age (day) Value: 26
  misc_feature: MA Experiment 20001556 PARAMETER Experiment Name: At_Drought_Soil_Dry_P Parameter: Organism Value: A. thaliana
  misc_feature: MA Experiment 20001556 PARAMETER Experiment Name: At_Drought_Soil_Dry_P Parameter: Plant Line Value: WS
  misc_feature: MA Experiment 20001556 PARAMETER Experiment Name: At_Drought_Soil_Dry_P Parameter: Post Timepoint (hr) Value: None
  misc_feature: MA Experiment 20001556 PARAMETER Experiment Name: At_Drought_Soil_Dry_P Parameter: Post-Treatment Value: None
  misc_feature: MA Experiment 20001556 PARAMETER Experiment Name: At_Drought_Soil_Dry_P Parameter: Timepoint (day) Value: 12
  misc_feature: MA Experiment 20001556 PARAMETER Experiment Name: At_Drought_Soil_Dry_P Parameter: Treatment Value: Drought vs. No Drought
  misc_feature: MA Experiment ID: 20001557 Result: Up-regulated in Transcription
  misc_feature: MA Experiment 20001557 PARAMETER Experiment Name: At_Drought_Soil_Dry_P Parameter: Age (day) Value: 27
  misc_feature: MA Experiment 20001557 PARAMETER Experiment Name: At_Drought_Soil_Dry_P Parameter: Organism Value: A. thaliana
  misc_feature: MA Experiment 20001557 PARAMETER Experiment Name: At_Drought_Soil_Dry_P Parameter: Plant Line Value: WS
  misc_feature: MA Experiment 20001557 PARAMETER Experiment Name: At_Drought_Soil_Dry_P Parameter: Post Timepoint (hr) Value: 3
  misc_feature: MA Experiment 20001557 PARAMETER Experiment Name: At_Drought_Soil_Dry_P Parameter: Post-Treatment Value: Re-Water vs. No Drought
  misc_feature: MA Experiment 20001557 PARAMETER Experiment Name: At_Drought_Soil_Dry_P Parameter: Timepoint (day) Value: 13
  misc_feature: MA Experiment 20001557 PARAMETER Experiment Name: At_Drought_Soil_Dry_P Parameter: Treatment Value: Drought vs. No Drought
  misc_feature: MA Experiment ID: 20001558 Result: Up-regulated in Transcription
  misc_feature: MA Experiment 20001558 PARAMETER Experiment Name: At_Drought_Soil_Dry_P Parameter: Age (day) Value: 27
  misc_feature: MA Experiment 20001558 PARAMETER Experiment Name: At_Drought_Soil_Dry_P Parameter: Organism Value: A. thaliana
  misc_feature: MA Experiment 20001558 PARAMETER Experiment Name: At_Drought_Soil_Dry_P Parameter: Plant Line Value: WS
  misc_feature: MA Experiment 20001558 PARAMETER Experiment Name: At_Drought_Soil_Dry_P Parameter: Post Timepoint (hr) Value: 6
  misc_feature: MA Experiment 20001558 PARAMETER Experiment Name: At_Drought_Soil_Dry_P Parameter: Post-Treatment Value: Re-Water vs. No Drought
  misc_feature: MA Experiment 20001558 PARAMETER Experiment Name: At_Drought_Soil_Dry_P Parameter: Timepoint (day) Value: 13
  misc_feature: MA Experiment 20001558 PARAMETER Experiment Name: At_Drought_Soil_Dry_P Parameter: Treatment Value: Drought vs. No Drought
  misc_feature: MA Experiment ID: 20001559 Result: Up-regulated in Transcription
  misc_feature: MA Experiment 20001559 PARAMETER Experiment Name: At_Drought_Soil_Dry_P Parameter: Age (day) Value: 28
  misc_feature: MA Experiment 20001559 PARAMETER Experiment Name: At_Drought_Soil_Dry_P Parameter: Organism Value: A. thaliana
  misc_feature: MA Experiment 20001559 PARAMETER Experiment Name: At_Drought_Soil_Dry_P Parameter: Plant Line Value: WS
  misc_feature: MA Experiment 20001559 PARAMETER Experiment Name: At_Drought_Soil_Dry_P Parameter: Post Timepoint (hr) Value: 29
  misc_feature: MA Experiment 20001559 PARAMETER Experiment Name: At_Drought_Soil_Dry_P Parameter: Post-Treatment Value: Re-Water vs. No Drought
  misc_feature: MA Experiment 20001559 PARAMETER Experiment Name: At_Drought_Soil_Dry_P Parameter: Timepoint (day) Value: 14
  misc_feature: MA Experiment 20001559 PARAMETER Experiment Name: At_Drought_Soil_Dry_P Parameter: Treatment Value: Drought vs. No Drought
  misc_feature: MA Experiment ID: 20001560 Result: Up-regulated in Transcription
  misc_feature: MA Experiment 20001560 PARAMETER Experiment Name: At_Drought_Soil_Dry_P Parameter: Age (day) Value: 28
  misc_feature: MA Experiment 20001560 PARAMETER Experiment Name: At_Drought_Soil_Dry_P Parameter: Organism Value: A. thaliana
  misc_feature: MA Experiment 20001560 PARAMETER Experiment Name: At_Drought_Soil_Dry_P Parameter: Plant Line Value: WS
  misc_feature: MA Experiment 20001560 PARAMETER Experiment Name: At_Drought_Soil_Dry_P Parameter: Post Timepoint (hr) Value: None
  misc_feature: MA Experiment 20001560 PARAMETER Experiment Name: At_Drought_Soil_Dry_P Parameter: Post-Treatment Value: None
  misc_feature: MA Experiment 20001560 PARAMETER Experiment Name: At_Drought_Soil_Dry_P Parameter: Timepoint (day) Value: 14
  misc_feature: MA Experiment 20001560 PARAMETER Experiment Name: At_Drought_Soil_Dry_P Parameter: Treatment Value: Drought vs. No Drought
  misc_feature: MA Experiment ID: 20001768 Result: Up-regulated in Transcription
  misc_feature: MA Experiment 20001768 PARAMETER Experiment Name: At_Far-red-enriched-adult_P Parameter: Age (day) Value: 28
  misc_feature: MA Experiment 20001768 PARAMETER Experiment Name: At_Far-red-enriched-adult_P Parameter: Light Value: Far-red enriched vs. White
  misc_feature: MA Experiment 20001768 PARAMETER Experiment Name: At_Far-red-enriched-adult_P Parameter: Organism Value: A. thaliana
  misc_feature: MA Experiment 20001768 PARAMETER Experiment Name: At_Far-red-enriched-adult_P Parameter: Plant Line Value: Columbia
  misc_feature: MA Experiment 20001768 PARAMETER Experiment Name: At_Far-red-enriched-adult_P Parameter: Timepoint (hr) Value: 1
  misc_feature: MA Experiment 20001768 PARAMETER Experiment Name: At_Far-red-enriched-adult_P Parameter: Tissue Value: Aerial
  misc_feature: MA Experiment ID: 20001773 Result: Up-regulated in Transcription
  misc_feature: MA Experiment 20001773 PARAMETER Experiment Name: At_Far-red-enriched-adult_P Parameter: Age (day) Value: 30
  misc_feature: MA Experiment 20001773 PARAMETER Experiment Name: At_Far-red-enriched-adult_P Parameter: Light Value: Far-red enriched vs. White
  misc_feature: MA Experiment 20001773 PARAMETER Experiment Name: At_Far-red-enriched-adult_P Parameter: Organism Value: A. thaliana
  misc_feature: MA Experiment 20001773 PARAMETER Experiment Name: At_Far-red-enriched-adult_P Parameter: Plant Line Value: Columbia
  misc_feature: MA Experiment 20001773 PARAMETER Experiment Name: At_Far-red-enriched-adult_P Parameter: Timepoint (hr) Value: 48
  misc_feature: MA Experiment 20001773 PARAMETER Experiment Name: At_Far-red-enriched-adult_P Parameter: Tissue Value: Aerial
  misc_feature: MA Experiment ID: 20001906 Result: Down-regulated in Transcription
  misc_feature: MA Experiment 20001906 PARAMETER Experiment Name: At_Drought_Reproduction_P Parameter: Age (day) Value: 35
  misc_feature: MA Experiment 20001906 PARAMETER Experiment Name: At_Drought_Reproduction_P Parameter: Organism Value: A. thaliana
  misc_feature: MA Experiment 20001906 PARAMETER Experiment Name: At_Drought_Reproduction_P Parameter: Plant Line Value: WS
  misc_feature: MA Experiment 20001906 PARAMETER Experiment Name: At_Drought_Reproduction_P Parameter: Timepoint (day) Value: 5
  misc_feature: MA Experiment 20001906 PARAMETER Experiment Name: At_Drought_Reproduction_P Parameter: Tissue Value: Siliques
  misc_feature: MA Experiment 20001906 PARAMETER Experiment Name: At_Drought_Reproduction_P Parameter: Treatment Value: Drought vs. No Drought
  misc_feature: MA Experiment ID: 20001908 Result: Down-regulated in Transcription
  misc_feature: MA Experiment 20001908 PARAMETER Experiment Name: At_Drought_Reproduction_P Parameter: Age (day) Value: 40
  misc_feature: MA Experiment 20001908 PARAMETER Experiment Name: At_Drought_Reproduction_P Parameter: Organism Value: A. thaliana
  misc_feature: MA Experiment 20001908 PARAMETER Experiment Name: At_Drought_Reproduction_P Parameter: Plant Line Value: WS
  misc_feature: MA Experiment 20001908 PARAMETER Experiment Name: At_Drought_Reproduction_P Parameter: Timepoint (day) Value: 10
  misc_feature: MA Experiment 20001908 PARAMETER Experiment Name: At_Drought_Reproduction_P Parameter: Tissue Value: Siliques
  misc_feature: MA Experiment 20001908 PARAMETER Experiment Name: At_Drought_Reproduction_P Parameter: Treatment Value: Drought vs. No Drought
  misc_feature: MA Experiment ID: 20001911 Result: Down-regulated in Transcription
  misc_feature: MA Experiment 20001911 PARAMETER Experiment Name: At_Drought_Reproduction_P Parameter: Age (day) Value: 40
  misc_feature: MA Experiment 20001911 PARAMETER Experiment Name: At_Drought_Reproduction_P Parameter: Organism Value: A. thaliana
  misc_feature: MA Experiment 20001911 PARAMETER Experiment Name: At_Drought_Reproduction_P Parameter: Plant Line Value: WS
  misc_feature: MA Experiment 20001911 PARAMETER Experiment Name: At_Drought_Reproduction_P Parameter: Timepoint (day) Value: 10
  misc_feature: MA Experiment 20001911 PARAMETER Experiment Name: At_Drought_Reproduction_P Parameter: Tissue Value: Flowers
  misc_feature: MA Experiment 20001911 PARAMETER Experiment Name: At_Drought_Reproduction_P Parameter: Treatment Value: Drought vs. No Drought

SEQ ID NO: 92007 - protein, 520 aa, Arabidopsis thaliana; identical to SEQ ID NO: 88251
  peptide (1)..(520): Ceres Seq. ID no. 12706650
  misc_feature (137)..(272): Pfam Name: Glycosyl transferase Pfam Description: Glycosyl transferase
  misc_feature (138)..(520): Homolog of NCBI NO: 28393622 NR Description: putative cellulose synthase [Arabidopsis thaliana]
  misc_feature (1)..(137): Homolog of NCBI NO: 28393622 NR Description: putative cellulose synthase [Arabidopsis thaliana]
  misc_feature (137)..(520): Homolog of NCBI NO: 15221657 NR Description: glucosyltransferase, putative; protein id:
  misc_feature (1)..(137): Homolog of NCBI NO: 15221657 NR Description: glucosyltransferase, putative; protein id:
  misc_feature (170)..(520): Homolog of NCBI NO: 15235809 NR Description: cellulose synthase like protein; protein id:
  misc_feature (137)..(520): Homolog of NCBI NO: 30688411 NR Description: glycosyltransferase family 2 [Arabidopsis >gi|8778578|gb|AAF79586.1|AC007945_6 F28C11.11 [Arabidopsis >gi|20466606|gb|AAM20620.1| unknown protein [Arabidopsis
  misc_feature (1)..(137): Homolog of NCBI NO: 30688411 NR Description: glycosyltransferase family 2 [Arabidopsis >gi|8778578|gb|AAF79586.1|AC007945_6 F28C11.11 [Arabidopsis >gi|20466606|gb|AAM20620.1| unknown protein [Arabidopsis
  misc_feature (137)..(520): Homolog of NCBI NO: 30688416 NR Description: glycosyltransferase family 2 [Arabidopsis
  misc_feature (78)..(137): Homolog of NCBI NO: 30688416 NR Description: glycosyltransferase family 2 [Arabidopsis
  misc_feature (137)..(519): Homolog of NCBI NO: 18403914 NR Description: putative glucosyltransferase; protein id: supported by cDNA: 113140., supported by cDNA: gi_16604558 thaliana] >gi|16604559|gb|AAL24081.1| putative

SEQ ID NO: 92008 - protein, 447 aa, Arabidopsis thaliana; identical to SEQ ID NO: 88252
  peptide (1)..(447): Ceres Seq. ID no. 12706651
  misc_feature (64)..(199): Pfam Name: Glycosyl transferase Pfam Description: Glycosyl transferase
  misc_feature (65)..(447): Homolog of NCBI NO: 28393622 NR Description: putative cellulose synthase [Arabidopsis thaliana]
  misc_feature (1)..(64): Homolog of NCBI NO: 28393622 NR Description: putative cellulose synthase [Arabidopsis thaliana]
  misc_feature (64)..(447): Homolog of NCBI NO: 15221657 NR Description: glucosyltransferase, putative; protein id:
  misc_feature (1)..(64): Homolog of NCBI NO: 15221657 NR Description: glucosyltransferase, putative; protein id:
  misc_feature (97)..(447): Homolog of NCBI NO: 15235809 NR Description: cellulose synthase like protein; protein id:
  misc_feature (64)..(447): Homolog of NCBI NO: 30688411 NR Description: glycosyltransferase family 2 [Arabidopsis >gi|8778578|gb|AAF79586.1|AC007945_6 F28C11.11 [Arabidopsis >gi|20466606|gb|AAM20620.1| unknown protein [Arabidopsis
  misc_feature (1)..(64): Homolog of NCBI NO: 30688411 NR Description: glycosyltransferase family 2 [Arabidopsis >gi|8778578|gb|AAF79586.1|AC007945_6 F28C11.11 [Arabidopsis >gi|20466606|gb|AAM20620.1| unknown protein [Arabidopsis
  misc_feature (64)..(447): Homolog of NCBI NO: 30688416 NR Description: glycosyltransferase family 2 [Arabidopsis
  misc_feature (5)..(64): Homolog of NCBI NO: 30688416 NR Description: glycosyltransferase family 2 [Arabidopsis
  misc_feature (64)..(446): Homolog of NCBI NO: 18403914 NR Description: putative glucosyltransferase; protein id: supported by cDNA: 113140., supported by cDNA: gi_16604558 thaliana] >gi|16604559|gb|AAL24081.1| putative

SEQ ID NO: 92009 - protein, 432 aa, Arabidopsis thaliana; identical to SEQ ID NO: 88253
  peptide (1)..(432): Ceres Seq. ID no. 12706652
  misc_feature (49)..(184): Pfam Name: Glycosyl transferase Pfam Description: Glycosyl transferase
  misc_feature (50)..(432): Homolog of NCBI NO: 28393622 NR Description: putative cellulose synthase [Arabidopsis thaliana]
  misc_feature (1)..(49): Homolog of NCBI NO: 28393622 NR Description: putative cellulose synthase [Arabidopsis thaliana]
  misc_feature (49)..(432): Homolog of NCBI NO: 15221657 NR Description: glucosyltransferase, putative; protein id:
  misc_feature (1)..(49): Homolog of NCBI NO: 15221657 NR Description: glucosyltransferase, putative; protein id:
  misc_feature (82)..(432): Homolog of NCBI NO: 15235809 NR Description: cellulose synthase like protein; protein id:
  misc_feature (49)..(432): Homolog of NCBI NO: 30688411 NR Description: glycosyltransferase family 2 [Arabidopsis >gi|8778578|gb|AAF79586.1|AC007945_6 F28C11.11 [Arabidopsis >gi|20466606|gb|AAM20620.1| unknown protein [Arabidopsis
  misc_feature (1)..(49): Homolog of NCBI NO: 30688411 NR Description: glycosyltransferase family 2 [Arabidopsis >gi|8778578|gb|AAF79586.1|AC007945_6 F28C11.11 [Arabidopsis >gi|20466606|gb|AAM20620.1| unknown protein [Arabidopsis
  misc_feature (49)..(432): Homolog of NCBI NO: 30688416 NR Description: glycosyltransferase family 2 [Arabidopsis
  misc_feature (1)..(49): Homolog of NCBI NO: 30688416 NR Description: glycosyltransferase family 2 [Arabidopsis
  misc_feature (49)..(431): Homolog of NCBI NO: 18403914 NR Description: putative glucosyltransferase; protein id: supported by cDNA: 113140., supported by cDNA: gi_16604558 thaliana] >gi|16604559|gb|AAL24081.1| putative

SEQ ID NO: 92010 - DNA, 1719 bp, Arabidopsis thaliana; identical to SEQ ID NO: 88254
  misc_feature (1)..(1719): Ceres Seq. ID no. 12706702
  misc_feature: MA Experiment ID: 20000315 Result: Down-regulated in Transcription
  misc_feature: MA Experiment 20000315 PARAMETER Experiment Name: At_14day_Shoots-Roots_Sub_P Parameter: Age (day) Value: 14
  misc_feature: MA Experiment 20000315 PARAMETER Experiment Name: At_14day_Shoots-Roots_Sub_P Parameter: Organism Value: A. thaliana
  misc_feature: MA Experiment 20000315 PARAMETER Experiment Name: At_14day_Shoots-Roots_Sub_P Parameter: Plant Line Value: WS
  misc_feature: MA Experiment 20000315 PARAMETER Experiment Name: At_14day_Shoots-Roots_Sub_P Parameter: Tissue Value: Shoots vs. Whole Plant

SEQ ID NO: 92011 - protein, 572 aa, Arabidopsis thaliana; identical to SEQ ID NO: 88255
  peptide (1)..(572): Ceres Seq. ID no. 12706703
  misc_feature (425)..(459): Pfam Name: PPR repeat Pfam Description: PPR repeat
  misc_feature (10)..(572): Homolog of NCBI NO: 15226463 NR Description: unknown protein; protein id: At2g21090.1
  misc_feature (8)..(572): Homolog of NCBI NO: 15225445 NR Description: hypothetical protein; protein id: At2g13600.1
  misc_feature (86)..(561): Homolog of NCBI NO: 15227144 NR Description: hypothetical protein; protein id: At2g22070.1
  misc_feature (50)..(571): Homolog of NCBI NO: 21740490 NR Description: OSJNBa0006B20.5 [Oryza sativa (japonica
  misc_feature (52)..(561): Homolog of NCBI NO: 15227619 NR Description: hypothetical protein; protein id: At2g29760.1
  misc_feature (219)..(544): Homolog of NCBI NO: 34912348 NR Description: P0518F01.9 [Oryza sativa (japonica
  misc_feature (50)..(248): Homolog of NCBI NO: 34912348 NR Description: P0518F01.9 [Oryza sativa (japonica
  misc_feature (77)..(561): Homolog of NCBI NO: 15235498 NR Description: hypothetical protein; protein id: At4g02750.1
  misc_feature (107)..(555): Homolog of NCBI NO: 34896896 NR Description: hypothetical protein [Oryza sativa (japonica group)] >gi|24899461|gb|AAN65031.1| hypothetical protein [Oryza
  misc_feature (221)..(568): Homolog of NCBI NO: 15233590 NR Description: putative protein; protein id: At4g21300.1

SEQ ID NO: 92012 - protein, 482 aa, Arabidopsis thaliana; identical to SEQ ID NO: 88256
  peptide (1)..(482): Ceres Seq. ID no. 12706704
  misc_feature (335)..(369): Pfam Name: PPR repeat Pfam Description: PPR repeat
  misc_feature (1)..(482): Homolog of NCBI NO: 15226463 NR Description: unknown protein; protein id: At2g21090.1
  misc_feature (1)..(482): Homolog of NCBI NO: 15225445 NR Description: hypothetical protein; protein id: At2g13600.1
  misc_feature (1)..(471): Homolog of NCBI NO: 15227144 NR Description: hypothetical protein; protein id: At2g22070.1
  misc_feature (1)..(481): Homolog of NCBI NO: 21740490 NR Description: OSJNBa0006B20.5 [Oryza sativa (japonica
  misc_feature (1)..(471): Homolog of NCBI NO: 15227619 NR Description: hypothetical protein; protein id: At2g29760.1
  misc_feature (129)..(454): Homolog of NCBI NO: 34912348 NR Description: P0518F01.9 [Oryza sativa (japonica
  misc_feature (1)..(158): Homolog of NCBI NO: 34912348 NR Description: P0518F01.9 [Oryza sativa (japonica
  misc_feature (1)..(471): Homolog of NCBI NO: 15235498 NR Description: hypothetical protein; protein id: At4g02750.1
  misc_feature (17)..(465): Homolog of NCBI NO: 34896896 NR Description: hypothetical protein [Oryza sativa (japonica group)] >gi|24899461|gb|AAN65031.1| hypothetical protein [Oryza
  misc_feature (131)..(478): Homolog of NCBI NO: 15233590 NR Description: putative protein; protein id: At4g21300.1

SEQ ID NO: 92013 - protein, 480 aa, Arabidopsis thaliana; identical to SEQ ID NO: 88257
  peptide (1)..(480): Ceres Seq. ID no. 12706705
  misc_feature (333)..(367): Pfam Name: PPR repeat Pfam Description: PPR repeat
  misc_feature (1)..(480): Homolog of NCBI NO: 15226463 NR Description: unknown protein; protein id: At2g21090.1
  misc_feature (1)..(480): Homolog of NCBI NO: 15225445 NR Description: hypothetical protein; protein id: At2g13600.1
  misc_feature (1)..(469): Homolog of NCBI NO: 15227144 NR Description: hypothetical protein; protein id: At2g22070.1
  misc_feature (1)..(479): Homolog of NCBI NO: 21740490 NR Description: OSJNBa0006B20.5 [Oryza sativa (japonica
  misc_feature (1)..(469): Homolog of NCBI NO: 15227619 NR Description: hypothetical protein; protein id: At2g29760.1
  misc_feature (127)..(452): Homolog of NCBI NO: 34912348 NR Description: P0518F01.9 [Oryza sativa (japonica
  misc_feature (1)..(156): Homolog of NCBI NO: 34912348 NR Description: P0518F01.9 [Oryza sativa (japonica
  misc_feature (1)..(469): Homolog of NCBI NO: 15235498 NR Description: hypothetical protein; protein id: At4g02750.1
  misc_feature (15)..(463): Homolog of NCBI NO: 34896896 NR Description: hypothetical protein [Oryza sativa (japonica group)] >gi|24899461|gb|AAN65031.1| hypothetical protein [Oryza
  misc_feature (129)..(476): Homolog of NCBI NO: 15233590 NR Description: putative protein; protein id: At4g21300.1

SEQ ID NO: 92014 - DNA, 642 bp, Arabidopsis thaliana; identical to SEQ ID NO: 88258
  misc_feature (1)..(642): Ceres Seq. ID no. 12706909
  misc_feature: MA Experiment ID: 108461 Result: Up-regulated in Transcription
  misc_feature: MA Experiment 108461 PARAMETER Experiment Name: At_Germinating_Seeds_cDNA_P Parameter: Age (day) Value: 1 vs. 0
  misc_feature: MA Experiment 108461 PARAMETER Experiment Name: At_Germinating_Seeds_cDNA_P Parameter: Tissue Value: Germinating Seeds
  misc_feature: MA Experiment ID: 108462 Result: Up-regulated in Transcription
  misc_feature: MA Experiment 108462 PARAMETER Experiment Name: At_Germinating_Seeds_cDNA_P Parameter: Age (day) Value: 2 vs. 0
  misc_feature: MA Experiment 108462 PARAMETER Experiment Name: At_Germinating_Seeds_cDNA_P Parameter: Tissue Value: Germinating Seeds
  misc_feature: MA Experiment ID: 108463 Result: Up-regulated in Transcription
  misc_feature: MA Experiment 108463 PARAMETER Experiment Name: At_Germinating_Seeds_cDNA_P Parameter: Age (day) Value: 3 vs. 0
  misc_feature: MA Experiment 108463 PARAMETER Experiment Name: At_Germinating_Seeds_cDNA_P Parameter: Tissue Value: Germinating Seeds
  misc_feature: MA Experiment ID: 20000069 Result: Down-regulated in Transcription
  misc_feature: MA Experiment 20000069 PARAMETER Experiment Name: At_100uM_ABA_Mutants_cDNA_P Parameter: Plant Line Value: CS23
  misc_feature: MA Experiment 20000069 PARAMETER Experiment Name: At_100uM_ABA_Mutants_cDNA_P Parameter: Timepoint (hr) Value: 6
  misc_feature: MA Experiment 20000069 PARAMETER Experiment Name: At_100uM_ABA_Mutants_cDNA_P Parameter: Tissue Value: Aerial
  misc_feature: MA Experiment 20000069 PARAMETER Experiment Name: At_100uM_ABA_Mutants_cDNA_P Parameter: Treatment Value: 100uM ABA vs. No Treatment
  misc_feature: MA Experiment ID: 20000071 Result: Down-regulated in Transcription
  misc_feature: MA Experiment 20000071 PARAMETER Experiment Name: At_100uM_ABA_Mutants_cDNA_P Parameter: Plant Line Value: CS8104
  misc_feature: MA Experiment 20000071 PARAMETER Experiment Name: At_100uM_ABA_Mutants_cDNA_P Parameter: Timepoint (hr) Value: 6
  misc_feature: MA Experiment 20000071 PARAMETER Experiment Name: At_100uM_ABA_Mutants_cDNA_P Parameter: Tissue Value: Aerial
  misc_feature: MA Experiment 20000071 PARAMETER Experiment Name: At_100uM_ABA_Mutants_cDNA_P Parameter: Treatment Value: 100uM ABA vs. No Treatment
  misc_feature: MA Experiment ID: 20000111 Result: Down-regulated in Transcription
  misc_feature: MA Experiment 20000111 PARAMETER Experiment Name: At_42deg_Heat_cDNA_P Parameter: Temperature (deg C) Value: 42 vs. 22
  misc_feature: MA Experiment 20000111 PARAMETER Experiment Name: At_42deg_Heat_cDNA_P Parameter: Timepoint (hr) Value: 6
  misc_feature: MA Experiment 20000111 PARAMETER Experiment Name: At_42deg_Heat_cDNA_P Parameter: Tissue Value: Aerial
  misc_feature: MA Experiment ID: 20000113 Result: Down-regulated in Transcription
  misc_feature: MA Experiment 20000113 PARAMETER Experiment Name: At_42deg_Heat_cDNA_P Parameter: Temperature (deg C) Value: 42 vs. 22
  misc_feature: MA Experiment 20000113 PARAMETER Experiment Name: At_42deg_Heat_cDNA_P Parameter: Timepoint (hr) Value: 8
  misc_feature: MA Experiment 20000113 PARAMETER Experiment Name: At_42deg_Heat_cDNA_P Parameter: Tissue Value: Aerial
  misc_feature: MA Experiment ID: 20000117 Result: Down-regulated in Transcription
  misc_feature: MA Experiment 20000117 PARAMETER Experiment Name: At_100uM_ABA_Mutants_cDNA_P Parameter: Plant Line Value: Columbia
  misc_feature: MA Experiment 20000117 PARAMETER Experiment Name: At_100uM_ABA_Mutants_cDNA_P Parameter: Timepoint (hr) Value: 6
  misc_feature: MA Experiment 20000117 PARAMETER Experiment Name: At_100uM_ABA_Mutants_cDNA_P Parameter: Tissue Value: Aerial
  misc_feature: MA Experiment 20000117 PARAMETER Experiment Name: At_100uM_ABA_Mutants_cDNA_P Parameter: Treatment Value: 100uM ABA vs. No Treatment
  misc_feature: MA Experiment ID: 20000495 Result: Up-regulated in Transcription
  misc_feature: MA Experiment 20000495 PARAMETER Experiment Name: At_Guard_Cells_P Parameter: Harvest Date Value: 8/2/2002
  misc_feature: MA Experiment 20000495 PARAMETER Experiment Name: At_Guard_Cells_P Parameter: Organism Value: A. thaliana
  misc_feature: MA Experiment 20000495 PARAMETER Experiment Name: At_Guard_Cells_P Parameter: Tissue Value: Guard Cells vs. Leaves
  misc_feature: MA Experiment ID: 20000794 Result: Down-regulated in Transcription
  misc_feature: MA Experiment 20000794 PARAMETER Experiment Name: At_Petals_P Parameter: Age (day) Value: 23-25 days
  misc_feature: MA Experiment 20000794 PARAMETER Experiment Name: At_Petals_P Parameter: Plant Line Value: WS
  misc_feature: MA Experiment 20000794 PARAMETER Experiment Name: At_Petals_P Parameter: Tissue Value: Petals vs. Whole plant
  misc_feature: MA Experiment ID: 20001556 Result: Down-regulated in Transcription
  misc_feature: MA Experiment 20001556 PARAMETER Experiment Name: At_Drought_Soil_Dry_P Parameter: Age (day) Value: 26
  misc_feature: MA Experiment 20001556 PARAMETER Experiment Name: At_Drought_Soil_Dry_P Parameter: Organism Value: A. thaliana
  misc_feature: MA Experiment 20001556 PARAMETER Experiment Name: At_Drought_Soil_Dry_P Parameter: Plant Line Value: WS
  misc_feature: MA Experiment 20001556 PARAMETER Experiment Name: At_Drought_Soil_Dry_P Parameter: Post Timepoint (hr) Value: None
  misc_feature: MA Experiment 20001556 PARAMETER Experiment Name: At_Drought_Soil_Dry_P Parameter: Post-Treatment Value: None
  misc_feature: MA Experiment 20001556 PARAMETER Experiment Name: At_Drought_Soil_Dry_P Parameter: Timepoint (day) Value: 12
  misc_feature: MA Experiment 20001556 PARAMETER Experiment Name: At_Drought_Soil_Dry_P Parameter: Treatment Value: Drought vs. No Drought
  misc_feature: MA Experiment ID: 20001559 Result: Down-regulated in Transcription
  misc_feature: MA Experiment 20001559 PARAMETER Experiment Name: At_Drought_Soil_Dry_P Parameter: Age (day) Value: 28
  misc_feature: MA Experiment 20001559 PARAMETER Experiment Name: At_Drought_Soil_Dry_P Parameter: Organism Value: A. thaliana
  misc_feature: MA Experiment 20001559 PARAMETER Experiment Name: At_Drought_Soil_Dry_P Parameter: Plant Line Value: WS
  misc_feature: MA Experiment 20001559 PARAMETER Experiment Name: At_Drought_Soil_Dry_P Parameter: Post Timepoint (hr) Value: 29
  misc_feature: MA Experiment 20001559 PARAMETER Experiment Name: At_Drought_Soil_Dry_P Parameter: Post-Treatment Value: Re-Water vs. No Drought
  misc_feature: MA Experiment 20001559 PARAMETER Experiment Name: At_Drought_Soil_Dry_P Parameter: Timepoint (day) Value: 14
  misc_feature: MA Experiment 20001559 PARAMETER Experiment Name: At_Drought_Soil_Dry_P Parameter: Treatment Value: Drought vs. No Drought
  misc_feature: MA Experiment ID: 20001560 Result: Up-regulated in Transcription
  misc_feature: MA Experiment 20001560 PARAMETER Experiment Name: At_Drought_Soil_Dry_P Parameter: Age (day) Value: 28
  misc_feature: MA Experiment 20001560 PARAMETER Experiment Name: At_Drought_Soil_Dry_P Parameter: Organism Value: A. thaliana
  misc_feature: MA Experiment 20001560 PARAMETER Experiment Name: At_Drought_Soil_Dry_P Parameter: Plant Line Value: WS
  misc_feature: MA Experiment 20001560 PARAMETER Experiment Name: At_Drought_Soil_Dry_P Parameter: Post Timepoint (hr) Value: None
  misc_feature: MA Experiment 20001560 PARAMETER Experiment Name: At_Drought_Soil_Dry_P Parameter: Post-Treatment Value: None
  misc_feature: MA Experiment 20001560 PARAMETER Experiment Name: At_Drought_Soil_Dry_P Parameter: Timepoint (day) Value: 14
  misc_feature: MA Experiment 20001560 PARAMETER Experiment Name: At_Drought_Soil_Dry_P Parameter: Treatment Value: Drought vs. No Drought
  misc_feature: MA Experiment ID: 20001906 Result: Down-regulated in Transcription
  misc_feature: MA Experiment 20001906 PARAMETER Experiment Name: At_Drought_Reproduction_P Parameter: Age (day) Value: 35
  misc_feature: MA Experiment 20001906 PARAMETER Experiment Name: At_Drought_Reproduction_P Parameter: Organism Value: A. thaliana
  misc_feature: MA Experiment 20001906 PARAMETER Experiment Name: At_Drought_Reproduction_P Parameter: Plant Line Value: WS
  misc_feature: MA Experiment 20001906 PARAMETER Experiment Name: At_Drought_Reproduction_P Parameter: Timepoint (day) Value: 5
  misc_feature: MA Experiment 20001906 PARAMETER Experiment Name: At_Drought_Reproduction_P Parameter: Tissue Value: Siliques
  misc_feature: MA Experiment 20001906 PARAMETER Experiment Name: At_Drought_Reproduction_P Parameter: Treatment Value: Drought vs. No Drought
  misc_feature: MA Experiment ID: 20001911 Result: Down-regulated in Transcription
  misc_feature: MA Experiment 20001911 PARAMETER Experiment Name: At_Drought_Reproduction_P Parameter: Age (day) Value: 40
  misc_feature: MA Experiment 20001911 PARAMETER Experiment Name: At_Drought_Reproduction_P Parameter: Organism Value: A. thaliana
  misc_feature: MA Experiment 20001911 PARAMETER Experiment Name: At_Drought_Reproduction_P Parameter: Plant Line Value: WS
  misc_feature: MA Experiment 20001911 PARAMETER Experiment Name: At_Drought_Reproduction_P Parameter: Timepoint (day) Value: 10
  misc_feature: MA Experiment 20001911 PARAMETER Experiment Name: At_Drought_Reproduction_P Parameter: Tissue Value: Flowers
  misc_feature: MA Experiment 20001911 PARAMETER Experiment Name: At_Drought_Reproduction_P Parameter: Treatment Value: Drought vs. No Drought

SEQ ID NO: 92015 - protein, 172 aa, Arabidopsis thaliana; identical to SEQ ID NO: 35649
  peptide (1)..(172): Ceres Seq. ID no. 12706910
  misc_feature (30)..(108): Pfam Name: Protease inhibitor/seed storage/LTP family Pfam Description: Protease inhibitor/seed storage/LTP family
  misc_feature (4)..(172): Homolog of NCBI NO: 15225509 NR Description: putative nonspecific lipid-transfer protein protein id: At2g13820.1, supported by cDNA: 24286. [Arabidopsis >gi|25411519|pir||B84511 hypothetical protein At2g13820
  misc_feature (4)..(172): Homolog of NCBI NO: 27765012 NR Description: At2g13820 [Arabidopsis thaliana]
  misc_feature (3)..(172): Homolog of NCBI NO: 18424785 NR Description: putative protein; protein id: At5g64080.1, by cDNA: 98459., supported by cDNA: gi_17979493, supported by gi_20147300 [Arabidopsis thaliana] >gi|17979494|gb|AAL50083.1|
  misc_feature (3)..(172): Homolog of NCBI NO: 21618136 NR Description: nonspecific lipid-transfer protein-like protein
  misc_feature (3)..(166): Homolog of NCBI NO: 10176956 NR Description: contains similarity to nonspecific lipid-transfer
  misc_feature (4)..(167): Homolog of NCBI NO: 30682659 NR Description: lipid transfer protein family [Arabidopsis >gi|9955524|emb|CAC05463.1| putative lipid transfer protein thaliana] >gi|26451986|dbj|BAC43083.1| putative lipid transfer
  misc_feature (29)..(172): Homolog of NCBI NO: 7487610 NR Description: hypothetical protein T3F12.2 - Arabidopsis >gi|2565001|gb|AAB81871.1|AAB81871 putative lipid transfer [Arabidopsis thaliana] >gi|7267509|emb|CAB77992.1| putative lipid
  misc_feature (29)..(172): Homolog of NCBI NO: 30680828 NR Description: protease inhibitor/seed storage/lipid transfer
  misc_feature (27)..(153): Homolog of NCBI NO: 15220327 NR Description: non-specific lipid transfer protein, putative;
  misc_feature (11)..(169): Homolog of NCBI NO: 18403453 NR Description: expressed protein; protein id: At3g22600.1, by cDNA: 19287., supported by cDNA: gi_15010697, supported by gi_18958061 [Arabidopsis thaliana] >gi|11994292|dbj|BAB01475.1|

SEQ ID NO: 92016 - protein, 169 aa, Arabidopsis thaliana; identical to SEQ ID NO: 35650
  peptide (1)..(169): Ceres Seq. ID no. 12706911
  misc_feature (27)..(105): Pfam Name: Protease inhibitor/seed storage/LTP family Pfam Description: Protease inhibitor/seed storage/LTP family
  misc_feature (1)..(169): Homolog of NCBI NO: 15225509 NR Description: putative nonspecific lipid-transfer protein protein id: At2g13820.1, supported by cDNA: 24286. [Arabidopsis >gi|25411519|pir||B84511 hypothetical protein At2g13820
  misc_feature (1)..(169): Homolog of NCBI NO: 27765012 NR Description: At2g13820 [Arabidopsis thaliana]
  misc_feature (1)..(169): Homolog of NCBI NO: 18424785 NR Description: putative protein; protein id: At5g64080.1, by cDNA: 98459., supported by cDNA: gi_17979493, supported by gi_20147300 [Arabidopsis thaliana] >gi|17979494|gb|AAL50083.1|
  misc_feature (1)..(169): Homolog of NCBI NO: 21618136 NR Description: nonspecific lipid-transfer protein-like protein
  misc_feature (1)..(163): Homolog of NCBI NO: 10176956 NR Description: contains similarity to nonspecific lipid-transfer
  misc_feature (1)..(164): Homolog of NCBI NO: 30682659 NR Description: lipid transfer protein family [Arabidopsis >gi|9955524|emb|CAC05463.1| putative lipid transfer protein thaliana] >gi|26451986|dbj|BAC43083.1| putative lipid transfer
  misc_feature (26)..(169): Homolog of NCBI NO: 7487610 NR Description: hypothetical protein T3F12.2 - Arabidopsis >gi|2565001|gb|AAB81871.1|AAB81871 putative lipid transfer [Arabidopsis thaliana] >gi|7267509|emb|CAB77992.1| putative lipid
  misc_feature (26)..(169): Homolog of NCBI NO: 30680828 NR Description: protease inhibitor/seed storage/lipid transfer
  misc_feature (24)..(150): Homolog of NCBI NO: 15220327 NR Description: non-specific lipid transfer protein, putative;
  misc_feature (8)..(166): Homolog of NCBI NO: 18403453 NR Description: expressed protein; protein id: At3g22600.1, by cDNA: 19287., supported by cDNA: gi_15010697, supported by gi_18958061 [Arabidopsis thaliana] >gi|11994292|dbj|BAB01475.1|

SEQ ID NO: 92017 - protein, 162 aa, Arabidopsis thaliana; identical to SEQ ID NO: 35651
  peptide (1)..(162): Ceres Seq. ID no. 12706912
  misc_feature (20)..(98): Pfam Name: Protease inhibitor/seed storage/LTP family Pfam Description: Protease inhibitor/seed storage/LTP family
  misc_feature (1)..(162): Homolog of NCBI NO: 15225509 NR Description: putative nonspecific lipid-transfer protein protein id: At2g13820.1, supported by cDNA: 24286. [Arabidopsis >gi|25411519|pir||B84511 hypothetical protein At2g13820
  misc_feature (1)..(162): Homolog of NCBI NO: 27765012 NR Description: At2g13820 [Arabidopsis thaliana]
  misc_feature (1)..(162): Homolog of NCBI NO: 18424785 NR Description: putative protein; protein id: At5g64080.1, by cDNA: 98459., supported by cDNA: gi_17979493, supported by gi_20147300 [Arabidopsis thaliana] >gi|17979494|gb|AAL50083.1|
  misc_feature (1)..(162): Homolog of NCBI NO: 21618136 NR Description: nonspecific lipid-transfer protein-like protein
  misc_feature (1)..(156): Homolog of NCBI NO: 10176956 NR Description: contains similarity to nonspecific lipid-transfer
  misc_feature (1)..(157): Homolog of NCBI NO: 30682659 NR Description: lipid transfer protein family [Arabidopsis >gi|9955524|emb|CAC05463.1| putative lipid transfer protein thaliana] >gi|26451986|dbj|BAC43083.1| putative lipid transfer
  misc_feature (19)..(162): Homolog of NCBI NO: 7487610 NR Description: hypothetical protein T3F12.2 - Arabidopsis >gi|2565001|gb|AAB81871.1|AAB81871 putative lipid transfer [Arabidopsis thaliana] >gi|7267509|emb|CAB77992.1| putative lipid
  misc_feature (19)..(162): Homolog of NCBI NO: 30680828 NR Description: protease inhibitor/seed storage/lipid transfer
  misc_feature (17)..(143): Homolog of NCBI NO: 15220327 NR Description: non-specific lipid transfer protein, putative;
  misc_feature (1)..(159): Homolog of NCBI NO: 18403453 NR Description: expressed protein; protein id: At3g22600.1, by cDNA: 19287., supported by cDNA: gi_15010697, supported by gi_18958061 [Arabidopsis thaliana] >gi|11994292|dbj|BAB01475.1|

SEQ ID NO: 92018 - DNA, 1164 bp, Arabidopsis thaliana; identical to SEQ ID NO: 88262
  misc_feature (1)..(1164): Ceres Seq. ID no. 12706963
  misc_feature: MA Experiment ID: 20000437 Result: Up-regulated in Transcription
  misc_feature: MA Experiment 20000437 PARAMETER Experiment Name: At_Drought_P Parameter: Age (day) Value: 8
  misc_feature: MA Experiment 20000437 PARAMETER Experiment Name: At_Drought_P Parameter: Organism Value: A. thaliana
  misc_feature: MA Experiment 20000437 PARAMETER Experiment Name: At_Drought_P Parameter: Plant Line Value: WS
  misc_feature: MA Experiment 20000437 PARAMETER Experiment Name: At_Drought_P Parameter: Timepoint (hr) Value: 24
  misc_feature: MA Experiment 20000437 PARAMETER Experiment Name: At_Drought_P Parameter: Tissue Value: Whole Plant
  misc_feature: MA Experiment 20000437 PARAMETER Experiment Name: At_Drought_P Parameter: Treatment Value: Drought vs. No Drought

SEQ ID NO: 92019 - protein, 387 aa, Arabidopsis thaliana; identical to SEQ ID NO: 88263
  peptide (1)..(387): Ceres Seq. ID no. 12706964
  misc_feature (56)..(387): Pfam Name: SAM dependent carboxyl methyltransferase Pfam Description: SAM dependent carboxyl methyltransferase
  misc_feature (29)..(387): Homolog of NCBI NO: 15225569 NR Description: S-adenosyl-L-methionine:carboxyl family; protein id: At2g14060.1 [Arabidopsis thaliana]
  misc_feature (27)..(387): Homolog of NCBI NO: 15240823 NR Description: S-adenosyl-L-methionine:carboxyl
  misc_feature (29)..(387): Homolog of NCBI NO: 8885604 NR Description: S-adenosyl-L-methionine:salicylic acid carboxyl
  misc_feature (27)..(387): Homolog of NCBI NO: 9279749 NR Description: S-adenosyl-L-methionine:salicylic acid carboxyl
  misc_feature (57)..(387): Homolog of NCBI NO: 15233213 NR Description: S-adenosyl-L-methionine:carboxyl
  misc_feature (18)..(387): Homolog of NCBI NO: 15237695 NR Description: S-adenosyl-L-methionine:carboxyl
  misc_feature (24)..(387): Homolog of NCBI NO: 15237696 NR Description: S-adenosyl-L-methionine:carboxyl
  misc_feature (29)..(387): Homolog of NCBI NO: 15239970 NR Description: S-adenosyl-L-methionine:carboxyl
  misc_feature (22)..(387): Homolog of NCBI NO: 37904506 NR Description: methyl transferase [Arabidopsis lyrata subsp.
  misc_feature (22)..(387): Homolog of NCBI NO: 22330992 NR Description: S-adenosyl-L-methionine:carboxyl

SEQ ID NO: 92020 - protein, 359 aa, Arabidopsis thaliana; identical to SEQ ID NO: 88264
  peptide (1)..(359): Ceres Seq. ID no. 12706965
  misc_feature (28)..(359): Pfam Name: SAM dependent carboxyl methyltransferase Pfam Description: SAM dependent carboxyl methyltransferase
  misc_feature (1)..(359): Homolog of NCBI NO: 15225569 NR Description: S-adenosyl-L-methionine:carboxyl family; protein id: At2g14060.1 [Arabidopsis thaliana]
  misc_feature (1)..(359): Homolog of NCBI NO: 15240823 NR Description: S-adenosyl-L-methionine:carboxyl
  misc_feature (1)..(359): Homolog of NCBI NO: 8885604 NR Description: S-adenosyl-L-methionine:salicylic acid carboxyl
  misc_feature (1)..(359): Homolog of NCBI NO: 9279749 NR Description: S-adenosyl-L-methionine:salicylic acid carboxyl
  misc_feature (29)..(359): Homolog of NCBI NO: 15233213 NR Description: S-adenosyl-L-methionine:carboxyl
  misc_feature (1)..(359): Homolog of NCBI NO: 15237695 NR Description: S-adenosyl-L-methionine:carboxyl
  misc_feature (1)..(359): Homolog of NCBI NO: 15237696 NR Description: S-adenosyl-L-methionine:carboxyl
  misc_feature (1)..(359): Homolog of NCBI NO: 15239970 NR Description: S-adenosyl-L-methionine:carboxyl
  misc_feature (1)..(359): Homolog of NCBI NO: 37904506 NR Description: methyl transferase [Arabidopsis lyrata subsp.
  misc_feature (1)..(359): Homolog of NCBI NO: 22330992 NR Description: S-adenosyl-L-methionine:carboxyl

SEQ ID NO: 92021 - protein, 325 aa, Arabidopsis thaliana; identical to SEQ ID NO: 88265
  peptide (1)..(325): Ceres Seq. ID no. 12706966
  misc_feature (1)..(325): Pfam Name: SAM dependent carboxyl methyltransferase Pfam Description: SAM dependent carboxyl methyltransferase
  misc_feature (1)..(325): Homolog of NCBI NO: 15225569 NR Description: S-adenosyl-L-methionine:carboxyl family; protein id: At2g14060.1 [Arabidopsis thaliana]
  misc_feature (1)..(325): Homolog of NCBI NO: 15240823 NR Description: S-adenosyl-L-methionine:carboxyl
  misc_feature (1)..(325): Homolog of NCBI NO: 8885604 NR Description: S-adenosyl-L-methionine:salicylic acid carboxyl
  misc_feature (1)..(325): Homolog of NCBI NO: 9279749 NR Description: S-adenosyl-L-methionine:salicylic acid carboxyl
  misc_feature (1)..(325): Homolog of NCBI NO: 15233213 NR Description: S-adenosyl-L-methionine:carboxyl
  misc_feature (1)..(325): Homolog of NCBI NO: 15237695 NR Description: S-adenosyl-L-methionine:carboxyl
  misc_feature (1)..(325): Homolog of NCBI NO: 15237696 NR Description: S-adenosyl-L-methionine:carboxyl
  misc_feature (1)..(325): Homolog of NCBI NO: 15239970 NR Description: S-adenosyl-L-methionine:carboxyl
  misc_feature (1)..(325): Homolog of NCBI NO: 37904506 NR Description: methyl transferase [Arabidopsis lyrata subsp.
  misc_feature (1)..(325): Homolog of NCBI NO: 22330992 NR Description: S-adenosyl-L-methionine:carboxyl

SEQ ID NO: 92022 - DNA, 1620 bp, Arabidopsis thaliana; identical to SEQ ID NO: 88266
  misc_feature (1)..(1620): Ceres Seq. ID no. 12707022
  misc_feature: MA Experiment ID: 20000185 Result: Up-regulated in Transcription
  misc_feature: MA Experiment 20000185 PARAMETER Experiment Name: At_Roots__P Parameter: Age (day) Value: 7 vs. 21
  misc_feature: MA Experiment 20000185 PARAMETER Experiment Name: At_Roots__P Parameter: Organism Value: A. thaliana
  misc_feature: MA Experiment 20000185 PARAMETER Experiment Name: At_Roots__P Parameter: Tissue Value: Roots vs. Whole Plant
  misc_feature: MA Experiment ID: 20000439 Result: Up-regulated in Transcription
  misc_feature: MA Experiment 20000439 PARAMETER Experiment Name: At_Roots__P Parameter: Age (day) Value: 14 vs. 21
  misc_feature: MA Experiment 20000439 PARAMETER Experiment Name: At_Roots__P Parameter: Organism Value: A. thaliana
  misc_feature: MA Experiment 20000439 PARAMETER Experiment Name: At_Roots__P Parameter: Tissue Value: Roots vs. Whole Plant
  misc_feature: MA Experiment ID: 20000495 Result: Up-regulated in Transcription
  misc_feature: MA Experiment 20000495 PARAMETER Experiment Name: At_Guard_Cells_P Parameter: Harvest Date Value: 8/2/2002
  misc_feature: MA Experiment 20000495 PARAMETER Experiment Name: At_Guard_Cells_P Parameter: Organism Value: A. thaliana
  misc_feature: MA Experiment 20000495 PARAMETER Experiment Name: At_Guard_Cells_P Parameter: Tissue Value: Guard Cells vs. Leaves
  misc_feature: MA Experiment ID: 20000573 Result: Down-regulated in Transcription
  misc_feature: MA Experiment 20000573 PARAMETER Experiment Name: At_100uM_ABA_Mutants__P Parameter: Organism Value: A. thaliana
  misc_feature: MA Experiment 20000573 PARAMETER Experiment Name: At_100uM_ABA_Mutants__P Parameter: Plant Line Value: CS22 vs. Ler wt
  misc_feature: MA Experiment 20000573 PARAMETER Experiment Name: At_100uM_ABA_Mutants__P Parameter: Timepoint (hr) Value: N/A
  misc_feature: MA Experiment 20000573 PARAMETER Experiment Name: At_100uM_ABA_Mutants__P Parameter: Tissue Value: Whole Plant
  misc_feature: MA Experiment 20000573 PARAMETER Experiment Name: At_100uM_ABA_Mutants__P Parameter: Treatment Value: None
  misc_feature: MA Experiment ID: 20000574 Result: Down-regulated in Transcription
  misc_feature: MA Experiment 20000574 PARAMETER Experiment Name: At_100uM_ABA_Mutants__P Parameter: Organism Value: A. thaliana
  misc_feature: MA Experiment 20000574 PARAMETER Experiment Name: At_100uM_ABA_Mutants__P Parameter: Plant Line Value: CS23 vs. Ler wt
  misc_feature: MA Experiment 20000574 PARAMETER Experiment Name: At_100uM_ABA_Mutants__P Parameter: Timepoint (hr) Value: N/A
  misc_feature: MA Experiment 20000574 PARAMETER Experiment Name: At_100uM_ABA_Mutants__P Parameter: Tissue Value: Whole Plant
  misc_feature: MA Experiment 20000574 PARAMETER Experiment Name: At_100uM_ABA_Mutants__P Parameter: Treatment Value: None
  misc_feature: MA Experiment ID: 20001451 Result: Down-regulated in Transcription
  misc_feature: MA Experiment 20001451 PARAMETER Experiment Name: At_Far-red-induction_P Parameter: Age (day) Value: 7
  misc_feature: MA Experiment 20001451 PARAMETER Experiment Name: At_Far-red-induction_P Parameter: Light Value: Far-red vs. White
  misc_feature: MA Experiment 20001451 PARAMETER Experiment Name: At_Far-red-induction_P Parameter: Organism Value: A. thaliana
  misc_feature: MA Experiment 20001451 PARAMETER Experiment Name: At_Far-red-induction_P Parameter: Plant Line Value: Columbia
  misc_feature: MA Experiment 20001451 PARAMETER Experiment Name: At_Far-red-induction_P Parameter: Timepoint (hr) Value: 24
  misc_feature: MA Experiment 20001451 PARAMETER Experiment Name: At_Far-red-induction_P Parameter: Tissue Value: Whole Plant

SEQ ID NO: 92023 - protein, 539 aa, Arabidopsis thaliana; identical to SEQ ID NO: 88267
  peptide (1)..(539): Ceres Seq. ID no. 12707023
  misc_feature (368)..(416): Pfam Name: DHHC zinc finger domain Pfam Description: DHHC zinc finger domain
  misc_feature (45)..(532): Homolog of NCBI NO: 15241327 NR Description: ankyrin-repeat protein; protein id: At5g20350.1
  misc_feature (3)..(247): Homolog of NCBI NO: 15241327 NR Description: ankyrin-repeat protein; protein id: At5g20350.1
  misc_feature (1)..(127): Homolog of NCBI NO: 15225622 NR Description: unknown protein; protein id: At2g14250.1
  misc_feature (281)..(534): Homolog of NCBI NO: 40644806 NR Description: hypothetical protein KIAA0946 [Triticum aestivum]
  misc_feature (24)..(532): Homolog of NCBI NO: 24583835 NR Description: CG6618-PA [Drosophila melanogaster]
  misc_feature (10)..(298): Homolog of NCBI NO: 27369784 NR Description: RIKEN cDNA A230053P19; hypothetical protein [Mus musculus] >gi|26338482|dbj|BAC32912.1| unnamed protein
  misc_feature (365)..(522): Homolog of NCBI NO: 27369784 NR Description: RIKEN cDNA A230053P19; hypothetical protein [Mus musculus] >gi|26338482|dbj|BAC32912.1| unnamed protein
  misc_feature (10)..(298): Homolog of NCBI NO: 29791906 NR Description: Unknown (protein for MGC:48450) [Homo sapiens]
  misc_feature (365)..(522): Homolog of NCBI NO: 29791906 NR Description: Unknown (protein for MGC:48450) [Homo sapiens]
  misc_feature (10)..(298): Homolog of NCBI NO: 4589536 NR Description: KIAA0946 protein [Homo sapiens]

SEQ ID NO: 92024 - protein, 299 aa, Arabidopsis thaliana; identical to SEQ ID NO: 88268
  peptide (1)..(299): Ceres Seq. ID no. 12707024
  misc_feature (128)..(176): Pfam Name: DHHC zinc finger domain Pfam Description: DHHC zinc finger domain
  misc_feature (1)..(292): Homolog of NCBI NO: 15241327 NR Description: ankyrin-repeat protein; protein id: At5g20350.1
  misc_feature (41)..(294): Homolog of NCBI NO: 40644806 NR Description: hypothetical protein KIAA0946 [Triticum aestivum]
  misc_feature (1)..(292): Homolog of NCBI NO: 24583835 NR Description: CG6618-PA [Drosophila melanogaster]
  misc_feature (1)..(58): Homolog of NCBI NO: 27369784 NR Description: RIKEN cDNA A230053P19; hypothetical protein [Mus musculus] >gi|26338482|dbj|BAC32912.1| unnamed protein
  misc_feature (125)..(282): Homolog of NCBI NO: 27369784 NR Description: RIKEN cDNA A230053P19; hypothetical protein [Mus musculus] >gi|26338482|dbj|BAC32912.1| unnamed protein
  misc_feature (1)..(58): Homolog of NCBI NO: 29791906 NR Description: Unknown (protein for MGC:48450) [Homo sapiens]
  misc_feature (125)..(282): Homolog of NCBI NO: 29791906 NR Description: Unknown (protein for MGC:48450) [Homo sapiens]
  misc_feature (1)..(58): Homolog of NCBI NO: 4589536 NR Description: KIAA0946 protein [Homo sapiens]
  misc_feature (1)..(58): Homolog of NCBI NO: 29244581 NR Description: Huntingtin interacting protein H; huntingtin protein 3; zinc finger, DHHC domain containing 17 [Homo sapiens]
  misc_feature (125)..(282): Homolog of NCBI NO: 4589536 NR Description: KIAA0946 protein [Homo sapiens]

SEQ ID NO: 92025 - protein, 275 aa, Arabidopsis thaliana; identical to SEQ ID NO: 88269
  peptide (1)..(275): Ceres Seq. ID no. 12707025
  misc_feature (104)..(152): Pfam Name: DHHC zinc finger domain Pfam Description: DHHC zinc finger domain
  misc_feature (1)..(268): Homolog of NCBI NO: 15241327 NR Description: ankyrin-repeat protein; protein id: At5g20350.1
  misc_feature (17)..(270): Homolog of NCBI NO: 40644806 NR Description: hypothetical protein KIAA0946 [Triticum aestivum]
  misc_feature (1)..(268): Homolog of NCBI NO: 24583835 NR Description: CG6618-PA [Drosophila melanogaster]
  misc_feature (1)..(34): Homolog of NCBI NO: 27369784 NR Description: RIKEN cDNA A230053P19; hypothetical protein [Mus musculus] >gi|26338482|dbj|BAC32912.1| unnamed protein
  misc_feature (101)..(258): Homolog of NCBI NO: 27369784 NR Description: RIKEN cDNA A230053P19; hypothetical protein [Mus musculus] >gi|26338482|dbj|BAC32912.1| unnamed protein
  misc_feature (1)..(34): Homolog of NCBI NO: 29791906 NR Description: Unknown (protein for MGC:48450) [Homo sapiens]
  misc_feature (101)..(258): Homolog of NCBI NO: 29791906 NR Description: Unknown (protein for MGC:48450) [Homo sapiens]
  misc_feature (1)..(34): Homolog of NCBI NO: 4589536 NR Description: KIAA0946 protein [Homo sapiens]
  misc_feature (1)..(34): Homolog of NCBI NO: 29244581 NR Description: Huntingtin interacting protein H; huntingtin protein 3; zinc finger, DHHC domain containing 17 [Homo sapiens]
  misc_feature (101)..(258): Homolog of NCBI NO: 4589536 NR Description: KIAA0946 protein [Homo sapiens]

SEQ ID NO: 92026 - DNA, 738 bp, Arabidopsis thaliana; identical to SEQ ID NO: 88270
  misc_feature (1)..(738): Ceres Seq. ID no. 12707068
  misc_feature: MA Experiment ID: 20000171 Result: Up-regulated in Transcription
  misc_feature: MA Experiment 20000171 PARAMETER Experiment Name: At_42deg_Heat_P Parameter: Age (day) Value: 14
  misc_feature: MA Experiment 20000171 PARAMETER Experiment Name: At_42deg_Heat_P Parameter: Organism Value: A. thaliana
  misc_feature: MA Experiment 20000171 PARAMETER Experiment Name: At_42deg_Heat_P Parameter: Plant Line Value: WS
  misc_feature: MA Experiment 20000171 PARAMETER Experiment Name: At_42deg_Heat_P Parameter: Temperature (deg C) Value: 42 vs. 22
  misc_feature: MA Experiment 20000171 PARAMETER Experiment Name: At_42deg_Heat_P Parameter: Timepoint (hr) Value: 1
  misc_feature: MA Experiment 20000171 PARAMETER Experiment Name: At_42deg_Heat_P Parameter: Tissue Value: Aerial
  misc_feature: MA Experiment ID: 20000173 Result: Up-regulated in Transcription
  misc_feature: MA Experiment 20000173 PARAMETER Experiment Name: At_42deg_Heat_P Parameter: Age (day) Value: 14
  misc_feature: MA Experiment 20000173 PARAMETER Experiment Name: At_42deg_Heat_P Parameter: Organism Value: A. thaliana
  misc_feature: MA Experiment 20000173 PARAMETER Experiment Name: At_42deg_Heat_P Parameter: Plant Line Value: WS
  misc_feature: MA Experiment 20000173 PARAMETER Experiment Name: At_42deg_Heat_P Parameter: Temperature (deg C) Value: 42 vs. 22
  misc_feature: MA Experiment 20000173 PARAMETER Experiment Name: At_42deg_Heat_P Parameter: Timepoint (hr) Value: 6
  misc_feature: MA Experiment 20000173 PARAMETER Experiment Name: At_42deg_Heat_P Parameter: Tissue Value: Aerial
  misc_feature: MA Experiment ID: 20000179 Result: Up-regulated in Transcription
  misc_feature: MA Experiment 20000179 PARAMETER Experiment Name: At_Germinating_Seeds_P Parameter: Age (hr) Value: 6 vs. 0
  misc_feature: MA Experiment 20000179 PARAMETER Experiment Name: At_Germinating_Seeds_P Parameter: Tissue Value: Germinating Seeds
  misc_feature: MA Experiment ID: 20000180 Result: Up-regulated in Transcription
  misc_feature: MA Experiment 20000180 PARAMETER Experiment Name: At_Germinating_Seeds_P Parameter: Age (hr) Value: 24 vs. 0
  misc_feature: MA Experiment 20000180 PARAMETER Experiment Name: At_Germinating_Seeds_P Parameter: Tissue Value: Germinating Seeds
  misc_feature: MA Experiment ID: 20000227 Result: Down-regulated in Transcription
  misc_feature: MA Experiment 20000227 PARAMETER Experiment Name: At_Root-Tips-vs-Tops_P Parameter: Tissue Value: Root Tips vs. Root Tops
  misc_feature: MA Experiment ID: 20000234 Result: Up-regulated in Transcription
  misc_feature: MA Experiment 20000234 PARAMETER Experiment Name: At_Siliques_P Parameter: Age (day) Value: 21
  misc_feature: MA Experiment 20000234 PARAMETER Experiment Name: At_Siliques_P Parameter: Organism Value: A. thaliana
  misc_feature: MA Experiment 20000234 PARAMETER Experiment Name: At_Siliques_P Parameter: Plant Line Value: WS
  misc_feature: MA Experiment 20000234 PARAMETER Experiment Name: At_Siliques_P Parameter: Tissue Value: Less Than 5mm Siliques vs. Whole Plant
  misc_feature: MA Experiment ID: 20000235 Result: Up-regulated in Transcription
  misc_feature: MA Experiment 20000235 PARAMETER Experiment Name: At_Siliques_P Parameter: Age (day) Value: 21
  misc_feature: MA Experiment 20000235 PARAMETER Experiment Name: At_Siliques_P Parameter: Organism Value: A. thaliana
  misc_feature: MA Experiment 20000235 PARAMETER Experiment Name: At_Siliques_P Parameter: Plant Line Value: WS
  misc_feature: MA Experiment 20000235 PARAMETER Experiment Name: At_Siliques_P Parameter: Tissue Value: 5-10mm Siliques vs. Whole Plant
  misc_feature: MA Experiment ID: 20000439 Result: Up-regulated in Transcription
  misc_feature: MA Experiment 20000439 PARAMETER Experiment Name: At_Roots__P Parameter: Age (day) Value: 14 vs. 21
  misc_feature: MA Experiment 20000439 PARAMETER Experiment Name: At_Roots__P Parameter: Organism Value: A. thaliana
  misc_feature: MA Experiment 20000439 PARAMETER Experiment Name: At_Roots__P Parameter: Tissue Value: Roots vs. Whole Plant

SEQ ID NO: 92027 - protein, 245 aa, Arabidopsis thaliana; identical to SEQ ID NO: 88271
  peptide (1)..(245): Ceres Seq. ID no. 12707069
  misc_feature (3)..(142): Pfam Name: Tetraspanin family Pfam Description: Tetraspanin family
  misc_feature (1)..(142): Homolog of NCBI NO: 15224802 NR Description: putative senescence-associated protein 5; protein
  misc_feature (143)..(245): Homolog of NCBI NO: 15224802 NR Description: putative senescence-associated protein 5; protein
  misc_feature (1)..(141): Homolog of NCBI NO: 15237490 NR Description: senescence-associated protein 5-like protein; id: At5g46700.1, supported by cDNA: gi_17979385 [Arabidopsis
  misc_feature (136)..(244): Homolog of NCBI NO: 15237490 NR Description: senescence-associated protein 5-like protein; id: At5g46700.1, supported by cDNA: gi_17979385 [Arabidopsis
  misc_feature (1)..(141): Homolog of NCBI NO: 17979386 NR Description: putative senescence-associated protein 5
  misc_feature (136)..(244): Homolog of NCBI NO: 17979386 NR Description: putative senescence-associated protein 5
  misc_feature (1)..(156): Homolog of NCBI NO: 15231187 NR Description: putative protein; protein id: At3g45600.1, by cDNA: 11427., supported by cDNA: gi_14423445 [Arabidopsis
  misc_feature (138)..(235): Homolog of NCBI NO: 15231187 NR Description: putative protein; protein id: At3g45600.1, by cDNA: 11427., supported by cDNA: gi_14423445 [Arabidopsis
  misc_feature (4)..(147): Homolog of NCBI NO: 20197174 NR Description: hypothetical protein [Arabidopsis thaliana]
  misc_feature (138)..(240): Homolog of NCBI NO: 20197174 NR Description: hypothetical protein [Arabidopsis thaliana]

SEQ ID NO: 92028 - protein, 168 aa, Arabidopsis thaliana; identical to SEQ ID NO: 88272
  peptide (1)..(168): Ceres Seq. ID no. 12707070
  misc_feature (1)..(65): Pfam Name: Tetraspanin family Pfam Description: Tetraspanin family
  misc_feature (1)..(65): Homolog of NCBI NO: 15224802 NR Description: putative senescence-associated protein 5; protein
  misc_feature (66)..(168): Homolog of NCBI NO: 15224802 NR Description: putative senescence-associated protein 5; protein
  misc_feature (1)..(64): Homolog of NCBI NO: 15237490 NR Description: senescence-associated protein 5-like protein; id: At5g46700.1, supported by cDNA: gi_17979385 [Arabidopsis
  misc_feature (59)..(167): Homolog of NCBI NO: 15237490 NR Description: senescence-associated protein 5-like protein; id: At5g46700.1, supported by cDNA: gi_17979385 [Arabidopsis
  misc_feature (1)..(64): Homolog of NCBI NO: 17979386 NR Description: putative senescence-associated protein 5
  misc_feature (59)..(167): Homolog of NCBI NO: 17979386 NR Description: putative senescence-associated protein 5
  misc_feature (1)..(79): Homolog of NCBI NO: 15231187 NR Description: putative protein; protein id: At3g45600.1, by cDNA: 11427., supported by cDNA: gi_14423445 [Arabidopsis
  misc_feature (61)..(158): Homolog of NCBI NO: 15231187 NR Description: putative protein; protein id: At3g45600.1, by cDNA: 11427., supported by cDNA: gi_14423445 [Arabidopsis
  misc_feature (1)..(70): Homolog of NCBI NO: 20197174 NR Description: hypothetical protein [Arabidopsis thaliana]
  misc_feature (61)..(163): Homolog of NCBI NO: 20197174 NR Description: hypothetical protein [Arabidopsis thaliana]

SEQ ID NO: 92029 - DNA, 687 bp, Arabidopsis thaliana; identical to SEQ ID NO: 88273
  misc_feature (1)..(687): Ceres Seq. ID no. 12707085
  misc_feature: MA Experiment ID: 20000314 Result: Up-regulated in Transcription
  misc_feature: MA Experiment 20000314 PARAMETER Experiment Name: At_14day_Shoots-Roots_Sub_P Parameter: Age (day) Value: 14
  misc_feature: MA Experiment 20000314 PARAMETER Experiment Name: At_14day_Shoots-Roots_Sub_P Parameter: Organism Value: A. thaliana
  misc_feature: MA Experiment 20000314 PARAMETER Experiment Name: At_14day_Shoots-Roots_Sub_P Parameter: Plant Line Value: WS
  misc_feature: MA Experiment 20000314 PARAMETER Experiment Name: At_14day_Shoots-Roots_Sub_P Parameter: Tissue Value: Roots vs. Whole Plant
  misc_feature: MA Experiment ID: 20000315 Result: Down-regulated in Transcription
  misc_feature: MA Experiment 20000315 PARAMETER Experiment Name: At_14day_Shoots-Roots_Sub_P Parameter: Age (day) Value: 14
  misc_feature: MA Experiment 20000315 PARAMETER Experiment Name: At_14day_Shoots-Roots_Sub_P Parameter: Organism Value: A. thaliana
  misc_feature: MA Experiment 20000315 PARAMETER Experiment Name: At_14day_Shoots-Roots_Sub_P Parameter: Plant Line Value: WS
  misc_feature: MA Experiment 20000315 PARAMETER Experiment Name: At_14day_Shoots-Roots_Sub_P Parameter: Tissue Value: Shoots vs. Whole Plant
  misc_feature: MA Experiment ID: 20000440 Result: Down-regulated in Transcription
  misc_feature: MA Experiment 20000440 PARAMETER Experiment Name: At_Closed-Flower__Sub_P Parameter: Tissue Value: Closed Flower vs. Whole Plant
  misc_feature: Pfam Name: GST_C Pfam Description: Glutathione S-transferase, C-terminal domain

SEQ ID NO: 92030 - protein, 228 aa, Arabidopsis thaliana; identical to SEQ ID NO: 88274
  peptide (1)..(228): Ceres Seq. ID no. 12707086
  misc_feature: Pfam Name: GST_C Pfam Description: Glutathione S-transferase, C-terminal domain
  misc_feature (1)..(228): Homolog of NCBI NO: 30677995 NR Description: glutathione transferase, putative [Arabidopsis
  misc_feature (1)..(228): Homolog of NCBI NO: 15226952 NR Description: glutathione transferase, putative; protein id: supported by cDNA: gi_11095997, supported by cDNA: gi_15450462, by cDNA: gi_16974448 [Arabidopsis thaliana]
  misc_feature (1)..(227): Homolog of NCBI NO: 28932698 NR Description: glutathione S-transferase zeta [Brassica napus]
  misc_feature (1)..(227): Homolog of NCBI NO: 28932694 NR Description: glutathione S-transferase zeta [Brassica napus]
  misc_feature (6)..(226): Homolog of NCBI NO: 15226949 NR Description: glutathione transferase, putative; protein id:
  misc_feature (1)..(226): Homolog of NCBI NO: 29420155 NR Description: glutathione S-transferase Z1 [Malva pusilla]
  misc_feature (8)..(227): Homolog of NCBI NO: 11132235 NR Description: Glutathione S-transferase zeta class
  misc_feature (1)..(225): Homolog of NCBI NO: 24061762 NR Description: glutathione S-transferase [Capsicum annuum]

SEQ ID NO: 92031 - protein, 165 aa, Arabidopsis thaliana; identical to SEQ ID NO: 77596
  peptide (1)..(165): Ceres Seq. ID no. 12707087
  misc_feature: Pfam Name: GST_C Pfam Description: Glutathione S-transferase, C-terminal domain
  misc_feature (1)..(165): Homolog of NCBI NO: 30677995 NR Description: glutathione transferase, putative [Arabidopsis
  misc_feature (1)..(165): Homolog of NCBI NO: 15226952 NR Description: glutathione transferase, putative; protein id: supported by cDNA: gi_11095997, supported by cDNA: gi_15450462, by cDNA: gi_16974448 [Arabidopsis thaliana]
  misc_feature (1)..(164): Homolog of NCBI NO: 28932698 NR Description: glutathione S-transferase zeta [Brassica napus]
  misc_feature (1)..(164): Homolog of NCBI NO: 28932694 NR Description: glutathione S-transferase zeta [Brassica napus]
  misc_feature (1)..(163): Homolog of NCBI NO: 15226949 NR Description: glutathione transferase, putative; protein id:
  misc_feature (1)..(163): Homolog of NCBI NO: 29420155 NR Description: glutathione S-transferase Z1 [Malva pusilla]
  misc_feature (1)..(164): Homolog of NCBI NO: 11132235 NR Description: Glutathione S-transferase zeta class
  misc_feature (1)..(162): Homolog of NCBI NO: 24061762 NR Description: glutathione S-transferase [Capsicum annuum]

SEQ ID NO: 92032 - protein, 144 aa, Arabidopsis thaliana; identical to SEQ ID NO: 88276
  peptide (1)..(144): Ceres Seq. ID no. 12707088
  misc_feature: Pfam Name: GST_C Pfam Description: Glutathione S-transferase, C-terminal domain
  misc_feature (1)..(144): Homolog of NCBI NO: 30677995 NR Description: glutathione transferase, putative [Arabidopsis
  misc_feature (1)..(144): Homolog of NCBI NO: 15226952 NR Description: glutathione transferase, putative; protein id: supported by cDNA: gi_11095997, supported by cDNA: gi_15450462, by cDNA: gi_16974448 [Arabidopsis thaliana]
  misc_feature (1)..(143): Homolog of NCBI NO: 28932698 NR Description: glutathione S-transferase zeta [Brassica napus]
  misc_feature (1)..(143): Homolog of NCBI NO: 28932694 NR Description: glutathione S-transferase zeta [Brassica napus]
  misc_feature (1)..(142): Homolog of NCBI NO: 15226949 NR Description: glutathione transferase, putative; protein id:
  misc_feature (1)..(142): Homolog of NCBI NO: 29420155 NR Description: glutathione S-transferase Z1 [Malva pusilla]
  misc_feature (1)..(143): Homolog of NCBI NO: 11132235 NR Description: Glutathione S-transferase zeta class
  misc_feature (1)..(141): Homolog of NCBI NO: 24061762 NR Description: glutathione S-transferase [Capsicum annuum]

SEQ ID NO: 92033 - DNA, 957 bp, Arabidopsis thaliana; identical to SEQ ID NO: 88277
  misc_feature (1)..(957): Ceres Seq. ID no. 12707089
  misc_feature: MA Experiment ID: 20000179 Result: Up-regulated in Transcription
  misc_feature: MA Experiment 20000179 PARAMETER Experiment Name: At_Germinating_Seeds_P Parameter: Age (hr) Value: 6 vs. 0
  misc_feature: MA Experiment 20000179 PARAMETER Experiment Name: At_Germinating_Seeds_P Parameter: Tissue Value: Germinating Seeds
  misc_feature: MA Experiment ID: 20000180 Result: Up-regulated in Transcription
  misc_feature: MA Experiment 20000180 PARAMETER Experiment Name: At_Germinating_Seeds_P Parameter: Age (hr) Value: 24 vs. 0
  misc_feature: MA Experiment 20000180 PARAMETER Experiment Name: At_Germinating_Seeds_P Parameter: Tissue Value: Germinating Seeds
  misc_feature: MA Experiment ID: 20000227 Result: Down-regulated in Transcription
  misc_feature: MA Experiment 20000227 PARAMETER Experiment Name: At_Root-Tips-vs-Tops_P Parameter: Tissue Value: Root Tips vs. Root Tops
  misc_feature: MA Experiment ID: 20001557 Result: Down-regulated in Transcription
  misc_feature: MA Experiment 20001557 PARAMETER Experiment Name: At_Drought_Soil_Dry_P Parameter: Age (day) Value: 27
  misc_feature: MA Experiment 20001557 PARAMETER Experiment Name: At_Drought_Soil_Dry_P Parameter: Organism Value: A. thaliana
  misc_feature: MA Experiment 20001557 PARAMETER Experiment Name: At_Drought_Soil_Dry_P Parameter: Plant Line Value: WS
  misc_feature: MA Experiment 20001557 PARAMETER Experiment Name: At_Drought_Soil_Dry_P Parameter: Post Timepoint (hr) Value: 3
  misc_feature: MA Experiment 20001557 PARAMETER Experiment Name: At_Drought_Soil_Dry_P Parameter: Post-Treatment Value: Re-Water vs. No Drought
  misc_feature: MA Experiment 20001557 PARAMETER Experiment Name: At_Drought_Soil_Dry_P Parameter: Timepoint (day) Value: 13
  misc_feature: MA Experiment 20001557 PARAMETER Experiment Name: At_Drought_Soil_Dry_P Parameter: Treatment Value: Drought vs. No Drought
  misc_feature: MA Experiment ID: 20001558 Result: Down-regulated in Transcription
  misc_feature: MA Experiment 20001558 PARAMETER Experiment Name: At_Drought_Soil_Dry_P Parameter: Age (day) Value: 27
  misc_feature: MA Experiment 20001558 PARAMETER Experiment Name: At_Drought_Soil_Dry_P Parameter: Organism Value: A. thaliana
  misc_feature: MA Experiment 20001558 PARAMETER Experiment Name: At_Drought_Soil_Dry_P Parameter: Plant Line Value: WS
  misc_feature: MA Experiment 20001558 PARAMETER Experiment Name: At_Drought_Soil_Dry_P Parameter: Post Timepoint (hr) Value: 6
  misc_feature: MA Experiment 20001558 PARAMETER Experiment Name: At_Drought_Soil_Dry_P Parameter: Post-Treatment Value: Re-Water vs. No Drought
  misc_feature: MA Experiment 20001558 PARAMETER Experiment Name: At_Drought_Soil_Dry_P Parameter: Timepoint (day) Value: 13
  misc_feature: MA Experiment 20001558 PARAMETER Experiment Name: At_Drought_Soil_Dry_P Parameter: Treatment Value: Drought vs. No Drought

SEQ ID NO: 92034 - protein, 318 aa, Arabidopsis thaliana; identical to SEQ ID NO: 40384
  peptide (1)..(318): Ceres Seq. ID no. 12707090
  misc_feature (6)..(292): Pfam Name: NAD dependent epimerase/dehydratase family Pfam Description: NAD dependent epimerase/dehydratase family
  misc_feature (1)..(318): Homolog of NCBI NO: 15226955 NR Description: putative cinnamoyl-CoA reductase; protein id:
  misc_feature (6)..(318): Homolog of NCBI NO: 34906124 NR Description: putative cinnamoyl-CoA reductase [Oryza sativa
  misc_feature (3)..(318): Homolog of NCBI NO: 15237678 NR Description: cinnamoyl-CoA reductase - like protein; protein At5g58490.1, supported by cDNA: 30064., supported by cDNA:
  misc_feature (4)..(318): Homolog of NCBI NO: 28876000 NR Description: putative cinnamoyl-CoA reductase [Oryza sativa
  misc_feature (6)..(318): Homolog of NCBI NO: 34907928 NR Description: putative cinnamoyl CoA reductase [Oryza sativa
  misc_feature (4)..(318): Homolog of NCBI NO: 9998901 NR Description: cinnamoyl-CoA reductase [Populus balsamifera
  misc_feature (4)..(318): Homolog of NCBI NO: 40233135 NR Description: cinnamoyl CoA reductase [Populus tomentosa]
  misc_feature (4)..(318): Homolog of NCBI NO: 2960364 NR Description: cinnamoyl CoA reductase [Populus balsamifera
  misc_feature (4)..(318): Homolog of NCBI NO: 7431407 NR Description: cinnamoyl-CoA reductase (EC 1.2.1.44) CCR - cider
  misc_feature (3)..(318): Homolog of NCBI NO: 25405464 NR Description: hypothetical protein F5D21.12 [imported] - thaliana >gi|12325359|gb|AAG52618.1|AC024261_5 cinnamyl alcohol

SEQ ID NO: 92035 - DNA, 1045 bp, Arabidopsis thaliana; identical to SEQ ID NO: 88279
  misc_feature (1)..(1045): Ceres Seq. ID no. 12707216
  misc_feature: MA Experiment ID: 108462 Result: Up-regulated in Transcription
  misc_feature: MA Experiment 108462 PARAMETER Experiment Name: At_Germinating_Seeds_cDNA_P Parameter: Age (day) Value: 2 vs. 0
  misc_feature: MA Experiment 108462 PARAMETER Experiment Name: At_Germinating_Seeds_cDNA_P Parameter: Tissue Value: Germinating Seeds
  misc_feature: MA Experiment ID: 108463 Result: Up-regulated in Transcription
  misc_feature: MA Experiment 108463 PARAMETER Experiment Name: At_Germinating_Seeds_cDNA_P Parameter: Age (day) Value: 3 vs. 0
  misc_feature: MA Experiment 108463 PARAMETER Experiment Name: At_Germinating_Seeds_cDNA_P Parameter: Tissue Value: Germinating Seeds
  misc_feature: MA Experiment ID: 108464 Result: Up-regulated in Transcription
  misc_feature: MA Experiment 108464 PARAMETER Experiment Name: At_Germinating_Seeds_cDNA_P Parameter: Age (day) Value: 4 vs. 0
  misc_feature: MA Experiment 108464 PARAMETER Experiment Name: At_Germinating_Seeds_cDNA_P Parameter: Tissue Value: Germinating Seeds
  misc_feature: MA Experiment ID: 108469 Result: Down-regulated in Transcription
  misc_feature: MA Experiment ID: 108473 Result: Down-regulated in Transcription
  misc_feature: MA Experiment 108473 PARAMETER Experiment Name: At_Drought_Flowers_cDNA_P Parameter: Timepoint (hr) Value: 7 d
  misc_feature: MA Experiment 108473 PARAMETER Experiment Name: At_Drought_Flowers_cDNA_P Parameter: Tissue Value: Flower
  misc_feature: MA Experiment 108473 PARAMETER Experiment Name: At_Drought_Flowers_cDNA_P Parameter: Treatment Value: Drought vs. No Drought
  misc_feature: MA Experiment ID: 108488 Result: Down-regulated in Transcription
  misc_feature: MA Experiment ID: 108501 Result: Down-regulated in Transcription
  misc_feature: MA Experiment 108501 PARAMETER Experiment Name: At_ap2_floral_buds_cDNA_P Parameter: Plant Line Value: ap2 (Ler.)
  misc_feature: MA Experiment 108501 PARAMETER Experiment Name: At_ap2_floral_buds_cDNA_P Parameter: Tissue Value: Closed Flower
  misc_feature: MA Experiment ID: 108569 Result: Up-regulated in Transcription
  misc_feature: MA Experiment 108569 PARAMETER Experiment Name: At_0.001%_MeJA__cDNA_P Parameter: Timepoint (hr) Value: 6
  misc_feature: MA Experiment 108569 PARAMETER Experiment Name: At_0.001%_MeJA__cDNA_P Parameter: Tissue Value: Aerial
  misc_feature: MA Experiment 108569 PARAMETER Experiment Name: At_0.001%_MeJA__cDNA_P Parameter: Treatment Value: 0.001% MeJA vs. No Treatment
  misc_feature: MA Experiment ID: 108572 Result: Up-regulated in Transcription
  misc_feature: MA Experiment 108572 PARAMETER Experiment Name: At_Drought_cDNA_P Parameter: Timepoint (hr) Value: 1
  misc_feature: MA Experiment 108572 PARAMETER Experiment Name: At_Drought_cDNA_P Parameter: Tissue Value: Aerial
  misc_feature: MA Experiment 108572 PARAMETER Experiment Name: At_Drought_cDNA_P Parameter: Treatment Value: Drought vs. No Drought
  misc_feature: MA Experiment ID: 108573 Result: Up-regulated in Transcription
  misc_feature: MA Experiment 108573 PARAMETER Experiment Name: At_Drought_cDNA_P Parameter: Timepoint (hr) Value: 6
  misc_feature: MA Experiment 108573 PARAMETER Experiment Name: At_Drought_cDNA_P Parameter: Tissue Value: Aerial
  misc_feature: MA Experiment 108573 PARAMETER Experiment Name: At_Drought_cDNA_P Parameter: Treatment Value: Drought vs. No Drought
  misc_feature: MA Experiment ID: 108574 Result: Up-regulated in Transcription
  misc_feature: MA Experiment 108574 PARAMETER Experiment Name: At_Wounding__cDNA_P Parameter: Timepoint (hr) Value: 1
  misc_feature: MA Experiment 108574 PARAMETER Experiment Name: At_Wounding__cDNA_P Parameter: Tissue Value: Aerial
  misc_feature: MA Experiment 108574 PARAMETER Experiment Name: At_Wounding__cDNA_P Parameter: Treatment Value: Wounding vs. No Wounding
  misc_feature: MA Experiment ID: 108585 Result: Up-regulated in Transcription
  misc_feature: MA Experiment 108585 PARAMETER Experiment Name: At_5mM_NaNP_cDNA_P Parameter: Timepoint (hr) Value: 6
  misc_feature: MA Experiment 108585 PARAMETER Experiment Name: At_5mM_NaNP_cDNA_P Parameter: Tissue Value: Aerial
  misc_feature: MA Experiment 108585 PARAMETER Experiment Name: At_5mM_NaNP_cDNA_P Parameter: Treatment Value: null
  misc_feature: MA Experiment ID: 108594 Result: Up-regulated in Transcription
  misc_feature: MA Experiment 108594 PARAMETER Experiment Name: At_Ler-rhl_Root_cDNA_P Parameter: Plant Line Value: null
  misc_feature: MA Experiment ID: 108595 Result: Up-regulated in Transcription
  misc_feature: MA Experiment 108595 PARAMETER Experiment Name: At_Ler-pi_Ovule_cDNA_P Parameter: Plant Line Value: null
  misc_feature: MA Experiment ID: 108605 Result: Up-regulated in Transcription
  misc_feature: MA Experiment 108605 PARAMETER Experiment Name: At_100uM_ABA_cDNA_P Parameter: Timepoint (hr) Value: 6
  misc_feature: MA Experiment 108605 PARAMETER Experiment Name: At_100uM_ABA_cDNA_P Parameter: Tissue Value: Aerial
  misc_feature: MA Experiment 108605 PARAMETER Experiment Name: At_100uM_ABA_cDNA_P Parameter: Treatment Value: 100uM ABA vs. No Treatment
  misc_feature: MA Experiment ID: 108607 Result: Up-regulated in Transcription
  misc_feature: MA Experiment 108607 PARAMETER Experiment Name: At_100uM_ABA_cDNA_P Parameter: Timepoint (hr) Value: 4
  misc_feature: MA Experiment 108607 PARAMETER Experiment Name: At_100uM_ABA_cDNA_P Parameter: Tissue Value: Aerial
  misc_feature: MA Experiment 108607 PARAMETER Experiment Name: At_100uM_ABA_cDNA_P Parameter: Treatment Value: 100uM ABA vs. No Treatment
  misc_feature: MA Experiment ID: 108608 Result: Up-regulated in Transcription
  misc_feature: MA Experiment 108608 PARAMETER Experiment Name: At_100uM_ABA_cDNA_P Parameter: Timepoint (hr) Value: 1
  misc_feature: MA Experiment 108608 PARAMETER Experiment Name: At_100uM_ABA_cDNA_P Parameter: Tissue Value: Aerial
  misc_feature: MA Experiment 108608 PARAMETER Experiment Name: At_100uM_ABA_cDNA_P Parameter: Treatment Value: 100uM ABA vs. No Treatment
  misc_feature: MA Experiment ID: 108609 Result: Up-regulated in Transcription
  misc_feature: MA Experiment 108609 PARAMETER Experiment Name: At_100uM_ABA_cDNA_P Parameter: Timepoint (hr) Value: 24
  misc_feature: MA Experiment 108609 PARAMETER Experiment Name: At_100uM_ABA_cDNA_P Parameter: Tissue Value: Aerial
  misc_feature: MA Experiment 108609 PARAMETER Experiment Name: At_100uM_ABA_cDNA_P Parameter: Treatment Value: 100uM ABA vs. No Treatment
  misc_feature: MA Experiment ID: 20000030 Result: Down-regulated in Transcription
  misc_feature: MA Experiment 20000030 PARAMETER Experiment Name: At_CS6630_Roots_cDNA_P Parameter: Plant Line Value: CS6630 vs. WS
  misc_feature: MA Experiment 20000030 PARAMETER Experiment Name: At_CS6630_Roots_cDNA_P Parameter: Tissue Value: Roots
  misc_feature: MA Experiment ID: 20000068 Result: Up-regulated in Transcription
  misc_feature: MA Experiment ID: 20000069 Result: Up-regulated in Transcription
  misc_feature: MA Experiment 20000069 PARAMETER Experiment Name: At_100uM_ABA_Mutants_cDNA_P Parameter: Plant Line Value: CS23
  misc_feature: MA Experiment 20000069 PARAMETER Experiment Name: At_100uM_ABA_Mutants_cDNA_P Parameter: Timepoint (hr) Value: 6
  misc_feature: MA Experiment 20000069 PARAMETER Experiment Name: At_100uM_ABA_Mutants_cDNA_P Parameter: Tissue Value: Aerial
  misc_feature: MA Experiment 20000069 PARAMETER Experiment Name: At_100uM_ABA_Mutants_cDNA_P Parameter: Treatment Value: 100uM ABA vs. No Treatment
  misc_feature: MA Experiment ID: 20000070 Result: Up-regulated in Transcription
  misc_feature: MA Experiment 20000070 PARAMETER Experiment Name: At_100uM_ABA_Mutants_cDNA_P Parameter: Plant Line Value: CS24
  misc_feature: MA Experiment 20000070 PARAMETER Experiment Name: At_100uM_ABA_Mutants_cDNA_P Parameter: Timepoint (hr) Value: 6
  misc_feature: MA Experiment 20000070 PARAMETER Experiment Name: At_100uM_ABA_Mutants_cDNA_P Parameter: Tissue Value: Aerial
  misc_feature: MA Experiment 20000070 PARAMETER Experiment Name: At_100uM_ABA_Mutants_cDNA_P Parameter: Treatment Value: 100uM ABA vs. No Treatment
  misc_feature: MA Experiment ID: 20000071 Result: Up-regulated in Transcription
  misc_feature: MA Experiment 20000071 PARAMETER Experiment Name: At_100uM_ABA_Mutants_cDNA_P Parameter: Plant Line Value: CS8104
  misc_feature: MA Experiment 20000071 PARAMETER Experiment Name: At_100uM_ABA_Mutants_cDNA_P Parameter: Timepoint (hr) Value: 6
  misc_feature: MA Experiment 20000071 PARAMETER Experiment Name: At_100uM_ABA_Mutants_cDNA_P Parameter: Tissue Value: Aerial
  misc_feature: MA Experiment 20000071 PARAMETER Experiment Name: At_100uM_ABA_Mutants_cDNA_P Parameter: Treatment Value: 100uM ABA vs. No Treatment
  misc_feature: MA Experiment ID: 20000072 Result: Up-regulated in Transcription
  misc_feature: MA Experiment 20000072 PARAMETER Experiment Name: At_100uM_ABA_Mutants_cDNA_P Parameter: Plant Line Value: CS8105
  misc_feature: MA Experiment 20000072 PARAMETER Experiment Name: At_100uM_ABA_Mutants_cDNA_P Parameter: Timepoint (hr) Value: 6
  misc_feature: MA Experiment 20000072 PARAMETER Experiment Name: At_100uM_ABA_Mutants_cDNA_P Parameter: Tissue Value: Aerial
  misc_feature: MA Experiment 20000072 PARAMETER Experiment Name: At_100uM_ABA_Mutants_cDNA_P Parameter: Treatment Value: 100uM ABA vs. No Treatment
  misc_feature: MA Experiment ID: 20000086 Result: Up-regulated in Transcription
  misc_feature: MA Experiment 20000086 PARAMETER Experiment Name: At_100uM_ABA_Mutants_cDNA_P Parameter: Plant Line Value: CS22
  misc_feature: MA Experiment 20000086 PARAMETER Experiment Name: At_100uM_ABA_Mutants_cDNA_P Parameter: Timepoint (hr) Value: 6
  misc_feature: MA Experiment 20000086 PARAMETER Experiment Name: At_100uM_ABA_Mutants_cDNA_P Parameter: Tissue Value: Aerial
  misc_feature: MA Experiment 20000086 PARAMETER Experiment Name: At_100uM_ABA_Mutants_cDNA_P Parameter: Treatment Value: 100uM ABA vs. No Treatment
  misc_feature: MA Experiment ID: 20000087 Result: Up-regulated in Transcription
  misc_feature: MA Experiment 20000087 PARAMETER Experiment Name: At_100uM_ABA_Mutants_cDNA_P Parameter: Plant Line Value: WS
  misc_feature: MA Experiment 20000087 PARAMETER Experiment Name: At_100uM_ABA_Mutants_cDNA_P Parameter: Timepoint (hr) Value: 6
  misc_feature: MA Experiment 20000087 PARAMETER Experiment Name: At_100uM_ABA_Mutants_cDNA_P Parameter: Tissue Value: Aerial
  misc_feature: MA Experiment 20000087 PARAMETER Experiment Name: At_100uM_ABA_Mutants_cDNA_P Parameter: Treatment Value: 100uM ABA vs. No Treatment
  misc_feature: MA Experiment ID: 20000088 Result: Up-regulated in Transcription
  misc_feature: MA Experiment 20000088 PARAMETER Experiment Name: At_100uM_ABA_Mutants_cDNA_P Parameter: Plant Line Value: Landsberg
  misc_feature: MA Experiment 20000088 PARAMETER Experiment Name: At_100uM_ABA_Mutants_cDNA_P Parameter: Timepoint (hr) Value: 6
  misc_feature: MA Experiment 20000088 PARAMETER Experiment Name: At_100uM_ABA_Mutants_cDNA_P Parameter: Tissue Value: Aerial
  misc_feature: MA Experiment 20000088 PARAMETER Experiment Name: At_100uM_ABA_Mutants_cDNA_P Parameter: Treatment Value: 100uM ABA vs. No Treatment
  misc_feature: MA Experiment ID: 20000090 Result: Up-regulated in Transcription
  misc_feature: MA Experiment ID: 20000112 Result: Down-regulated in Transcription
  misc_feature: MA Experiment 20000112 PARAMETER Experiment Name: At_42deg_Heat_cDNA_P Parameter: Temperature (deg C) Value: 42 vs. 22
  misc_feature: MA Experiment 20000112 PARAMETER Experiment Name: At_42deg_Heat_cDNA_P Parameter: Timepoint (hr) Value: 2
  misc_feature: MA Experiment 20000112 PARAMETER Experiment Name: At_42deg_Heat_cDNA_P Parameter: Tissue Value: Aerial
  misc_feature: MA Experiment ID: 20000113 Result: Down-regulated in Transcription
  misc_feature: MA Experiment 20000113 PARAMETER Experiment Name: At_42deg_Heat_cDNA_P Parameter: Temperature (deg C) Value: 42 vs. 22
  misc_feature: MA Experiment 20000113 PARAMETER Experiment Name: At_42deg_Heat_cDNA_P Parameter: Timepoint (hr) Value: 8
  misc_feature: MA Experiment 20000113 PARAMETER Experiment Name: At_42deg_Heat_cDNA_P Parameter: Tissue Value: Aerial
  misc_feature: MA Experiment ID: 20000169 Result: Up-regulated in Transcription
  misc_feature: MA Experiment 20000169 PARAMETER Experiment Name: At_100uM_ABA_P Parameter: Age (day) Value: 14
  misc_feature: MA Experiment 20000169 PARAMETER Experiment Name: At_100uM_ABA_P Parameter: Organism Value: A. thaliana
  misc_feature: MA Experiment 20000169 PARAMETER Experiment Name: At_100uM_ABA_P Parameter: Plant Line Value: WS
  misc_feature: MA Experiment 20000169 PARAMETER Experiment Name: At_100uM_ABA_P Parameter: Timepoint (hr) Value: 6
  misc_feature: MA Experiment 20000169 PARAMETER Experiment Name: At_100uM_ABA_P Parameter: Tissue Value: Aerial
  misc_feature: MA Experiment 20000169 PARAMETER Experiment Name: At_100uM_ABA_P Parameter: Treatment Value: 100uM ABA vs. No Treatment
  misc_feature: MA Experiment ID: 20000180 Result: Up-regulated in Transcription
  misc_feature: MA Experiment 20000180 PARAMETER Experiment Name: At_Germinating_Seeds_P Parameter: Age (hr) Value: 24 vs. 0
  misc_feature: MA Experiment 20000180 PARAMETER Experiment Name: At_Germinating_Seeds_P Parameter: Tissue Value: Germinating Seeds
  misc_feature: MA Experiment ID: 20000224 Result: Up-regulated in Transcription
  misc_feature: MA Experiment ID: 20000234 Result: Up-regulated in Transcription
  misc_feature: MA Experiment 20000234 PARAMETER Experiment Name: At_Siliques_P Parameter: Age (day) Value: 21
  misc_feature: MA Experiment 20000234 PARAMETER Experiment Name: At_Siliques_P Parameter: Organism Value: A. thaliana
  misc_feature: MA Experiment 20000234 PARAMETER Experiment Name: At_Siliques_P Parameter: Plant Line Value: WS
  misc_feature: MA Experiment 20000234 PARAMETER Experiment Name: At_Siliques_P Parameter: Tissue Value: Less Than 5mm Siliques vs. Whole Plant
  misc_feature: MA Experiment ID: 20000264 Result: Up-regulated in Transcription
  misc_feature: MA Experiment 20000264 PARAMETER Experiment Name: At_Open_Flower_P Parameter: Age (day) Value: 21
  misc_feature: MA Experiment 20000264 PARAMETER Experiment Name: At_Open_Flower_P Parameter: Plant Line Value: WS
  misc_feature: MA Experiment 20000264 PARAMETER Experiment Name: At_Open_Flower_P Parameter: Tissue Value: Open Flower vs. Whole Plant
  misc_feature: MA Experiment ID: 20000265 Result: Up-regulated in Transcription
  misc_feature: MA Experiment 20000265 PARAMETER Experiment Name: At_Open_Flower_P Parameter: Age (day) Value: 21
  misc_feature: MA Experiment 20000265 PARAMETER Experiment Name: At_Open_Flower_P Parameter: Plant Line Value: WS
  misc_feature: MA Experiment 20000265 PARAMETER Experiment Name: At_Open_Flower_P Parameter: Tissue Value: Closed Flower vs. Whole Plant
  misc_feature: MA Experiment ID: 20000267 Result: Up-regulated in Transcription
  misc_feature: MA Experiment 20000267 PARAMETER Experiment Name: At_Drought_P Parameter: Age (day) Value: 7
  misc_feature: MA Experiment 20000267 PARAMETER Experiment Name: At_Drought_P Parameter: Organism Value: A. thaliana
  misc_feature: MA Experiment 20000267 PARAMETER Experiment Name: At_Drought_P Parameter: Plant Line Value: WS
  misc_feature: MA Experiment 20000267 PARAMETER Experiment Name: At_Drought_P Parameter: Timepoint (hr) Value: 6
  misc_feature: MA Experiment 20000267 PARAMETER Experiment Name: At_Drought_P Parameter: Tissue Value: Whole Plant
  misc_feature: MA Experiment 20000267 PARAMETER Experiment Name: At_Drought_P Parameter: Treatment Value: Drought vs. No Drought
  misc_feature: MA Experiment ID: 20000268 Result: Up-regulated in Transcription
  misc_feature: MA Experiment 20000268 PARAMETER Experiment Name: At_100mM_NaCl__P Parameter: Age (day) Value: 14
  misc_feature: MA Experiment 20000268 PARAMETER Experiment Name: At_100mM_NaCl__P Parameter: Organism Value: A. thaliana
  misc_feature: MA Experiment 20000268 PARAMETER Experiment Name: At_100mM_NaCl__P Parameter: Plant Line Value: WS
  misc_feature: MA Experiment 20000268 PARAMETER Experiment Name: At_100mM_NaCl__P Parameter: Timepoint (hr) Value: 6
  misc_feature: MA Experiment 20000268 PARAMETER Experiment Name: At_100mM_NaCl__P Parameter: Tissue Value: Whole Plant
  misc_feature: MA Experiment 20000268 PARAMETER Experiment Name: At_100mM_NaCl__P Parameter: Treatment Value: 100mM NaCl vs. No Treatment
  misc_feature: MA Experiment ID: 20000269 Result: Up-regulated in Transcription
  misc_feature: MA Experiment 20000269 PARAMETER Experiment Name: At_1mM_KNO3_L-vs-H_Roots_P Parameter: Age (day) Value: 7,10,12
  misc_feature: MA Experiment 20000269 PARAMETER Experiment Name: At_1mM_KNO3_L-vs-H_Roots_P Parameter: Organism Value: A. thaliana
  misc_feature: MA Experiment 20000269 PARAMETER Experiment Name: At_1mM_KNO3_L-vs-H_Roots_P Parameter: Plant Line Value: WS
  misc_feature: MA Experiment 20000269 PARAMETER Experiment Name: At_1mM_KNO3_L-vs-H_Roots_P Parameter: Timepoint (day) Value: 7,10,12
  misc_feature: MA Experiment 20000269 PARAMETER Experiment Name: At_1mM_KNO3_L-vs-H_Roots_P Parameter: Tissue Value: Roots
  misc_feature: MA Experiment 20000269 PARAMETER Experiment Name: At_1mM_KNO3_L-vs-H_Roots_P Parameter: Treatment Value: 1mM KNO3 vs. 50mM KNO3
  misc_feature: MA Experiment ID: 20000286 Result: Up-regulated in Transcription
  misc_feature: MA Experiment 20000286 PARAMETER Experiment Name: At_Open_Flower_P Parameter: Age (day) Value: 21
  misc_feature: MA Experiment 20000286 PARAMETER Experiment Name: At_Open_Flower_P Parameter: Plant Line Value: WS
  misc_feature: MA Experiment 20000286 PARAMETER Experiment Name: At_Open_Flower_P Parameter: Tissue Value: Half Open vs. Whole Plant
  misc_feature: MA Experiment ID: 20000308 Result: Up-regulated in Transcription
  misc_feature: MA Experiment 20000308 PARAMETER Experiment Name: At_100mM_NaCl__P Parameter: Age (day) Value: 17
  misc_feature: MA Experiment 20000308 PARAMETER Experiment Name: At_100mM_NaCl__P Parameter: Organism Value: A. thaliana
  misc_feature: MA Experiment 20000308 PARAMETER Experiment Name: At_100mM_NaCl__P Parameter: Plant Line Value: WS
  misc_feature: MA Experiment 20000308 PARAMETER Experiment Name: At_100mM_NaCl__P Parameter: Timepoint (hr) Value: 72
  misc_feature: MA Experiment 20000308 PARAMETER Experiment Name: At_100mM_NaCl__P Parameter: Tissue Value: Whole Plant
  misc_feature: MA Experiment 20000308 PARAMETER Experiment Name: At_100mM_NaCl__P Parameter: Treatment Value: 100mM NaCl vs. No Treatment
  misc_feature: MA Experiment ID: 20000436 Result: Up-regulated in Transcription
  misc_feature: MA Experiment 20000436 PARAMETER Experiment Name: At_Drought_P Parameter: Age (day) Value: 7
  misc_feature: MA Experiment 20000436 PARAMETER Experiment Name: At_Drought_P Parameter: Organism Value: A. thaliana
  misc_feature: MA Experiment 20000436 PARAMETER Experiment Name: At_Drought_P Parameter: Plant Line Value: WS
  misc_feature: MA Experiment 20000436 PARAMETER Experiment Name: At_Drought_P Parameter: Timepoint (hr) Value: 12
  misc_feature: MA Experiment 20000436 PARAMETER Experiment Name: At_Drought_P Parameter: Tissue Value: Whole Plant
  misc_feature: MA Experiment 20000436 PARAMETER Experiment Name: At_Drought_P Parameter: Treatment Value: Drought vs. No Drought
  misc_feature: MA Experiment ID: 20000438 Result: Down-regulated in Transcription
  misc_feature: MA Experiment 20000438 PARAMETER Experiment Name: At_Shoots__P Parameter: Age (day) Value: 14
  misc_feature: MA Experiment 20000438 PARAMETER Experiment Name: At_Shoots__P Parameter: Tissue Value: Shoots vs. Whole Plant
  misc_feature: MA Experiment ID: 20000453 Result: Up-regulated in Transcription
  misc_feature: MA Experiment 20000453 PARAMETER Experiment Name: At_100uM_ABA_P Parameter: Age (day) Value: 15
  misc_feature: MA Experiment 20000453 PARAMETER Experiment Name: At_100uM_ABA_P Parameter: Organism Value: A. thaliana
  misc_feature: MA Experiment 20000453 PARAMETER Experiment Name: At_100uM_ABA_P Parameter: Plant Line Value: WS
  misc_feature: MA Experiment 20000453 PARAMETER Experiment Name: At_100uM_ABA_P Parameter: Timepoint (hr) Value: 24
  misc_feature: MA Experiment 20000453 PARAMETER Experiment Name: At_100uM_ABA_P Parameter: Tissue Value: Aerial
  misc_feature: MA Experiment 20000453 PARAMETER Experiment Name: At_100uM_ABA_P Parameter: Treatment Value: 100uM ABA vs. No Treatment
  misc_feature: MA Experiment ID: 20000456 Result: Up-regulated in Transcription
  misc_feature: MA Experiment 20000456 PARAMETER Experiment Name: At_100uM_BA_P Parameter: Age (day) Value: 14
  misc_feature: MA Experiment 20000456 PARAMETER Experiment Name: At_100uM_BA_P Parameter: Organism Value: A. thaliana
  misc_feature: MA Experiment 20000456 PARAMETER Experiment Name: At_100uM_BA_P Parameter: Plant Line Value: WS
  misc_feature: MA Experiment 20000456 PARAMETER Experiment Name: At_100uM_BA_P Parameter: Timepoint (hr) Value: 6
  misc_feature: MA Experiment 20000456 PARAMETER Experiment Name: At_100uM_BA_P Parameter: Tissue Value: Aerial
  misc_feature: MA Experiment 20000456 PARAMETER Experiment Name: At_100uM_BA_P Parameter: Treatment Value: 100uM BA vs. No Treatment
  misc_feature: MA Experiment ID: 20000495 Result: Down-regulated in Transcription
  misc_feature: MA Experiment 20000495 PARAMETER Experiment Name: At_Guard_Cells_P Parameter: Harvest Date Value: 8/2/2002
  misc_feature: MA Experiment 20000495 PARAMETER Experiment Name: At_Guard_Cells_P Parameter: Organism Value: A. thaliana
  misc_feature: MA Experiment 20000495 PARAMETER Experiment Name: At_Guard_Cells_P Parameter: Tissue Value: Guard Cells vs. Leaves
  misc_feature: MA Experiment ID: 20000506 Result: Up-regulated in Transcription
  misc_feature: MA Experiment 20000506 PARAMETER Experiment Name: At_Wounding_P Parameter: Organism Value: A. thaliana
  misc_feature: MA Experiment 20000506 PARAMETER Experiment Name: At_Wounding_P Parameter: Plant Line Value: WS
  misc_feature: MA Experiment 20000506 PARAMETER Experiment Name: At_Wounding_P Parameter: Timepoint (hr) Value: 6
  misc_feature: MA Experiment 20000506 PARAMETER Experiment Name: At_Wounding_P Parameter: Tissue Value: Aerial
  misc_feature: MA Experiment 20000506 PARAMETER Experiment Name: At_Wounding_P Parameter: Treatment Value: Wounding vs. No Wounding
  misc_feature: MA Experiment ID: 20000527 Result: Down-regulated in Transcription
  misc_feature: MA Experiment 20000527 PARAMETER Experiment Name: At_10percent_PEG_P Parameter: Age (day) Value: 20
  misc_feature: MA Experiment 20000527 PARAMETER Experiment Name: At_10percent_PEG_P Parameter: Organism Value: A. thaliana
  misc_feature: MA Experiment 20000527 PARAMETER Experiment Name: At_10percent_PEG_P Parameter: Plant Line Value: WS
  misc_feature: MA Experiment 20000527 PARAMETER Experiment Name: At_10percent_PEG_P Parameter: Timepoint (day) Value: 20
  misc_feature: MA Experiment 20000527 PARAMETER Experiment Name: At_10percent_PEG_P Parameter: Tissue Value: Whole Plant
  misc_feature: MA Experiment 20000527 PARAMETER Experiment Name: At_10percent_PEG_P Parameter: Treatment Value: 10percent PEG vs. No Treatment
  misc_feature: MA Experiment ID: 20000794 Result: Up-regulated in Transcription
  misc_feature: MA Experiment 20000794 PARAMETER Experiment Name: At_Petals_P Parameter: Age (day) Value: 23-25 days
  misc_feature: MA Experiment 20000794 PARAMETER Experiment Name: At_Petals_P Parameter: Plant Line Value: WS
  misc_feature: MA Experiment 20000794 PARAMETER Experiment Name: At_Petals_P Parameter: Tissue Value: Petals vs. Whole plant
  misc_feature: MA Experiment ID: 20001450 Result: Down-regulated in Transcription
  misc_feature: MA Experiment 20001450 PARAMETER Experiment Name: At_Far-red-induction_P Parameter: Age (day) Value: 7
  misc_feature: MA Experiment 20001450 PARAMETER Experiment Name: At_Far-red-induction_P Parameter: Light Value: Far-red vs. White
  misc_feature: MA Experiment 20001450 PARAMETER Experiment Name: At_Far-red-induction_P Parameter: Organism Value: A. thaliana
  misc_feature: MA Experiment 20001450 PARAMETER Experiment Name: At_Far-red-induction_P Parameter: Plant Line Value: Columbia
  misc_feature: MA Experiment 20001450 PARAMETER Experiment Name: At_Far-red-induction_P Parameter: Timepoint (hr) Value: 8
  misc_feature: MA Experiment 20001450 PARAMETER Experiment Name: At_Far-red-induction_P Parameter: Tissue Value: Whole Plant
  misc_feature: MA Experiment ID: 20001558 Result: Down-regulated in Transcription
  misc_feature: MA Experiment 20001558 PARAMETER Experiment Name: At_Drought_Soil_Dry_P Parameter: Age (day) Value: 27
  misc_feature: MA Experiment 20001558 PARAMETER Experiment Name: At_Drought_Soil_Dry_P Parameter: Organism Value: A. thaliana
  misc_feature: MA Experiment 20001558 PARAMETER Experiment Name: At_Drought_Soil_Dry_P Parameter: Plant Line Value: WS
  misc_feature: MA Experiment 20001558 PARAMETER Experiment Name: At_Drought_Soil_Dry_P Parameter: Post Timepoint (hr) Value: 6
  misc_feature: MA Experiment 20001558 PARAMETER Experiment Name: At_Drought_Soil_Dry_P Parameter: Post-Treatment Value: Re-Water vs. No Drought
  misc_feature: MA Experiment 20001558 PARAMETER Experiment Name: At_Drought_Soil_Dry_P Parameter: Timepoint (day) Value: 13
  misc_feature: MA Experiment 20001558 PARAMETER Experiment Name: At_Drought_Soil_Dry_P Parameter: Treatment Value: Drought vs. No Drought
  misc_feature: MA Experiment ID: 20001769 Result: Up-regulated in Transcription
  misc_feature: MA Experiment 20001769 PARAMETER Experiment Name: At_Far-red-enriched-adult_P Parameter: Age (day) Value: 28
  misc_feature: MA Experiment 20001769 PARAMETER Experiment Name: At_Far-red-enriched-adult_P Parameter: Light Value: Far-red enriched vs. White
  misc_feature: MA Experiment 20001769 PARAMETER Experiment Name: At_Far-red-enriched-adult_P Parameter: Organism Value: A. thaliana
  misc_feature: MA Experiment 20001769 PARAMETER Experiment Name: At_Far-red-enriched-adult_P Parameter: Plant Line Value: Columbia
  misc_feature: MA Experiment 20001769 PARAMETER Experiment Name: At_Far-red-enriched-adult_P Parameter: Timepoint (hr) Value: 4
  misc_feature: MA Experiment 20001769 PARAMETER Experiment Name: At_Far-red-enriched-adult_P Parameter: Tissue Value: Aerial
  misc_feature: MA Experiment ID: 20001906 Result: Up-regulated in Transcription
  misc_feature: MA Experiment 20001906 PARAMETER Experiment Name: At_Drought_Reproduction_P Parameter: Age (day) Value: 35
  misc_feature: MA Experiment 20001906 PARAMETER Experiment Name: At_Drought_Reproduction_P Parameter: Organism Value: A. thaliana
  misc_feature: MA Experiment 20001906 PARAMETER Experiment Name: At_Drought_Reproduction_P Parameter: Plant Line Value: WS
  misc_feature: MA Experiment 20001906 PARAMETER Experiment Name: At_Drought_Reproduction_P Parameter: Timepoint (day) Value: 5
  misc_feature: MA Experiment 20001906 PARAMETER Experiment Name: At_Drought_Reproduction_P Parameter: Tissue Value: Siliques
  misc_feature: MA Experiment 20001906 PARAMETER Experiment Name: At_Drought_Reproduction_P Parameter: Treatment Value: Drought vs. No Drought
  misc_feature: MA Experiment ID: 20001908 Result: Up-regulated in Transcription
  misc_feature: MA Experiment 20001908 PARAMETER Experiment Name: At_Drought_Reproduction_P Parameter: Age (day) Value: 40
  misc_feature: MA Experiment 20001908 PARAMETER Experiment Name: At_Drought_Reproduction_P Parameter: Organism Value: A. thaliana
  misc_feature: MA Experiment 20001908 PARAMETER Experiment Name: At_Drought_Reproduction_P Parameter: Plant Line Value: WS
  misc_feature: MA Experiment 20001908 PARAMETER Experiment Name: At_Drought_Reproduction_P Parameter: Timepoint (day) Value: 10
  misc_feature: MA Experiment 20001908 PARAMETER Experiment Name: At_Drought_Reproduction_P Parameter: Tissue Value: Siliques
  misc_feature: MA Experiment 20001908 PARAMETER Experiment Name: At_Drought_Reproduction_P Parameter: Treatment Value: Drought vs. No Drought

SEQ ID NO: 92036 - protein, 230 aa, Arabidopsis thaliana; identical to SEQ ID NO: 36323
  peptide (1)..(230): Ceres Seq. ID no. 12707217
  misc_feature (30)..(219): Pfam Name: Ribonuclease T2 family Pfam Description: Ribonuclease T2 family
  misc_feature (1)..(230): Homolog of NCBI NO: 15227068 NR Description: ribonuclease, RNS1; protein id: At2g02990.1, by cDNA: 27242., supported by cDNA: gi_18252956, supported by gi_561997 [Arabidopsis thaliana] >gi|1173103|sp|P42813|RNS1_ARATH
  misc_feature (1)..(230): Homolog of NCBI NO: 21555182 NR Description: ribonuclease, RNS1 [Arabidopsis thaliana]
  misc_feature (10)..(230): Homolog of NCBI NO: 3860325 NR Description: ribonuclease T2 [Cicer arietinum]
  misc_feature (7)..(230): Homolog of NCBI NO: 9081845 NR Description: S-like ribonuclease [Prunus dulcis]
  misc_feature (6)..(230): Homolog of NCBI NO: 1710615 NR Description: Extracellular ribonuclease LE precursor (RNase LE)
  misc_feature (10)..(230): Homolog of NCBI NO: 532754 NR Description: RNase NE [Nicotiana alata]
  misc_feature (10)..(230): Homolog of NCBI NO: 2148018 NR Description: ribonuclease II (EC 3.1.-.-) precursor,
  misc_feature (24)..(230): Homolog of NCBI NO: 10120506 NR Description: Chain A, Crystal Structure Of Rnase Le
  misc_feature (14)..(230): Homolog of NCBI NO: 7435266 NR Description: ribonuclease M5 (EC 3.1.-.-) precursor,
  misc_feature (10)..(230): Homolog of NCBI NO: 7768564 NR Description: RNase [Nicotiana tabacum]

SEQ ID NO: 92037 - protein, 133 aa, Arabidopsis thaliana; identical to SEQ ID NO: 36324
  peptide (1)..(133): Ceres Seq. ID no. 12707218
  misc_feature (1)..(122): Pfam Name: Ribonuclease T2 family Pfam Description: Ribonuclease T2 family
  misc_feature (1)..(133): Homolog of NCBI NO: 15227068 NR Description: ribonuclease, RNS1; protein id: At2g02990.1, by cDNA: 27242., supported by cDNA: gi_18252956, supported by gi_561997 [Arabidopsis thaliana] >gi|1173103|sp|P42813|RNS1_ARATH
  misc_feature (1)..(133): Homolog of NCBI NO: 21555182 NR Description: ribonuclease, RNS1 [Arabidopsis thaliana]
  misc_feature (1)..(133): Homolog of NCBI NO: 3860325 NR Description: ribonuclease T2 [Cicer arietinum]
  misc_feature (1)..(133): Homolog of NCBI NO: 9081845 NR Description: S-like ribonuclease [Prunus dulcis]
  misc_feature (1)..(133): Homolog of NCBI NO: 1710615 NR Description: Extracellular ribonuclease LE precursor (RNase LE)
  misc_feature (1)..(133): Homolog of NCBI NO: 532754 NR Description: RNase NE [Nicotiana alata]
  misc_feature (1)..(133): Homolog of NCBI NO: 2148018 NR Description: ribonuclease II (EC 3.1.-.-) precursor,
  misc_feature (1)..(133): Homolog of NCBI NO: 10120506 NR Description: Chain A, Crystal Structure Of Rnase Le
  misc_feature (1)..(133): Homolog of NCBI NO: 7435266 NR Description: ribonuclease M5 (EC 3.1.-.-) precursor,
  misc_feature (1)..(133): Homolog of NCBI NO: 7768564 NR Description: RNase [Nicotiana tabacum]

SEQ ID NO: 92038 - DNA, 802 bp, Arabidopsis thaliana; identical to SEQ ID NO: 88282
  misc_feature (1)..(802): Ceres Seq. ID no. 12707271
  misc_feature: MA Experiment ID: 108434 Result: Up-regulated in Transcription
  misc_feature: MA Experiment 108434 PARAMETER Experiment Name: At_Root_Tips_cDNA_P Parameter: Tissue Value: Root Tips
  misc_feature: MA Experiment ID: 108572 Result: Down-regulated in Transcription
  misc_feature: MA Experiment 108572 PARAMETER Experiment Name: At_Drought_cDNA_P Parameter: Timepoint (hr) Value: 1
  misc_feature: MA Experiment 108572 PARAMETER Experiment Name: At_Drought_cDNA_P Parameter: Tissue Value: Aerial
  misc_feature: MA Experiment 108572 PARAMETER Experiment Name: At_Drought_cDNA_P Parameter: Treatment Value: Drought vs. No Drought
  misc_feature: MA Experiment ID: 108573 Result: Down-regulated in Transcription
  misc_feature: MA Experiment 108573 PARAMETER Experiment Name: At_Drought_cDNA_P Parameter: Timepoint (hr) Value: 6
  misc_feature: MA Experiment 108573 PARAMETER Experiment Name: At_Drought_cDNA_P Parameter: Tissue Value: Aerial
  misc_feature: MA Experiment 108573 PARAMETER Experiment Name: At_Drought_cDNA_P Parameter: Treatment Value: Drought vs. No Drought
  misc_feature: MA Experiment ID: 108595 Result: Down-regulated in Transcription
  misc_feature: MA Experiment 108595 PARAMETER Experiment Name: At_Ler-pi_Ovule_cDNA_P Parameter: Plant Line Value: null
  misc_feature: MA Experiment ID: 108605 Result: Down-regulated in Transcription
  misc_feature: MA Experiment 108605 PARAMETER Experiment Name: At_100uM_ABA_cDNA_P Parameter: Timepoint (hr) Value: 6
  misc_feature: MA Experiment 108605 PARAMETER Experiment Name: At_100uM_ABA_cDNA_P Parameter: Tissue Value: Aerial
  misc_feature: MA Experiment 108605 PARAMETER Experiment Name: At_100uM_ABA_cDNA_P Parameter: Treatment Value: 100uM ABA vs. No Treatment
  misc_feature: MA Experiment ID: 20000070 Result: Down-regulated in Transcription
  misc_feature: MA Experiment 20000070 PARAMETER Experiment Name: At_100uM_ABA_Mutants_cDNA_P Parameter: Plant Line Value: CS24
  misc_feature: MA Experiment 20000070 PARAMETER Experiment Name: At_100uM_ABA_Mutants_cDNA_P Parameter: Timepoint (hr) Value: 6
  misc_feature: MA Experiment 20000070 PARAMETER Experiment Name: At_100uM_ABA_Mutants_cDNA_P Parameter: Tissue Value: Aerial
  misc_feature: MA Experiment 20000070 PARAMETER Experiment Name: At_100uM_ABA_Mutants_cDNA_P Parameter: Treatment Value: 100uM ABA vs. No Treatment
  misc_feature: MA Experiment ID: 20000071 Result: Down-regulated in Transcription
  misc_feature: MA Experiment 20000071 PARAMETER Experiment Name: At_100uM_ABA_Mutants_cDNA_P Parameter: Plant Line Value: CS8104
  misc_feature: MA Experiment 20000071 PARAMETER Experiment Name: At_100uM_ABA_Mutants_cDNA_P Parameter: Timepoint (hr) Value: 6
  misc_feature: MA Experiment 20000071 PARAMETER Experiment Name: At_100uM_ABA_Mutants_cDNA_P Parameter: Tissue Value: Aerial
  misc_feature: MA Experiment 20000071 PARAMETER Experiment Name: At_100uM_ABA_Mutants_cDNA_P Parameter: Treatment Value: 100uM ABA vs. No Treatment
  misc_feature: MA Experiment ID: 20000087 Result: Down-regulated in Transcription
  misc_feature: MA Experiment 20000087 PARAMETER Experiment Name: At_100uM_ABA_Mutants_cDNA_P Parameter: Plant Line Value: WS
  misc_feature: MA Experiment 20000087 PARAMETER Experiment Name: At_100uM_ABA_Mutants_cDNA_P Parameter: Timepoint (hr) Value: 6
  misc_feature: MA Experiment 20000087 PARAMETER Experiment Name: At_100uM_ABA_Mutants_cDNA_P Parameter: Tissue Value: Aerial
  misc_feature: MA Experiment 20000087 PARAMETER Experiment Name: At_100uM_ABA_Mutants_cDNA_P Parameter: Treatment Value: 100uM ABA vs. No Treatment
  misc_feature: MA Experiment ID: 20000117 Result: Down-regulated in Transcription
  misc_feature: MA Experiment 20000117 PARAMETER Experiment Name: At_100uM_ABA_Mutants_cDNA_P Parameter: Plant Line Value: Columbia
  misc_feature: MA Experiment 20000117 PARAMETER Experiment Name: At_100uM_ABA_Mutants_cDNA_P Parameter: Timepoint (hr) Value: 6
  misc_feature: MA Experiment 20000117 PARAMETER Experiment Name: At_100uM_ABA_Mutants_cDNA_P Parameter: Tissue Value: Aerial
  misc_feature: MA Experiment 20000117 PARAMETER Experiment Name: At_100uM_ABA_Mutants_cDNA_P Parameter: Treatment Value: 100uM ABA vs. No Treatment
  misc_feature: MA Experiment ID: 20000227 Result: Up-regulated in Transcription
  misc_feature: MA Experiment 20000227 PARAMETER Experiment Name: At_Root-Tips-vs-Tops_P Parameter: Tissue Value: Root Tips vs. Root Tops
  misc_feature: MA Experiment ID: 20000436 Result: Down-regulated in Transcription
  misc_feature: MA Experiment 20000436 PARAMETER Experiment Name: At_Drought_P Parameter: Age (day) Value: 7
  misc_feature: MA Experiment 20000436 PARAMETER Experiment Name: At_Drought_P Parameter: Organism Value: A. thaliana
  misc_feature: MA Experiment 20000436 PARAMETER Experiment Name: At_Drought_P Parameter: Plant Line Value: WS
  misc_feature: MA Experiment 20000436 PARAMETER Experiment Name: At_Drought_P Parameter: Timepoint (hr) Value: 12
  misc_feature: MA Experiment 20000436 PARAMETER Experiment Name: At_Drought_P Parameter: Tissue Value: Whole Plant
  misc_feature: MA Experiment 20000436 PARAMETER Experiment Name: At_Drought_P Parameter: Treatment Value: Drought vs. No Drought
  misc_feature: MA Experiment ID: 20000437 Result: Down-regulated in Transcription
  misc_feature: MA Experiment 20000437 PARAMETER Experiment Name: At_Drought_P Parameter: Age (day) Value: 8
  misc_feature: MA Experiment 20000437 PARAMETER Experiment Name: At_Drought_P Parameter: Organism Value: A. thaliana
  misc_feature: MA Experiment 20000437 PARAMETER Experiment Name: At_Drought_P Parameter: Plant Line Value: WS
  misc_feature: MA Experiment 20000437 PARAMETER Experiment Name: At_Drought_P Parameter: Timepoint (hr) Value: 24
  misc_feature: MA Experiment 20000437 PARAMETER Experiment Name: At_Drought_P Parameter: Tissue Value: Whole Plant
  misc_feature: MA Experiment 20000437 PARAMETER Experiment Name: At_Drought_P Parameter: Treatment Value: Drought vs. No Drought
  misc_feature: MA Experiment ID: 20000794 Result: Down-regulated in Transcription
  misc_feature: MA Experiment 20000794 PARAMETER Experiment Name: At_Petals_P Parameter: Age (day) Value: 23-25 days
  misc_feature: MA Experiment 20000794 PARAMETER Experiment Name: At_Petals_P Parameter: Plant Line Value: WS
  misc_feature: MA Experiment 20000794 PARAMETER Experiment Name: At_Petals_P Parameter: Tissue Value: Petals vs. Whole plant
  misc_feature: MA Experiment ID: 20001554 Result: Down-regulated in Transcription
  misc_feature: MA Experiment 20001554 PARAMETER Experiment Name: At_Drought_Soil_Dry_P Parameter: Age (day) Value: 21
  misc_feature: MA Experiment 20001554 PARAMETER Experiment Name: At_Drought_Soil_Dry_P Parameter: Organism Value: A. thaliana
  misc_feature: MA Experiment 20001554 PARAMETER Experiment Name: At_Drought_Soil_Dry_P Parameter: Plant Line Value: WS
  misc_feature: MA Experiment 20001554 PARAMETER Experiment Name: At_Drought_Soil_Dry_P Parameter: Post Timepoint (hr) Value: None
  misc_feature: MA Experiment 20001554 PARAMETER Experiment Name: At_Drought_Soil_Dry_P Parameter: Post-Treatment Value: None
  misc_feature: MA Experiment 20001554 PARAMETER Experiment Name: At_Drought_Soil_Dry_P Parameter: Timepoint (day) Value: 7
  misc_feature: MA Experiment 20001554 PARAMETER Experiment Name: At_Drought_Soil_Dry_P Parameter: Treatment Value: Drought vs. No Drought
  misc_feature: MA Experiment ID: 20001555 Result: Down-regulated in Transcription
  misc_feature: MA Experiment 20001555 PARAMETER Experiment Name: At_Drought_Soil_Dry_P Parameter: Age (day) Value: 24
  misc_feature: MA Experiment 20001555 PARAMETER Experiment Name: At_Drought_Soil_Dry_P Parameter: Organism Value: A. thaliana
  misc_feature: MA Experiment 20001555 PARAMETER Experiment Name: At_Drought_Soil_Dry_P Parameter: Plant Line Value: WS
  misc_feature: MA Experiment 20001555 PARAMETER Experiment Name: At_Drought_Soil_Dry_P Parameter: Post Timepoint (hr) Value: None
  misc_feature: MA Experiment 20001555 PARAMETER Experiment Name: At_Drought_Soil_Dry_P Parameter: Post-Treatment Value: None
  misc_feature: MA Experiment 20001555 PARAMETER Experiment Name: At_Drought_Soil_Dry_P Parameter: Timepoint (day) Value: 10
  misc_feature: MA Experiment 20001555 PARAMETER Experiment Name: At_Drought_Soil_Dry_P Parameter: Treatment Value: Drought vs. No Drought
  misc_feature: MA Experiment ID: 20001558 Result: Up-regulated in Transcription
  misc_feature: MA Experiment 20001558 PARAMETER Experiment Name: At_Drought_Soil_Dry_P Parameter: Age (day) Value: 27
  misc_feature: MA Experiment 20001558 PARAMETER Experiment Name: At_Drought_Soil_Dry_P Parameter: Organism Value: A. thaliana
  misc_feature: MA Experiment 20001558 PARAMETER Experiment Name: At_Drought_Soil_Dry_P Parameter: Plant Line Value: WS
  misc_feature: MA Experiment 20001558 PARAMETER Experiment Name: At_Drought_Soil_Dry_P Parameter: Post Timepoint (hr) Value: 6
  misc_feature: MA Experiment 20001558 PARAMETER Experiment Name: At_Drought_Soil_Dry_P Parameter: Post-Treatment Value: Re-Water vs. No Drought
  misc_feature: MA Experiment 20001558 PARAMETER Experiment Name: At_Drought_Soil_Dry_P Parameter: Timepoint (day) Value: 13
  misc_feature: MA Experiment 20001558 PARAMETER Experiment Name: At_Drought_Soil_Dry_P Parameter: Treatment Value: Drought vs. No Drought
  misc_feature: MA Experiment ID: 20001560 Result: Up-regulated in Transcription
  misc_feature: MA Experiment 20001560 PARAMETER Experiment Name: At_Drought_Soil_Dry_P Parameter: Age (day) Value: 28
  misc_feature: MA Experiment 20001560 PARAMETER Experiment Name: At_Drought_Soil_Dry_P Parameter: Organism Value: A. thaliana
  misc_feature: MA Experiment 20001560 PARAMETER Experiment Name: At_Drought_Soil_Dry_P Parameter: Plant Line Value: WS
  misc_feature: MA Experiment 20001560 PARAMETER Experiment Name: At_Drought_Soil_Dry_P Parameter: Post Timepoint (hr) Value: None
  misc_feature: MA Experiment 20001560 PARAMETER Experiment Name: At_Drought_Soil_Dry_P Parameter: Post-Treatment Value: None
  misc_feature: MA Experiment 20001560 PARAMETER Experiment Name: At_Drought_Soil_Dry_P Parameter: Timepoint (day) Value: 14
  misc_feature: MA Experiment 20001560 PARAMETER Experiment Name: At_Drought_Soil_Dry_P Parameter: Treatment Value: Drought vs. No Drought
  misc_feature: MA Experiment ID: 20001904 Result: Down-regulated in Transcription
  misc_feature: MA Experiment 20001904 PARAMETER Experiment Name: At_Drought_Reproduction_P Parameter: Age (day) Value: 37
  misc_feature: MA Experiment 20001904 PARAMETER Experiment Name: At_Drought_Reproduction_P Parameter: Organism Value: A. thaliana
  misc_feature: MA Experiment 20001904 PARAMETER Experiment Name: At_Drought_Reproduction_P Parameter: Plant Line Value: WS
  misc_feature: MA Experiment 20001904 PARAMETER Experiment Name: At_Drought_Reproduction_P Parameter: Timepoint (day) Value: 7
  misc_feature: MA Experiment 20001904 PARAMETER Experiment Name: At_Drought_Reproduction_P Parameter: Tissue Value: Rosettes
  misc_feature: MA Experiment 20001904 PARAMETER Experiment Name: At_Drought_Reproduction_P Parameter: Treatment Value: Drought vs. No Drought
  misc_feature: MA Experiment ID: 20001905 Result: Down-regulated in Transcription
  misc_feature: MA Experiment 20001905 PARAMETER Experiment Name: At_Drought_Reproduction_P Parameter: Age (day) Value: 40
  misc_feature: MA Experiment 20001905 PARAMETER Experiment Name: At_Drought_Reproduction_P Parameter: Organism Value: A. thaliana
  misc_feature: MA Experiment 20001905 PARAMETER Experiment Name: At_Drought_Reproduction_P Parameter: Plant Line Value: WS
  misc_feature: MA Experiment 20001905 PARAMETER Experiment Name: At_Drought_Reproduction_P Parameter: Timepoint (day) Value: 10
  misc_feature: MA Experiment 20001905 PARAMETER Experiment Name: At_Drought_Reproduction_P Parameter: Tissue Value: Rosettes
  misc_feature: MA Experiment 20001905 PARAMETER Experiment Name: At_Drought_Reproduction_P Parameter: Treatment Value: Drought vs. No Drought

SEQ ID NO: 92039 - protein, 216 aa, Arabidopsis thaliana; identical to SEQ ID NO: 88283
  peptide (1)..(216): Ceres Seq. ID no. 12707272
  misc_feature (74)..(214): Pfam Name: Protein of unknown function, DUF538 Pfam Description: Protein of unknown function, DUF538
  misc_feature (38)..(216): Homolog of NCBI NO: 18395537 NR Description: expressed protein; protein id: At2g03350.1, by cDNA: 1697. [Arabidopsis thaliana] >gi|25364434|pir||D84447
  misc_feature (38)..(216): Homolog of NCBI NO: 21553803 NR Description: unknown [Arabidopsis thaliana]
  misc_feature (49)..(212): Homolog of NCBI NO: 18398279 NR Description: expressed protein; protein id: At3g08890.1, by cDNA: 20180. [Arabidopsis thaliana] unknown protein [Arabidopsis thaliana]
  misc_feature (49)..(212): Homolog of NCBI NO: 15240103 NR Description: putative protein; protein id: At5g37070.1 thaliana] >gi|10177986|dbj|BAB11359.1|
  misc_feature (49)..(212): Homolog of NCBI NO: 15241019 NR Description: putative protein; protein id: At5g01610.1, by cDNA: 21740. [Arabidopsis thaliana] >gi|11290054|pir||T48182
  misc_feature (49)..(212): Homolog of NCBI NO: 28466909 NR Description: At5g01610 [Arabidopsis thaliana]
  misc_feature (49)..(212): Homolog of NCBI NO: 34914210 NR Description: OSJNBb0049O23.18 [Oryza sativa (japonica
  misc_feature (49)..(212): Homolog of NCBI NO: 40642817 NR Description: cp protein [Celosia cristata]
  misc_feature (98)..(194): Homolog of NCBI NO: 15235335 NR Description: putative protein; protein id: At4g02360.1
  misc_feature (95)..(208): Homolog of NCBI NO: 34898576 NR Description: P0534A03.14 [Oryza sativa (japonica >gi|28564794|dbj|BAC57724.1| hypothetical protein [Oryza sativa

SEQ ID NO: 92040 - protein, 179 aa, Arabidopsis thaliana; identical to SEQ ID NO: 88284
  peptide (1)..(179): Ceres Seq. ID no. 12707273
  misc_feature (37)..(177): Pfam Name: Protein of unknown function, DUF538 Pfam Description: Protein of unknown function, DUF538
  misc_feature (1)..(179): Homolog of NCBI NO: 18395537 NR Description: expressed protein; protein id: At2g03350.1, by cDNA: 1697. [Arabidopsis thaliana] >gi|25364434|pir||D84447
  misc_feature (1)..(179): Homolog of NCBI NO: 21553803 NR Description: unknown [Arabidopsis thaliana]
  misc_feature (12)..(175): Homolog of NCBI NO: 18398279 NR Description: expressed protein; protein id: At3g08890.1, by cDNA: 20180. [Arabidopsis thaliana] unknown protein [Arabidopsis thaliana]
  misc_feature (12)..(175): Homolog of NCBI NO: 15240103 NR Description: putative protein; protein id: At5g37070.1 thaliana] >gi|10177986|dbj|BAB11359.1|
  misc_feature (12)..(175): Homolog of NCBI NO: 15241019 NR Description: putative protein; protein id: At5g01610.1, by cDNA: 21740. [Arabidopsis thaliana] >gi|11290054|pir||T48182
  misc_feature (12)..(175): Homolog of NCBI NO: 28466909 NR Description: At5g01610 [Arabidopsis thaliana]
  misc_feature (12)..(175): Homolog of NCBI NO: 34914210 NR Description: OSJNBb0049O23.18 [Oryza sativa (japonica
  misc_feature (12)..(175): Homolog of NCBI NO: 40642817 NR Description: cp protein [Celosia cristata]
  misc_feature (61)..(157): Homolog of NCBI NO: 15235335 NR Description: putative protein; protein id: At4g02360.1
  misc_feature (58)..(171): Homolog of NCBI NO: 34898576 NR Description: P0534A03.14 [Oryza sativa (japonica >gi|28564794|dbj|BAC57724.1| hypothetical protein [Oryza sativa

SEQ ID NO: 92041 - DNA, 1284 bp, Arabidopsis thaliana; identical to SEQ ID NO: 88285
  misc_feature (1)..(1284): Ceres Seq. ID no. 12707274
  misc_feature: MA Experiment ID: 20000307 Result: Down-regulated in Transcription
  misc_feature: MA Experiment 20000307 PARAMETER Experiment Name: At_Germinating_Seeds_Sub_P Parameter: Age (hr) Value: 24 vs. 0
  misc_feature: MA Experiment 20000307 PARAMETER Experiment Name: At_Germinating_Seeds_Sub_P Parameter: Organism Value: A. thaliana
  misc_feature: MA Experiment 20000307 PARAMETER Experiment Name: At_Germinating_Seeds_Sub_P Parameter: Plant Line Value: WS
  misc_feature: MA Experiment 20000307 PARAMETER Experiment Name: At_Germinating_Seeds_Sub_P Parameter: Tissue Value: Germinating Seeds
  misc_feature: MA Experiment ID: 20000347 Result: Up-regulated in Transcription
  misc_feature: MA Experiment 20000347 PARAMETER Experiment Name: At_2mM_SA_Sub_P Parameter: Age (day) Value: 14
  misc_feature: MA Experiment 20000347 PARAMETER Experiment Name: At_2mM_SA_Sub_P Parameter: Organism Value: A. thaliana
  misc_feature: MA Experiment 20000347 PARAMETER Experiment Name: At_2mM_SA_Sub_P Parameter: Plant Line Value: WS
  misc_feature: MA Experiment 20000347 PARAMETER Experiment Name: At_2mM_SA_Sub_P Parameter: Timepoint (hr) Value: 6
  misc_feature: MA Experiment 20000347 PARAMETER Experiment Name: At_2mM_SA_Sub_P Parameter: Tissue Value: Aerial
  misc_feature: MA Experiment 20000347 PARAMETER Experiment Name: At_2mM_SA_Sub_P Parameter: Treatment Value: 2mM SA vs. No Treatment

SEQ ID NO: 92042 - protein, 427 aa, Arabidopsis thaliana; identical to SEQ ID NO: 88286
  peptide (1)..(427): Ceres Seq. ID no. 12707275
  misc_feature (118)..(419): Pfam Name: Mo25 protein family Pfam Description: Mo25 protein family
  misc_feature (80)..(427): Homolog of NCBI NO: 15227629 NR Description: unknown protein; protein id: At2g03410.1
  misc_feature (80)..(422): Homolog of NCBI NO: 15214076 NR Description: Hypothetical MO25-like protein At5g47540 emb|CAB78730.1~gene_id:MNJ7.13~similar to unknown protein thaliana] >gi|16226301|gb|AAL16128.1|AF428296_1 AT5g47540/MNJ7_13
  misc_feature (80)..(422): Homolog of NCBI NO: 15238126 NR Description: putative protein; protein id: At5g47540.1
  misc_feature (80)..(422): Homolog of NCBI NO: 15236013 NR Description: putative protein; protein id: At4g17270.1, by cDNA: gi_14190518, supported by cDNA: gi_15810066 [Arabidopsis
  misc_feature (125)..(422): Homolog of NCBI NO: 7485184 NR Description: hypothetical protein - Arabidopsis thaliana
  misc_feature (80)..(417): Homolog of NCBI NO: 34901086 NR Description: putative MO25 protein (CGI-66) [Oryza sativa
  misc_feature (84)..(417): Homolog of NCBI NO: 34877516 NR Description: similar to MO25 protein [Rattus norvegicus]
  misc_feature (84)..(417): Homolog of NCBI NO: 7706481 NR Description: MO25 protein [Homo sapiens]
  misc_feature (83)..(417): Homolog of NCBI NO: 30923384 NR Description: MO25-like protein >gi|16359342|gb|AAH16128.1| protein [Mus musculus] >gi|26345724|dbj|BAC36513.1| unnamed
  misc_feature (83)..(417): Homolog of NCBI NO: 37589970 NR Description: Unknown (protein for MGC:27972) [Mus musculus]

SEQ ID NO: 92043 - protein, 348 aa, Arabidopsis thaliana; identical to SEQ ID NO: 72087
  peptide (1)..(348): Ceres Seq. ID no. 12707276
  misc_feature (39)..(340): Pfam Name: Mo25 protein family Pfam Description: Mo25 protein family
  misc_feature (1)..(348): Homolog of NCBI NO: 15227629 NR Description: unknown protein; protein id: At2g03410.1
  misc_feature (1)..(343): Homolog of NCBI NO: 15214076 NR Description: Hypothetical MO25-like protein At5g47540 emb|CAB78730.1~gene_id:MNJ7.13~similar to unknown protein thaliana] >gi|16226301|gb|AAL16128.1|AF428296_1 AT5g47540/MNJ7_13
  misc_feature (1)..(343): Homolog of NCBI NO: 15238126 NR Description: putative protein; protein id: At5g47540.1
  misc_feature (1)..(343): Homolog of NCBI NO: 15236013 NR Description: putative protein; protein id: At4g17270.1, by cDNA: gi_14190518, supported by cDNA: gi_15810066 [Arabidopsis
  misc_feature (46)..(343): Homolog of NCBI NO: 7485184 NR Description: hypothetical protein - Arabidopsis thaliana
  misc_feature (1)..(338): Homolog of NCBI NO: 34901086 NR Description: putative MO25 protein (CGI-66) [Oryza sativa
  misc_feature (5)..(338): Homolog of NCBI NO: 34877516 NR Description: similar to MO25 protein [Rattus norvegicus]
  misc_feature (5)..(338): Homolog of NCBI NO: 7706481 NR Description: MO25 protein [Homo sapiens]
  misc_feature (4)..(338): Homolog of NCBI NO: 30923384 NR Description: MO25-like protein >gi|16359342|gb|AAH16128.1| protein [Mus musculus] >gi|26345724|dbj|BAC36513.1| unnamed
  misc_feature (4)..(338): Homolog of NCBI NO: 37589970 NR Description: Unknown (protein for MGC:27972) [Mus musculus]

SEQ ID NO: 92044 - DNA, 1062 bp, Arabidopsis thaliana; identical to SEQ ID NO: 88288
  misc_feature (1)..(1062): Ceres Seq. ID no. 12707401
  misc_feature: MA Experiment ID: 20000179 Result: Down-regulated in Transcription
  misc_feature: MA Experiment 20000179 PARAMETER Experiment Name: At_Germinating_Seeds_P Parameter: Age (hr) Value: 6 vs. 0
  misc_feature: MA Experiment 20000179 PARAMETER Experiment Name: At_Germinating_Seeds_P Parameter: Tissue Value: Germinating Seeds
  misc_feature: MA Experiment ID: 20000180 Result: Down-regulated in Transcription
  misc_feature: MA Experiment 20000180 PARAMETER Experiment Name: At_Germinating_Seeds_P Parameter: Age (hr) Value: 24 vs. 0
  misc_feature: MA Experiment 20000180 PARAMETER Experiment Name: At_Germinating_Seeds_P Parameter: Tissue Value: Germinating Seeds

SEQ ID NO: 92045 - protein, 353 aa, Arabidopsis thaliana; identical to SEQ ID NO: 88289
  peptide (1)..(353): Ceres Seq. ID no. 12707402
  misc_feature (197)..(301): Pfam Name: 2OG-Fe(II) oxygenase superfamily Pfam Description: 2OG-Fe(II) oxygenase superfamily
  misc_feature (1)..(353): Homolog of NCBI NO: 15240797 NR Description: putative protein; protein id: At5g07480.1
  misc_feature (5)..(350): Homolog of NCBI NO: 7433240 NR Description: probable flavonol synthase [imported] - thaliana >gi|20197022|gb|AAM14878.1| putative flavonol synthase
  misc_feature (5)..(350): Homolog of NCBI NO: 30689834 NR Description: flavonol synthase family [Arabidopsis thaliana]
  misc_feature (141)..(353): Homolog of NCBI NO: 15232291 NR Description: SRG1 - like protein; protein id: At3g60290.1
  misc_feature (22)..(116): Homolog of NCBI NO: 15232291 NR Description: SRG1 - like protein; protein id: At3g60290.1
  misc_feature (74)..(351): Homolog of NCBI NO: 15228020 NR Description: putative giberellin beta-hydroxylase; protein id: [Arabidopsis thaliana] >gi|25285698|pir||E84783 probable
  misc_feature (24)..(332): Homolog of NCBI NO: 38345873 NR Description: OSJNBa0064M23.15 [Oryza sativa (japonica
  misc_feature (24)..(330): Homolog of NCBI NO: 37536444 NR Description: unknown protein [Oryza sativa (japonica
  misc_feature (24)..(330): Homolog of NCBI NO: 15238567 NR Description: flavanone 3-hydroxylase-like protein; protein id: supported by cDNA: 149654., supported by cDNA: gi_14423475,
  misc_feature (24)..(330): Homolog of NCBI NO: 38345872 NR Description: OSJNBa0064M23.14 [Oryza sativa (japonica

SEQ ID NO: 92046 - protein, 342 aa, Arabidopsis thaliana; identical to SEQ ID NO: 88290
  peptide (1)..(342): Ceres Seq. ID no. 12707403
  misc_feature (186)..(290): Pfam Name: 2OG-Fe(II) oxygenase superfamily Pfam Description: 2OG-Fe(II) oxygenase superfamily
  misc_feature (1)..(342): Homolog of NCBI NO: 15240797 NR Description: putative protein; protein id: At5g07480.1
  misc_feature (1)..(339): Homolog of NCBI NO: 7433240 NR Description: probable flavonol synthase [imported] - thaliana >gi|20197022|gb|AAM14878.1| putative flavonol synthase
  misc_feature (1)..(339): Homolog of NCBI NO: 30689834 NR Description: flavonol synthase family [Arabidopsis thaliana]
  misc_feature (130)..(342): Homolog of NCBI NO: 15232291 NR Description: SRG1 - like protein; protein id: At3g60290.1
  misc_feature (11)..(105): Homolog of NCBI NO: 15232291 NR Description: SRG1 - like protein; protein id: At3g60290.1
  misc_feature (63)..(340): Homolog of NCBI NO: 15228020 NR Description: putative giberellin beta-hydroxylase; protein id: [Arabidopsis thaliana] >gi|25285698|pir||E84783 probable
  misc_feature (13)..(321): Homolog of NCBI NO: 38345873 NR Description: OSJNBa0064M23.15 [Oryza sativa (japonica
  misc_feature (13)..(319): Homolog of NCBI NO: 37536444 NR Description: unknown protein [Oryza sativa (japonica
  misc_feature (13)..(319): Homolog of NCBI NO: 15238567 NR Description: flavanone 3-hydroxylase-like protein; protein id: supported by cDNA: 149654., supported by cDNA: gi_14423475,
  misc_feature (13)..(319): Homolog of NCBI NO: 38345872 NR Description: OSJNBa0064M23.14 [Oryza sativa (japonica

SEQ ID NO: 92047 - protein, 247 aa, Arabidopsis thaliana; identical to SEQ ID NO: 70754
  peptide (1)..(247): Ceres Seq. ID no. 12707404
  misc_feature (91)..(195): Pfam Name: 2OG-Fe(II) oxygenase superfamily Pfam Description: 2OG-Fe(II) oxygenase superfamily
  misc_feature (1)..(247): Homolog of NCBI NO: 15240797 NR Description: putative protein; protein id: At5g07480.1
  misc_feature (1)..(244): Homolog of NCBI NO: 7433240 NR Description: probable flavonol synthase [imported] - thaliana >gi|20197022|gb|AAM14878.1| putative flavonol synthase
  misc_feature (1)..(244): Homolog of NCBI NO: 30689834 NR Description: flavonol synthase family [Arabidopsis thaliana]
  misc_feature (35)..(247): Homolog of NCBI NO: 15232291 NR Description: SRG1 - like protein; protein id: At3g60290.1
  misc_feature (1)..(245): Homolog of NCBI NO: 15228020 NR Description: putative giberellin beta-hydroxylase; protein id: [Arabidopsis thaliana] >gi|25285698|pir||E84783 probable
  misc_feature (1)..(226): Homolog of NCBI NO: 38345873 NR Description: OSJNBa0064M23.15 [Oryza sativa (japonica
  misc_feature (1)..(224): Homolog of NCBI NO: 37536444 NR Description: unknown protein [Oryza sativa (japonica
  misc_feature (1)..(224): Homolog of NCBI NO: 15238567 NR Description: flavanone 3-hydroxylase-like protein; protein id: supported by cDNA: 149654., supported by cDNA: gi_14423475,
  misc_feature (1)..(224): Homolog of NCBI NO: 38345872 NR Description: OSJNBa0064M23.14 [Oryza sativa (japonica
  misc_feature (1)..(241): Homolog of NCBI NO: 21553527 NR Description: flavanone 3-hydroxylase-like protein [Arabidopsis

SEQ ID NO: 92048 - DNA, 1590 bp, Arabidopsis thaliana; identical to SEQ ID NO: 88292
  misc_feature (1)..(1590): Ceres Seq. ID no. 12707479
  misc_feature: MA Experiment ID: 20000166 Result: Up-regulated in Transcription
  misc_feature: MA Experiment 20000166 PARAMETER Experiment Name: At_100uM_ABA_P Parameter: Age (day) Value: 14
  misc_feature: MA Experiment 20000166 PARAMETER Experiment Name: At_100uM_ABA_P Parameter: Organism Value: A. thaliana
  misc_feature: MA Experiment 20000166 PARAMETER Experiment Name: At_100uM_ABA_P Parameter: Plant Line Value: WS
  misc_feature: MA Experiment 20000166 PARAMETER Experiment Name: At_100uM_ABA_P Parameter: Timepoint (hr) Value: 1
  misc_feature: MA Experiment 20000166 PARAMETER Experiment Name: At_100uM_ABA_P Parameter: Tissue Value: Aerial
  misc_feature: MA Experiment 20000166 PARAMETER Experiment Name: At_100uM_ABA_P Parameter: Treatment Value: 100uM ABA vs. No Treatment
  misc_feature: MA Experiment ID: 20000171 Result: Down-regulated in Transcription
  misc_feature: MA Experiment 20000171 PARAMETER Experiment Name: At_42deg_Heat_P Parameter: Age (day) Value: 14
  misc_feature: MA Experiment 20000171 PARAMETER Experiment Name: At_42deg_Heat_P Parameter: Organism Value: A. thaliana
  misc_feature: MA Experiment 20000171 PARAMETER Experiment Name: At_42deg_Heat_P Parameter: Plant Line Value: WS
  misc_feature: MA Experiment 20000171 PARAMETER Experiment Name: At_42deg_Heat_P Parameter: Temperature (deg C) Value: 42 vs. 22
  misc_feature: MA Experiment 20000171 PARAMETER Experiment Name: At_42deg_Heat_P Parameter: Timepoint (hr) Value: 1
  misc_feature: MA Experiment 20000171 PARAMETER Experiment Name: At_42deg_Heat_P Parameter: Tissue Value: Aerial
  misc_feature: MA Experiment ID: 20000173 Result: Down-regulated in Transcription
  misc_feature: MA Experiment 20000173 PARAMETER Experiment Name: At_42deg_Heat_P Parameter: Age (day) Value: 14
  misc_feature: MA Experiment 20000173 PARAMETER Experiment Name: At_42deg_Heat_P Parameter: Organism Value: A. thaliana
  misc_feature: MA Experiment 20000173 PARAMETER Experiment Name: At_42deg_Heat_P Parameter: Plant Line Value: WS
  misc_feature: MA Experiment 20000173 PARAMETER Experiment Name: At_42deg_Heat_P Parameter: Temperature (deg C) Value: 42 vs. 22
  misc_feature: MA Experiment 20000173 PARAMETER Experiment Name: At_42deg_Heat_P Parameter: Timepoint (hr) Value: 6
  misc_feature: MA Experiment 20000173 PARAMETER Experiment Name: At_42deg_Heat_P Parameter: Tissue Value: Aerial
  misc_feature: MA Experiment ID: 20000185 Result: Up-regulated in Transcription
  misc_feature: MA Experiment 20000185 PARAMETER Experiment Name: At_Roots__P Parameter: Age (day) Value: 7 vs. 21
  misc_feature: MA Experiment 20000185 PARAMETER Experiment Name: At_Roots__P Parameter: Organism Value: A. thaliana
  misc_feature: MA Experiment 20000185 PARAMETER Experiment Name: At_Roots__P Parameter: Tissue Value: Roots vs. Whole Plant
  misc_feature: MA Experiment ID: 20000265 Result: Up-regulated in Transcription
  misc_feature: MA Experiment 20000265 PARAMETER Experiment Name: At_Open_Flower_P Parameter: Age (day) Value: 21
  misc_feature: MA Experiment 20000265 PARAMETER Experiment Name: At_Open_Flower_P Parameter: Plant Line Value: WS
  misc_feature: MA Experiment 20000265 PARAMETER Experiment Name: At_Open_Flower_P Parameter: Tissue Value: Closed Flower vs. Whole Plant
  misc_feature: MA Experiment ID: 20000286 Result: Up-regulated in Transcription
  misc_feature: MA Experiment 20000286 PARAMETER Experiment Name: At_Open_Flower_P Parameter: Age (day) Value: 21
  misc_feature: MA Experiment 20000286 PARAMETER Experiment Name: At_Open_Flower_P Parameter: Plant Line Value: WS
  misc_feature: MA Experiment 20000286 PARAMETER Experiment Name: At_Open_Flower_P Parameter: Tissue Value: Half Open vs. Whole Plant
  misc_feature: MA Experiment ID: 20000439 Result: Up-regulated in Transcription
  misc_feature: MA Experiment 20000439 PARAMETER Experiment Name: At_Roots__P Parameter: Age (day) Value: 14 vs. 21
  misc_feature: MA Experiment 20000439 PARAMETER Experiment Name: At_Roots__P Parameter: Organism Value: A. thaliana
  misc_feature: MA Experiment 20000439 PARAMETER Experiment Name: At_Roots__P Parameter: Tissue Value: Roots vs. Whole Plant
  misc_feature: MA Experiment ID: 20001247 Result: Up-regulated in Transcription
  misc_feature: MA Experiment 20001247 PARAMETER Experiment Name: At_Far-red-induction_P Parameter: Age (day) Value: 7
  misc_feature: MA Experiment 20001247 PARAMETER Experiment Name: At_Far-red-induction_P Parameter: Light Value: Far-red vs. White
  misc_feature: MA Experiment 20001247 PARAMETER Experiment Name: At_Far-red-induction_P Parameter: Organism Value: A. thaliana
  misc_feature: MA Experiment 20001247 PARAMETER Experiment Name: At_Far-red-induction_P Parameter: Plant Line Value: Columbia
  misc_feature: MA Experiment 20001247 PARAMETER Experiment Name: At_Far-red-induction_P Parameter: Timepoint (hr) Value: 1
  misc_feature: MA Experiment 20001247 PARAMETER Experiment Name: At_Far-red-induction_P Parameter: Tissue Value: Whole Plant
  misc_feature: MA Experiment ID: 20001248 Result: Up-regulated in Transcription
  misc_feature: MA Experiment 20001248 PARAMETER Experiment Name: At_Far-red-induction_P Parameter: Age (day) Value: 7
  misc_feature: MA Experiment 20001248 PARAMETER Experiment Name: At_Far-red-induction_P Parameter: Light Value: Far-red vs. White
  misc_feature: MA Experiment 20001248 PARAMETER Experiment Name: At_Far-red-induction_P Parameter: Organism Value: A. thaliana
  misc_feature: MA Experiment 20001248 PARAMETER Experiment Name: At_Far-red-induction_P Parameter: Plant Line Value: Columbia
  misc_feature: MA Experiment 20001248 PARAMETER Experiment Name: At_Far-red-induction_P Parameter: Timepoint (hr) Value: 4
  misc_feature: MA Experiment 20001248 PARAMETER Experiment Name: At_Far-red-induction_P Parameter: Tissue Value: Whole Plant
  misc_feature: MA Experiment ID: 20001911 Result: Down-regulated in Transcription
  misc_feature: MA Experiment 20001911 PARAMETER Experiment Name: At_Drought_Reproduction_P Parameter: Age (day) Value: 40
  misc_feature: MA Experiment 20001911 PARAMETER Experiment Name: At_Drought_Reproduction_P Parameter: Organism Value: A. thaliana
  misc_feature: MA Experiment 20001911 PARAMETER Experiment Name: At_Drought_Reproduction_P Parameter: Plant Line Value: WS
  misc_feature: MA Experiment 20001911 PARAMETER Experiment Name: At_Drought_Reproduction_P Parameter: Timepoint (day) Value: 10
  misc_feature: MA Experiment 20001911 PARAMETER Experiment Name: At_Drought_Reproduction_P Parameter: Tissue Value: Flowers
  misc_feature: MA Experiment 20001911 PARAMETER Experiment Name: At_Drought_Reproduction_P Parameter: Treatment Value: Drought vs. No Drought

SEQ ID NO: 92049 - protein, 529 aa, Arabidopsis thaliana; identical to SEQ ID NO: 88293
  peptide (1)..(529): Ceres Seq. ID no. 12707480
  misc_feature (277)..(327): Pfam Name: Helix-loop-helix DNA-binding domain Pfam Description: Helix-loop-helix DNA-binding domain
  misc_feature (1)..(529): Homolog of NCBI NO: 11358566 NR Description: myc-like protein - Arabidopsis thaliana
  misc_feature (121)..(529): Homolog of NCBI NO: 30682248 NR Description: bHLH protein family [Arabidopsis thaliana]
  misc_feature (224)..(527): Homolog of NCBI NO: 15221582 NR Description: putative DNA-binding protein; protein id: supported by cDNA: 27793. [Arabidopsis thaliana]
  misc_feature (224)..(527): Homolog of NCBI NO: 21555388 NR Description: putative DNA-binding protein [Arabidopsis
  misc_feature (254)..(354): Homolog of NCBI NO: 15241563 NR Description: putative protein; protein id: At5g38860.1
  misc_feature (457)..(520): Homolog of NCBI NO: 15241563 NR Description: putative protein; protein id: At5g38860.1
  misc_feature (254)..(520): Homolog of NCBI NO: 9758063 NR Description: DNA-binding protein-like [Arabidopsis thaliana]
  misc_feature (324)..(527): Homolog of NCBI NO: 19310568 NR Description: putative DNA-binding protein [Arabidopsis

SEQ ID NO: 92050 - protein, 409 aa, Arabidopsis thaliana; identical to SEQ ID NO: 84581
  peptide (1)..(409): Ceres Seq. ID no. 12707481
  misc_feature (157)..(207): Pfam Name: Helix-loop-helix DNA-binding domain Pfam Description: Helix-loop-helix DNA-binding domain
  misc_feature (1)..(409): Homolog of NCBI NO: 11358566 NR Description: myc-like protein - Arabidopsis thaliana
  misc_feature (1)..(409): Homolog of NCBI NO: 30682248 NR Description: bHLH protein family [Arabidopsis thaliana]
  misc_feature (104)..(407): Homolog of NCBI NO: 15221582 NR Description: putative DNA-binding protein; protein id: supported by cDNA: 27793. [Arabidopsis thaliana]
  misc_feature (104)..(407): Homolog of NCBI NO: 21555388 NR Description: putative DNA-binding protein [Arabidopsis
  misc_feature (134)..(234): Homolog of NCBI NO: 15241563 NR Description: putative protein; protein id: At5g38860.1
  misc_feature (337)..(400): Homolog of NCBI NO: 15241563 NR Description: putative protein; protein id: At5g38860.1
  misc_feature (134)..(400): Homolog of NCBI NO: 9758063 NR Description: DNA-binding protein-like [Arabidopsis thaliana]
  misc_feature (204)..(407): Homolog of NCBI NO: 19310568 NR Description: putative DNA-binding protein [Arabidopsis

SEQ ID NO: 92051 - protein, 408 aa, Arabidopsis thaliana; identical to SEQ ID NO: 84582
  peptide (1)..(408): Ceres Seq. ID no. 12707482
  misc_feature (156)..(206): Pfam Name: Helix-loop-helix DNA-binding domain Pfam Description: Helix-loop-helix DNA-binding domain
  misc_feature (1)..(408): Homolog of NCBI NO: 11358566 NR Description: myc-like protein - Arabidopsis thaliana
  misc_feature (1)..(408): Homolog of NCBI NO: 30682248 NR Description: bHLH protein family [Arabidopsis thaliana]
  misc_feature (103)..(406): Homolog of NCBI NO: 15221582 NR Description: putative DNA-binding protein; protein id: supported by cDNA: 27793. [Arabidopsis thaliana]
  misc_feature (103)..(406): Homolog of NCBI NO: 21555388 NR Description: putative DNA-binding protein [Arabidopsis
  misc_feature (133)..(233): Homolog of NCBI NO: 15241563 NR Description: putative protein; protein id: At5g38860.1
  misc_feature (336)..(399): Homolog of NCBI NO: 15241563 NR Description: putative protein; protein id: At5g38860.1
  misc_feature (133)..(399): Homolog of NCBI NO: 9758063 NR Description: DNA-binding protein-like [Arabidopsis thaliana]
  misc_feature (203)..(406): Homolog of NCBI NO: 19310568 NR Description: putative DNA-binding protein [Arabidopsis

SEQ ID NO: 92052 - DNA, 1545 bp, Arabidopsis thaliana; identical to SEQ ID NO: 88296
  misc_feature (1)..(1545): Ceres Seq. ID no. 12707489
  misc_feature: MA Experiment ID: 20001247 Result: Down-regulated in Transcription
  misc_feature: MA Experiment 20001247 PARAMETER Experiment Name: At_Far-red-induction_P Parameter: Age (day) Value: 7
  misc_feature: MA Experiment 20001247 PARAMETER Experiment Name: At_Far-red-induction_P Parameter: Light Value: Far-red vs. White
  misc_feature: MA Experiment 20001247 PARAMETER Experiment Name: At_Far-red-induction_P Parameter: Organism Value: A. thaliana
  misc_feature: MA Experiment 20001247 PARAMETER Experiment Name: At_Far-red-induction_P Parameter: Plant Line Value: Columbia
  misc_feature: MA Experiment 20001247 PARAMETER Experiment Name: At_Far-red-induction_P Parameter: Timepoint (hr) Value: 1
  misc_feature: MA Experiment 20001247 PARAMETER Experiment Name: At_Far-red-induction_P Parameter: Tissue Value: Whole Plant
  misc_feature: MA Experiment ID: 20001451 Result: Down-regulated in Transcription
  misc_feature: MA Experiment 20001451 PARAMETER Experiment Name: At_Far-red-induction_P Parameter: Age (day) Value: 7
  misc_feature: MA Experiment 20001451 PARAMETER Experiment Name: At_Far-red-induction_P Parameter: Light Value: Far-red vs. White
  misc_feature: MA Experiment 20001451 PARAMETER Experiment Name: At_Far-red-induction_P Parameter: Organism Value: A. thaliana
  misc_feature: MA Experiment 20001451 PARAMETER Experiment Name: At_Far-red-induction_P Parameter: Plant Line Value: Columbia
  misc_feature: MA Experiment 20001451 PARAMETER Experiment Name: At_Far-red-induction_P Parameter: Timepoint (hr) Value: 24
  misc_feature: MA Experiment 20001451 PARAMETER Experiment Name: At_Far-red-induction_P Parameter: Tissue Value: Whole Plant

SEQ ID NO: 92053 - protein, 514 aa, Arabidopsis thaliana; identical to SEQ ID NO: 88297
  peptide (1)..(514): Ceres Seq. ID no. 12707490
  misc_feature (124)..(158): Pfam Name: PPR repeat Pfam Description: PPR repeat
  misc_feature (31)..(514): Homolog of NCBI NO: 15241593 NR Description: putative protein; protein id: At5g08310.1 thaliana] >gi|10178273|emb|CAC08331.1| putative protein
  misc_feature (59)..(513): Homolog of NCBI NO: 37534772 NR Description: putative selenium-binding protein [Oryza sativa
  misc_feature (2)..(487): Homolog of NCBI NO: 15240085 NR Description: selenium-binding protein-like; protein id:
  misc_feature (3)..(487): Homolog of NCBI NO: 15239979 NR Description: selenium-binding protein-like; protein id:
  misc_feature (1)..(497): Homolog of NCBI NO: 15228028 NR Description: hypothetical protein; protein id: At2g42920.1
  misc_feature (7)..(491): Homolog of NCBI NO: 15227619 NR Description: hypothetical protein; protein id: At2g29760.1
  misc_feature (56)..(491): Homolog of NCBI NO: 15229340 NR Description: putative protein; protein id: At3g62890.1
  misc_feature (28)..(498): Homolog of NCBI NO: 15227199 NR Description: hypothetical protein; protein id: At2g22410.1, by cDNA: gi_18086348 [Arabidopsis thaliana]
  misc_feature (1)..(500): Homolog of NCBI NO: 34898014 NR Description: Similar to Arabidopsis thaliana chromosome II BAC genomic sequence; hypothetical protein. (AC005496) [Oryza sativa
  misc_feature (158)..(492): Homolog of NCBI NO: 34897084 NR Description: hypothetical protein [Oryza sativa (japonica group)] >gi|12957718|gb|AAK09236.1| hypothetical protein [Oryza

SEQ ID NO: 92054 - protein, 436 aa, Arabidopsis thaliana; identical to SEQ ID NO: 88298
  peptide (1)..(436): Ceres Seq. ID no. 12707491
  misc_feature (46)..(80): Pfam Name: PPR repeat Pfam Description: PPR repeat
  misc_feature (1)..(436): Homolog of NCBI NO: 15241593 NR Description: putative protein; protein id: At5g08310.1 thaliana] >gi|10178273|emb|CAC08331.1| putative protein
  misc_feature (1)..(435): Homolog of NCBI NO: 37534772 NR Description: putative selenium-binding protein [Oryza sativa
  misc_feature (1)..(409): Homolog of NCBI NO: 15240085 NR Description: selenium-binding protein-like; protein id:
  misc_feature (1)..(409): Homolog of NCBI NO: 15239979 NR Description: selenium-binding protein-like; protein id:
  misc_feature (1)..(419): Homolog of NCBI NO: 15228028 NR Description: hypothetical protein; protein id: At2g42920.1
  misc_feature (1)..(413): Homolog of NCBI NO: 15227619 NR Description: hypothetical protein; protein id: At2g29760.1
  misc_feature (1)..(413): Homolog of NCBI NO: 15229340 NR Description: putative protein; protein id: At3g62890.1
  misc_feature (1)..(420): Homolog of NCBI NO: 15227199 NR Description: hypothetical protein; protein id: At2g22410.1, by cDNA: gi_18086348 [Arabidopsis thaliana]
  misc_feature (1)..(422): Homolog of NCBI NO: 34898014 NR Description: Similar to Arabidopsis thaliana chromosome II BAC genomic sequence; hypothetical protein. (AC005496) [Oryza sativa
  misc_feature (80)..(414): Homolog of NCBI NO: 34897084 NR Description: hypothetical protein [Oryza sativa (japonica group)] >gi|12957718|gb|AAK09236.1| hypothetical protein [Oryza

SEQ ID NO: 92055 - protein, 426 aa, Arabidopsis thaliana; identical to SEQ ID NO: 88299
  peptide (1)..(426): Ceres Seq. ID no. 12707492
  misc_feature (36)..(70): Pfam Name: PPR repeat Pfam Description: PPR repeat
  misc_feature (1)..(426): Homolog of NCBI NO: 15241593 NR Description: putative protein; protein id: At5g08310.1 thaliana] >gi|10178273|emb|CAC08331.1| putative protein
  misc_feature (1)..(425): Homolog of NCBI NO: 37534772 NR Description: putative selenium-binding protein [Oryza sativa
  misc_feature (1)..(399): Homolog of NCBI NO: 15240085 NR Description: selenium-binding protein-like; protein id:
  misc_feature (1)..(399): Homolog of NCBI NO: 15239979 NR Description: selenium-binding protein-like; protein id:
  misc_feature (1)..(409): Homolog of NCBI NO: 15228028 NR Description: hypothetical protein; protein id: At2g42920.1
  misc_feature (1)..(403): Homolog of NCBI NO: 15227619 NR Description: hypothetical protein; protein id: At2g29760.1
  misc_feature (1)..(403): Homolog of NCBI NO: 15229340 NR Description: putative protein; protein id: At3g62890.1
  misc_feature (1)..(410): Homolog of NCBI NO: 15227199 NR Description: hypothetical protein; protein id: At2g22410.1, by cDNA: gi_18086348 [Arabidopsis thaliana]
  misc_feature (1)..(412): Homolog of NCBI NO: 34898014 NR Description: Similar to Arabidopsis thaliana chromosome II BAC genomic sequence; hypothetical protein. (AC005496) [Oryza sativa
  misc_feature (70)..(404): Homolog of NCBI NO: 34897084 NR Description: hypothetical protein [Oryza sativa (japonica group)] >gi|12957718|gb|AAK09236.1| hypothetical protein [Oryza

SEQ ID NO: 92056 - DNA, 2412 bp, Arabidopsis thaliana; identical to SEQ ID NO: 88300
  misc_feature (1)..(2412): Ceres Seq. ID no. 12707514

SEQ ID NO: 92057 - protein, 803 aa, Arabidopsis thaliana; identical to SEQ ID NO: 88301
  peptide (1)..(803): Ceres Seq. ID no. 12707515
  misc_feature (1)..(402): Homolog of NCBI NO: 10178281 NR Description: katanin p80 subunit-like protein [Arabidopsis
  misc_feature (581)..(784): Homolog of NCBI NO: 10178281 NR Description: katanin p80 subunit-like protein [Arabidopsis
  misc_feature (1)..(467): Homolog of NCBI NO: 30688988 NR Description: transducin / WD-40 repeat protein family thaliana] >gi|25083345|gb|AAN72064.1| putative protein
  misc_feature (1)..(467): Homolog of NCBI NO: 30688991 NR Description: transducin / WD-40 repeat protein family
  misc_feature (38)..(560): Homolog of NCBI NO: 18415801 NR Description: katanin p80 subunit - like protein; protein id:
  misc_feature (327)..(560): Homolog of NCBI NO: 10178281 NR Description: katanin p80 subunit-like protein [Arabidopsis
  misc_feature (68)..(423): Homolog of NCBI NO: 10178281 NR Description: katanin p80 subunit-like protein [Arabidopsis
  misc_feature (1)..(422): Homolog of NCBI NO: 9759081 NR Description: contains similarity to unknown
  misc_feature (2)..(658): Homolog of NCBI NO: 38344202 NR Description: OSJNBa0064G10.18 [Oryza sativa (japonica
  misc_feature (17)..(385): Homolog of NCBI NO: 37535664 NR Description: putative microtubule-severing protein subunit

SEQ ID NO: 92058 - protein, 520 aa, Arabidopsis thaliana; identical to SEQ ID NO: 88302
  peptide (1)..(520): Ceres Seq. ID no. 12707516
  misc_feature (1)..(119): Homolog of NCBI NO: 10178281 NR Description: katanin p80 subunit-like protein [Arabidopsis
  misc_feature (298)..(501): Homolog of NCBI NO: 10178281 NR Description: katanin p80 subunit-like protein [Arabidopsis
  misc_feature (1)..(184): Homolog of NCBI NO: 30688988 NR Description: transducin / WD-40 repeat protein family thaliana] >gi|25083345|gb|AAN72064.1| putative protein
  misc_feature (1)..(184): Homolog of NCBI NO: 30688991 NR Description: transducin / WD-40 repeat protein family
  misc_feature (1)..(277): Homolog of NCBI NO: 18415801 NR Description: katanin p80 subunit - like protein; protein id:
  misc_feature (44)..(277): Homolog of NCBI NO: 10178281 NR Description: katanin p80 subunit-like protein [Arabidopsis
  misc_feature (1)..(140): Homolog of NCBI NO: 10178281 NR Description: katanin p80 subunit-like protein [Arabidopsis
  misc_feature (1)..(139): Homolog of NCBI NO: 9759081 NR Description: contains similarity to unknown
  misc_feature (1)..(375): Homolog of NCBI NO: 38344202 NR Description: OSJNBa0064G10.18 [Oryza sativa (japonica
  misc_feature (1)..(102): Homolog of NCBI NO: 37535664 NR Description: putative microtubule-severing protein subunit

SEQ ID NO: 92059 - protein, 490 aa, Arabidopsis thaliana; identical to SEQ ID NO: 88303
  peptide (1)..(490): Ceres Seq. ID no. 12707517
  misc_feature (1)..(89): Homolog of NCBI NO: 10178281 NR Description: katanin p80 subunit-like protein [Arabidopsis
  misc_feature (268)..(471): Homolog of NCBI NO: 10178281 NR Description: katanin p80 subunit-like protein [Arabidopsis
  misc_feature (1)..(154): Homolog of NCBI NO: 30688988 NR Description: transducin / WD-40 repeat protein family thaliana] >gi|25083345|gb|AAN72064.1| putative protein
  misc_feature (1)..(154): Homolog of NCBI NO: 30688991 NR Description: transducin / WD-40 repeat protein family
  misc_feature (1)..(247): Homolog of NCBI NO: 18415801 NR Description: katanin p80 subunit - like protein; protein id:
  misc_feature (14)..(247): Homolog of NCBI NO: 10178281 NR Description: katanin p80 subunit-like protein [Arabidopsis
  misc_feature (1)..(110): Homolog of NCBI NO: 10178281 NR Description: katanin p80 subunit-like protein [Arabidopsis
  misc_feature (1)..(109): Homolog of NCBI NO: 9759081 NR Description: contains similarity to unknown
  misc_feature (1)..(345): Homolog of NCBI NO: 38344202 NR Description: OSJNBa0064G10.18 [Oryza sativa (japonica
  misc_feature (1)..(72): Homolog of NCBI NO: 37535664 NR Description: putative microtubule-severing protein subunit

SEQ ID NO: 92060 - DNA, 1291 bp, Arabidopsis thaliana; identical to SEQ ID NO: 88304
  misc_feature (1)..(1291): Ceres Seq. ID no. 12707518
  misc_feature: MA Experiment ID: 108573 Result: Down-regulated in Transcription
  misc_feature: MA Experiment 108573 PARAMETER Experiment Name: At_Drought_cDNA_P Parameter: Timepoint (hr) Value: 6
  misc_feature: MA Experiment 108573 PARAMETER Experiment Name: At_Drought_cDNA_P Parameter: Tissue Value: Aerial
  misc_feature: MA Experiment 108573 PARAMETER Experiment Name: At_Drought_cDNA_P Parameter: Treatment Value: Drought vs. No Drought
  misc_feature: MA Experiment ID: 20000184 Result: Down-regulated in Transcription
  misc_feature: MA Experiment 20000184 PARAMETER Experiment Name: At_Shoots__P Parameter: Age (day) Value: 7
  misc_feature: MA Experiment 20000184 PARAMETER Experiment Name: At_Shoots__P Parameter: Tissue Value: Shoots vs. Whole Plant
  misc_feature: MA Experiment ID: 20001558 Result: Up-regulated in Transcription
  misc_feature: MA Experiment 20001558 PARAMETER Experiment Name: At_Drought_Soil_Dry_P Parameter: Age (day) Value: 27
  misc_feature: MA Experiment 20001558 PARAMETER Experiment Name: At_Drought_Soil_Dry_P Parameter: Organism Value: A. thaliana
  misc_feature: MA Experiment 20001558 PARAMETER Experiment Name: At_Drought_Soil_Dry_P Parameter: Plant Line Value: WS
  misc_feature: MA Experiment 20001558 PARAMETER Experiment Name: At_Drought_Soil_Dry_P Parameter: Post Timepoint (hr) Value: 6
  misc_feature: MA Experiment 20001558 PARAMETER Experiment Name: At_Drought_Soil_Dry_P Parameter: Post-Treatment Value: Re-Water vs. No Drought
  misc_feature: MA Experiment 20001558 PARAMETER Experiment Name: At_Drought_Soil_Dry_P Parameter: Timepoint (day) Value: 13
  misc_feature: MA Experiment 20001558 PARAMETER Experiment Name: At_Drought_Soil_Dry_P Parameter: Treatment Value: Drought vs. No Drought

SEQ ID NO: 92061 - protein, 391 aa, Arabidopsis thaliana; identical to SEQ ID NO: 26556
  peptide (1)..(391): Ceres Seq. ID no. 12707519
  misc_feature (1)..(391): Homolog of NCBI NO: 15241622 NR Description: rev interacting protein mis3 - like; protein id: supported by cDNA: 3036., supported by cDNA: gi_13878038
  misc_feature (1)..(391): Homolog of NCBI NO: 21592614 NR Description: rev interacting protein mis3-like [Arabidopsis
  misc_feature (10)..(388): Homolog of NCBI NO: 37534940 NR Description: unknown protein [Oryza sativa (japonica
  misc_feature (172)..(388): Homolog of NCBI NO: 34910546 NR Description: rev interacting protein-like [Oryza sativa
  misc_feature (16)..(153): Homolog of NCBI NO: 34910546 NR Description: rev interacting protein-like [Oryza sativa
  misc_feature (1)..(324): Homolog of NCBI NO: 19112865 NR Description: strong similarity to yeast cell division and germination protein Krr1p [Schizosaccharomyces pombe]
  misc_feature (24)..(324): Homolog of NCBI NO: 6319791 NR Description: Involved in cell division and spore germination; [Saccharomyces cerevisiae] >gi|140400|sp|P25586|YCF9_YEAST
  misc_feature (24)..(370): Homolog of NCBI NO: 40739194 NR Description: hypothetical protein AN5875.2 [Aspergillus
  misc_feature (13)..(388): Homolog of NCBI NO: 16877011 NR Description: HIV-1 rev binding protein 2 [Homo sapiens]
  misc_feature (4)..(388): Homolog of NCBI NO: 34864853 NR Description: similar to dribble CG4258-PA [Rattus norvegicus]

SEQ ID NO: 92062 - protein, 339 aa, Arabidopsis thaliana; identical to SEQ ID NO: 26557
  peptide (1)..(339): Ceres Seq. ID no. 12707520
  misc_feature (1)..(339): Homolog of NCBI NO: 15241622 NR Description: rev interacting protein mis3 - like; protein id: supported by cDNA: 3036., supported by cDNA: gi_13878038
  misc_feature (1)..(339): Homolog of NCBI NO: 21592614 NR Description: rev interacting protein mis3-like [Arabidopsis
  misc_feature (1)..(336): Homolog of NCBI NO: 37534940 NR Description: unknown protein [Oryza sativa (japonica
  misc_feature (120)..(336): Homolog of NCBI NO: 34910546 NR Description: rev interacting protein-like [Oryza sativa
  misc_feature (1)..(101): Homolog of NCBI NO: 34910546 NR Description: rev interacting protein-like [Oryza sativa
  misc_feature (1)..(272): Homolog of NCBI NO: 19112865 NR Description: strong similarity to yeast cell division and germination protein Krr1p [Schizosaccharomyces pombe]
  misc_feature (1)..(272): Homolog of NCBI NO: 6319791 NR Description: Involved in cell division and spore germination; [Saccharomyces cerevisiae] >gi|140400|sp|P25586|YCF9_YEAST
  misc_feature (1)..(318): Homolog of NCBI NO: 40739194 NR Description: hypothetical protein AN5875.2 [Aspergillus
  misc_feature (1)..(336): Homolog of NCBI NO: 16877011 NR Description: HIV-1 rev binding protein 2 [Homo sapiens]
  misc_feature (1)..(336): Homolog of NCBI NO: 34864853 NR Description: similar to dribble CG4258-PA [Rattus norvegicus]

SEQ ID NO: 92063 - protein, 294 aa, Arabidopsis thaliana; identical to SEQ ID NO: 26558
  peptide (1)..(294): Ceres Seq. ID no. 12707521
  misc_feature (1)..(294): Homolog of NCBI NO: 15241622 NR Description: rev interacting protein mis3 - like; protein id: supported by cDNA: 3036., supported by cDNA: gi_13878038
  misc_feature (1)..(294): Homolog of NCBI NO: 21592614 NR Description: rev interacting protein mis3-like [Arabidopsis
  misc_feature (1)..(291): Homolog of NCBI NO: 37534940 NR Description: unknown protein [Oryza sativa (japonica
  misc_feature (75)..(291): Homolog of NCBI NO: 34910546 NR Description: rev interacting protein-like [Oryza sativa
  misc_feature (1)..(56): Homolog of NCBI NO: 34910546 NR Description: rev interacting protein-like [Oryza sativa
  misc_feature (1)..(227): Homolog of NCBI NO: 19112865 NR Description: strong similarity to yeast cell division and germination protein Krr1p [Schizosaccharomyces pombe]
  misc_feature (1)..(227): Homolog of NCBI NO: 6319791 NR Description: Involved in cell division and spore germination; [Saccharomyces cerevisiae] >gi|140400|sp|P25586|YCF9_YEAST
  misc_feature (1)..(273): Homolog of NCBI NO: 40739194 NR Description: hypothetical protein AN5875.2 [Aspergillus
  misc_feature (1)..(291): Homolog of NCBI NO: 16877011 NR Description: HIV-1 rev binding protein 2 [Homo sapiens]
  misc_feature (1)..(291): Homolog of NCBI NO: 34864853 NR Description: similar to dribble CG4258-PA [Rattus norvegicus]

SEQ ID NO: 92064 - DNA, 1068 bp, Arabidopsis thaliana; identical to SEQ ID NO: 88308
  misc_feature (1)..(1068): Ceres Seq. ID no. 12707526
  misc_feature: MA Experiment ID: 20000180 Result: Up-regulated in Transcription
  misc_feature: MA Experiment 20000180 PARAMETER Experiment Name: At_Germinating_Seeds_P Parameter: Age (hr) Value: 24 vs. 0
  misc_feature: MA Experiment 20000180 PARAMETER Experiment Name: At_Germinating_Seeds_P Parameter: Tissue Value: Germinating Seeds
  misc_feature: MA Experiment ID: 20001906 Result: Up-regulated in Transcription
  misc_feature: MA Experiment 20001906 PARAMETER Experiment Name: At_Drought_Reproduction_P Parameter: Age (day) Value: 35
  misc_feature: MA Experiment 20001906 PARAMETER Experiment Name: At_Drought_Reproduction_P Parameter: Organism Value: A. thaliana
  misc_feature: MA Experiment 20001906 PARAMETER Experiment Name: At_Drought_Reproduction_P Parameter: Plant Line Value: WS
  misc_feature: MA Experiment 20001906 PARAMETER Experiment Name: At_Drought_Reproduction_P Parameter: Timepoint (day) Value: 5
  misc_feature: MA Experiment 20001906 PARAMETER Experiment Name: At_Drought_Reproduction_P Parameter: Tissue Value: Siliques
  misc_feature: MA Experiment 20001906 PARAMETER Experiment Name: At_Drought_Reproduction_P Parameter: Treatment Value: Drought vs. No Drought

SEQ ID NO: 92065 - protein, 355 aa, Arabidopsis thaliana; identical to SEQ ID NO: 88309
  peptide (1)..(355): Ceres Seq. ID no. 12707527
  misc_feature (50)..(143): Pfam Name: GDSL-like Lipase/Acylhydrolase Pfam Description: GDSL-like Lipase/Acylhydrolase
  misc_feature (144)..(355): Homolog of NCBI NO: 15241626 NR Description: GDSL-motif lipase acylhydrolase-like protein;
  misc_feature (1)..(143): Homolog of NCBI NO: 15241626 NR Description: GDSL-motif lipase acylhydrolase-like protein;
  misc_feature (127)..(355): Homolog of NCBI NO: 21594055 NR Description: lipase/hydrolase, putative [Arabidopsis thaliana]
  misc_feature (27)..(143): Homolog of NCBI NO: 21594055 NR Description: lipase/hydrolase, putative [Arabidopsis thaliana]
  misc_feature (127)..(355): Homolog of NCBI NO: 15220512 NR Description: lipase/hydrolase, putative; protein id: supported by cDNA: 6680., supported by cDNA: gi_15215767
  misc_feature (27)..(143): Homolog of NCBI NO: 15220512 NR Description: lipase/hydrolase, putative; protein id: supported by cDNA: 6680., supported by cDNA: gi_15215767
  misc_feature (122)..(355): Homolog of NCBI NO: 7485419 NR Description: hypothetical protein F13C5.140 - Arabidopsis >gi|2832625|emb|CAA16754.1| putative protein [Arabidopsis >gi|7268691|emb|CAB78899.1| putative protein [Arabidopsis
  misc_feature (122)..(355): Homolog of NCBI NO: 18415211 NR Description: Expressed protein; protein id: At4g18970.1, by cDNA: 42850., supported by cDNA: gi_16604576, supported by gi_21281049 [Arabidopsis thaliana] >gi|16604577|gb|AAL24090.1|
  misc_feature (48)..(143): Homolog of NCBI NO: 7485419 NR Description: hypothetical protein F13C5.140 - Arabidopsis >gi|2832625|emb|CAA16754.1| putative protein [Arabidopsis >gi|7268691|emb|CAB78899.1| putative protein [Arabidopsis
  misc_feature (48)..(143): Homolog of NCBI NO: 18415211 NR Description: Expressed protein; protein id: At4g18970.1, by cDNA: 42850., supported by cDNA: gi_16604576, supported by gi_21281049 [Arabidopsis thaliana] >gi|16604577|gb|AAL24090.1|

SEQ ID NO: 92066 - protein, 344 aa, Arabidopsis thaliana; identical to SEQ ID NO: 88310
  peptide (1)..(344): Ceres Seq. ID no. 12707528
  misc_feature (39)..(132): Pfam Name: GDSL-like Lipase/Acylhydrolase Pfam Description: GDSL-like Lipase/Acylhydrolase
  misc_feature (133)..(344): Homolog of NCBI NO: 15241626 NR Description: GDSL-motif lipase acylhydrolase-like protein;
  misc_feature (1)..(132): Homolog of NCBI NO: 15241626 NR Description: GDSL-motif lipase acylhydrolase-like protein;
  misc_feature (116)..(344): Homolog of NCBI NO: 21594055 NR Description: lipase/hydrolase, putative [Arabidopsis thaliana]
  misc_feature (16)..(132): Homolog of NCBI NO: 21594055 NR Description: lipase/hydrolase, putative [Arabidopsis thaliana]
  misc_feature (116)..(344): Homolog of NCBI NO: 15220512 NR Description: lipase/hydrolase, putative; protein id: supported by cDNA: 6680., supported by cDNA: gi_15215767
  misc_feature (16)..(132): Homolog of NCBI NO: 15220512 NR Description: lipase/hydrolase, putative; protein id: supported by cDNA: 6680., supported by cDNA: gi_15215767
  misc_feature (111)..(344): Homolog of NCBI NO: 7485419 NR Description: hypothetical protein F13C5.140 - Arabidopsis >gi|2832625|emb|CAA16754.1| putative protein [Arabidopsis >gi|7268691|emb|CAB78899.1| putative protein [Arabidopsis
  misc_feature (111)..(344): Homolog of NCBI NO: 18415211 NR Description: Expressed protein; protein id: At4g18970.1, by cDNA: 42850., supported by cDNA: gi_16604576, supported by gi_21281049 [Arabidopsis thaliana] >gi|16604577|gb|AAL24090.1|
  misc_feature (37)..(132): Homolog of NCBI NO: 7485419 NR Description: hypothetical protein F13C5.140 - Arabidopsis >gi|2832625|emb|CAA16754.1| putative protein [Arabidopsis >gi|7268691|emb|CAB78899.1| putative protein [Arabidopsis
  misc_feature (37)..(132): Homolog of NCBI NO: 18415211 NR Description: Expressed protein; protein id: At4g18970.1, by cDNA: 42850., supported by cDNA: gi_16604576, supported by gi_21281049 [Arabidopsis thaliana] >gi|16604577|gb|AAL24090.1|

SEQ ID NO: 92067 - protein, 343 aa, Arabidopsis thaliana; identical to SEQ ID NO: 88311
  peptide (1)..(343): Ceres Seq. ID no. 12707529
  misc_feature (38)..(131): Pfam Name: GDSL-like Lipase/Acylhydrolase Pfam Description: GDSL-like Lipase/Acylhydrolase
  misc_feature (132)..(343): Homolog of NCBI NO: 15241626 NR Description: GDSL-motif lipase acylhydrolase-like protein;
  misc_feature (1)..(131): Homolog of NCBI NO: 15241626 NR Description: GDSL-motif lipase acylhydrolase-like protein;
  misc_feature (115)..(343): Homolog of NCBI NO: 21594055 NR Description: lipase/hydrolase, putative [Arabidopsis thaliana]
  misc_feature (15)..(131): Homolog of NCBI NO: 21594055 NR Description: lipase/hydrolase, putative [Arabidopsis thaliana]
  misc_feature (115)..(343): Homolog of NCBI NO: 15220512 NR Description: lipase/hydrolase, putative; protein id: supported by cDNA: 6680., supported by cDNA: gi_15215767
  misc_feature (15)..(131): Homolog of NCBI NO: 15220512 NR Description: lipase/hydrolase, putative; protein id: supported by cDNA: 6680., supported by cDNA: gi_15215767
  misc_feature (110)..(343): Homolog of NCBI NO: 7485419 NR Description: hypothetical protein F13C5.140 - Arabidopsis >gi|2832625|emb|CAA16754.1| putative protein [Arabidopsis >gi|7268691|emb|CAB78899.1| putative protein [Arabidopsis
  misc_feature (110)..(343): Homolog of NCBI NO: 18415211 NR Description: Expressed protein; protein id: At4g18970.1, by cDNA: 42850., supported by cDNA: gi_16604576, supported by gi_21281049 [Arabidopsis thaliana] >gi|16604577|gb|AAL24090.1|
  misc_feature (36)..(131): Homolog of NCBI NO: 7485419 NR Description: hypothetical protein F13C5.140 - Arabidopsis >gi|2832625|emb|CAA16754.1| putative protein [Arabidopsis >gi|7268691|emb|CAB78899.1| putative protein [Arabidopsis
  misc_feature (36)..(131): Homolog of NCBI NO: 18415211 NR Description: Expressed protein; protein id: At4g18970.1, by cDNA: 42850., supported by cDNA: gi_16604576, supported by gi_21281049 [Arabidopsis thaliana] >gi|16604577|gb|AAL24090.1|

SEQ ID NO: 92068 - DNA, 2499 bp, Arabidopsis thaliana; identical to SEQ ID NO: 88312
  misc_feature (1)..(2499): Ceres Seq. ID no. 12707549
  misc_feature: MA Experiment ID: 20000180 Result: Down-regulated in Transcription
  misc_feature: MA Experiment 20000180 PARAMETER Experiment Name: At_Germinating_Seeds_P Parameter: Age (hr) Value: 24 vs. 0
  misc_feature: MA Experiment 20000180 PARAMETER Experiment Name: At_Germinating_Seeds_P Parameter: Tissue Value: Germinating Seeds
  misc_feature: MA Experiment ID: 20000573 Result: Down-regulated in Transcription
  misc_feature: MA Experiment 20000573 PARAMETER Experiment Name: At_100uM_ABA_Mutants__P Parameter: Organism Value: A. thaliana
  misc_feature: MA Experiment 20000573 PARAMETER Experiment Name: At_100uM_ABA_Mutants__P Parameter: Plant Line Value: CS22 vs. Ler wt
  misc_feature: MA Experiment 20000573 PARAMETER Experiment Name: At_100uM_ABA_Mutants__P Parameter: Timepoint (hr) Value: N/A
  misc_feature: MA Experiment 20000573 PARAMETER Experiment Name: At_100uM_ABA_Mutants__P Parameter: Tissue Value: Whole Plant
  misc_feature: MA Experiment 20000573 PARAMETER Experiment Name: At_100uM_ABA_Mutants__P Parameter: Treatment Value: None
  misc_feature: MA Experiment ID: 20001248 Result: Up-regulated in Transcription
  misc_feature: MA Experiment 20001248 PARAMETER Experiment Name: At_Far-red-induction_P Parameter: Age (day) Value: 7
  misc_feature: MA Experiment 20001248 PARAMETER Experiment Name: At_Far-red-induction_P Parameter: Light Value: Far-red vs. White
  misc_feature: MA Experiment 20001248 PARAMETER Experiment Name: At_Far-red-induction_P Parameter: Organism Value: A. thaliana
  misc_feature: MA Experiment 20001248 PARAMETER Experiment Name: At_Far-red-induction_P Parameter: Plant Line Value: Columbia
  misc_feature: MA Experiment 20001248 PARAMETER Experiment Name: At_Far-red-induction_P Parameter: Timepoint (hr) Value: 4
  misc_feature: MA Experiment 20001248 PARAMETER Experiment Name: At_Far-red-induction_P Parameter: Tissue Value: Whole Plant

SEQ ID NO: 92069 - protein, 832 aa, Arabidopsis thaliana; identical to SEQ ID NO: 88313
  peptide (1)..(832): Ceres Seq. ID no. 12707550
  misc_feature (44)..(818): Homolog of NCBI NO: 30679129 NR Description: expressed protein [Arabidopsis thaliana]
  misc_feature (44)..(818): Homolog of NCBI NO: 7487011 NR Description: hypothetical protein T14P8.20 - Arabidopsis >gi|3193300|gb|AAC19284.1| T14P8.20 gene product [Arabidopsis >gi|7269000|emb|CAB80733.1| contains EST gb:AI998867.1
  misc_feature (4)..(626): Homolog of NCBI NO: 7487011 NR Description: hypothetical protein T14P8.20 - Arabidopsis >gi|3193300|gb|AAC19284.1| T14P8.20 gene product [Arabidopsis >gi|7269000|emb|CAB80733.1| contains EST gb:AI998867.1
  misc_feature (4)..(626): Homolog of NCBI NO: 30679129 NR Description: expressed protein [Arabidopsis thaliana]
  misc_feature (61)..(797): Homolog of NCBI NO: 19114287 NR Description: hypothetical coiled-coil protein pombe] >gi|3183291|sp|P87137|YDM6_SCHPO Hypothetical protein
  misc_feature (100)..(822): Homolog of NCBI NO: 23599203 NR Description: RIKEN cDNA 2700066J21 [Mus musculus]
  misc_feature (84)..(801): Homolog of NCBI NO: 18056469 NR Description: dJ537K23.3 (KIAA0266 protein) [Homo sapiens]
  misc_feature (84)..(801): Homolog of NCBI NO: 21361348 NR Description: serologically defined colon cancer antigen 16 sapiens] >gi|12654625|gb|AAH01149.1|AAH01149 Similar to KIAA0266 product [Homo sapiens] >gi|15929064|gb|AAH14987.1|AAH14987
  misc_feature (92)..(801): Homolog of NCBI NO: 11063983 NR Description: KIAA0266 gene product [Homo sapiens] Similar to S.cerevisiae hypothetical protein 5 (S49634) [Homo
  misc_feature (92)..(801): Homolog of NCBI NO: 40788930 NR Description: KIAA0266 [Homo sapiens]

SEQ ID NO: 92070 - protein, 719 aa, Arabidopsis thaliana; identical to SEQ ID NO: 88314
  peptide (1)..(719): Ceres Seq. ID no. 12707551
  misc_feature (1)..(705): Homolog of NCBI NO: 30679129 NR Description: expressed protein [Arabidopsis thaliana]
  misc_feature (1)..(705): Homolog of NCBI NO: 7487011 NR Description: hypothetical protein T14P8.20 - Arabidopsis >gi|3193300|gb|AAC19284.1| T14P8.20 gene product [Arabidopsis >gi|7269000|emb|CAB80733.1| contains EST gb:AI998867.1
  misc_feature (1)..(513): Homolog of NCBI NO: 7487011 NR Description: hypothetical protein T14P8.20 - Arabidopsis >gi|3193300|gb|AAC19284.1| T14P8.20 gene product [Arabidopsis >gi|7269000|emb|CAB80733.1| contains EST gb:AI998867.1
  misc_feature (1)..(513): Homolog of NCBI NO: 30679129 NR Description: expressed protein [Arabidopsis thaliana]
  misc_feature (1)..(684): Homolog of NCBI NO: 19114287 NR Description: hypothetical coiled-coil protein pombe] >gi|3183291|sp|P87137|YDM6_SCHPO Hypothetical protein
  misc_feature (1)..(709): Homolog of NCBI NO: 23599203 NR Description: RIKEN cDNA 2700066J21 [Mus musculus]
  misc_feature (1)..(688): Homolog of NCBI NO: 18056469 NR Description: dJ537K23.3 (KIAA0266 protein) [Homo sapiens]
  misc_feature (1)..(688): Homolog of NCBI NO: 21361348 NR Description: serologically defined colon cancer antigen 16 sapiens] >gi|12654625|gb|AAH01149.1|AAH01149 Similar to KIAA0266 product [Homo sapiens] >gi|15929064|gb|AAH14987.1|AAH14987
  misc_feature (1)..(688): Homolog of NCBI NO: 11063983 NR Description: KIAA0266 gene product [Homo sapiens] Similar to S.cerevisiae hypothetical protein 5 (S49634) [Homo
  misc_feature (1)..(688): Homolog of NCBI NO: 40788930 NR Description: KIAA0266 [Homo sapiens]

SEQ ID NO: 92071 - protein, 668 aa, Arabidopsis thaliana; identical to SEQ ID NO: 88315
  peptide (1)..(668): Ceres Seq. ID no. 12707552
  misc_feature (1)..(654): Homolog of NCBI NO: 30679129 NR Description: expressed protein [Arabidopsis thaliana]
  misc_feature (1)..(654): Homolog of NCBI NO: 7487011 NR Description: hypothetical protein T14P8.20 - Arabidopsis >gi|3193300|gb|AAC19284.1| T14P8.20 gene product [Arabidopsis >gi|7269000|emb|CAB80733.1| contains EST gb:AI998867.1
  misc_feature (1)..(462): Homolog of NCBI NO: 7487011 NR Description: hypothetical protein T14P8.20 - Arabidopsis >gi|3193300|gb|AAC19284.1| T14P8.20 gene product [Arabidopsis >gi|7269000|emb|CAB80733.1| contains EST gb:AI998867.1
  misc_feature (1)..(462): Homolog of NCBI NO: 30679129 NR Description: expressed protein [Arabidopsis thaliana]
  misc_feature (1)..(633): Homolog of NCBI NO: 19114287 NR Description: hypothetical coiled-coil protein pombe] >gi|3183291|sp|P87137|YDM6_SCHPO Hypothetical protein
  misc_feature (1)..(658): Homolog of NCBI NO: 23599203 NR Description: RIKEN cDNA 2700066J21 [Mus musculus]
  misc_feature (1)..(637): Homolog of NCBI NO: 18056469 NR Description: dJ537K23.3 (KIAA0266 protein) [Homo sapiens]
  misc_feature (1)..(637): Homolog of NCBI NO: 21361348 NR Description: serologically defined colon cancer antigen 16 sapiens] >gi|12654625|gb|AAH01149.1|AAH01149 Similar to KIAA0266 product [Homo sapiens] >gi|15929064|gb|AAH14987.1|AAH14987
  misc_feature (1)..(637): Homolog of NCBI NO: 11063983 NR Description: KIAA0266 gene product [Homo sapiens] Similar to S.cerevisiae hypothetical protein 5 (S49634) [Homo
  misc_feature (1)..(637): Homolog of NCBI NO: 40788930 NR Description: KIAA0266 [Homo sapiens]

SEQ ID NO: 92072 - DNA, 1965 bp, Arabidopsis thaliana; identical to SEQ ID NO: 88316
  misc_feature (1)..(1965): Ceres Seq. ID no. 12707561
  misc_feature: MA Experiment ID: 20000173 Result: Down-regulated in Transcription
  misc_feature: MA Experiment 20000173 PARAMETER Experiment Name: At_42deg_Heat_P Parameter: Age (day) Value: 14
  misc_feature: MA Experiment 20000173 PARAMETER Experiment Name: At_42deg_Heat_P Parameter: Organism Value: A. thaliana
  misc_feature: MA Experiment 20000173 PARAMETER Experiment Name: At_42deg_Heat_P Parameter: Plant Line Value: WS
  misc_feature: MA Experiment 20000173 PARAMETER Experiment Name: At_42deg_Heat_P Parameter: Temperature (deg C) Value: 42 vs. 22
  misc_feature: MA Experiment 20000173 PARAMETER Experiment Name: At_42deg_Heat_P Parameter: Timepoint (hr) Value: 6
  misc_feature: MA Experiment 20000173 PARAMETER Experiment Name: At_42deg_Heat_P Parameter: Tissue Value: Aerial
  misc_feature: MA Experiment ID: 20000184 Result: Down-regulated in Transcription
  misc_feature: MA Experiment 20000184 PARAMETER Experiment Name: At_Shoots__P Parameter: Age (day) Value: 7
  misc_feature: MA Experiment 20000184 PARAMETER Experiment Name: At_Shoots__P Parameter: Tissue Value: Shoots vs. Whole Plant
  misc_feature: MA Experiment ID: 20000265 Result: Down-regulated in Transcription
  misc_feature: MA Experiment 20000265 PARAMETER Experiment Name: At_Open_Flower_P Parameter: Age (day) Value: 21
  misc_feature: MA Experiment 20000265 PARAMETER Experiment Name: At_Open_Flower_P Parameter: Plant Line Value: WS
  misc_feature: MA Experiment 20000265 PARAMETER Experiment Name: At_Open_Flower_P Parameter: Tissue Value: Closed Flower vs. Whole Plant
  misc_feature: MA Experiment ID: 20000438 Result: Down-regulated in Transcription
  misc_feature: MA Experiment 20000438 PARAMETER Experiment Name: At_Shoots__P Parameter: Age (day) Value: 14
  misc_feature: MA Experiment 20000438 PARAMETER Experiment Name: At_Shoots__P Parameter: Tissue Value: Shoots vs. Whole Plant
  misc_feature: MA Experiment ID: 20001905 Result: Up-regulated in Transcription
  misc_feature: MA Experiment 20001905 PARAMETER Experiment Name: At_Drought_Reproduction_P Parameter: Age (day) Value: 40
  misc_feature: MA Experiment 20001905 PARAMETER Experiment Name: At_Drought_Reproduction_P Parameter: Organism Value: A. thaliana
  misc_feature: MA Experiment 20001905 PARAMETER Experiment Name: At_Drought_Reproduction_P Parameter: Plant Line Value: WS
  misc_feature: MA Experiment 20001905 PARAMETER Experiment Name: At_Drought_Reproduction_P Parameter: Timepoint (day) Value: 10
  misc_feature: MA Experiment 20001905 PARAMETER Experiment Name: At_Drought_Reproduction_P Parameter: Tissue Value: Rosettes
  misc_feature: MA Experiment 20001905 PARAMETER Experiment Name: At_Drought_Reproduction_P Parameter: Treatment Value: Drought vs. No Drought

SEQ ID NO: 92073 - protein, 654 aa, Arabidopsis thaliana; identical to SEQ ID NO: 88317
  peptide (1)..(654): Ceres Seq. ID no. 12707562
  misc_feature (371)..(456): Pfam Name: Protein of unknown function (DUF668) Pfam Description: Protein of unknown function (DUF668)
  misc_feature (1)..(636): Homolog of NCBI NO: 15218580 NR Description: hypothetical protein; protein id: At1g34320.1
  misc_feature (262)..(636): Homolog of NCBI NO: 25403424 NR Description: protein F23M19.3 [imported] - Arabidopsis >gi|5091616|gb|AAD39604.1|AC007454_3 F23M19.3 [Arabidopsis
  misc_feature (1)..(253): Homolog of NCBI NO: 25403424 NR Description: protein F23M19.3 [imported] - Arabidopsis >gi|5091616|gb|AAD39604.1|AC007454_3 F23M19.3 [Arabidopsis
  misc_feature (102)..(633): Homolog of NCBI NO: 18397646 NR Description: unknown protein; protein id: At1g30755.1, by cDNA: gi_20466801 [Arabidopsis thaliana]
  misc_feature (112)..(538): Homolog of NCBI NO: 38345368 NR Description: OSJNBa0088K19.7 [Oryza sativa (japonica
  misc_feature (113)..(633): Homolog of NCBI NO: 34908726 NR Description: P0491F11.23 [Oryza sativa (japonica
  misc_feature (102)..(456): Homolog of NCBI NO: 25513510 NR Description: T5I8.21 protein - Arabidopsis thaliana
  misc_feature (71)..(208): Homolog of NCBI NO: 34908726 NR Description: P0491F11.23 [Oryza sativa (japonica
  misc_feature (149)..(399): Homolog of NCBI NO: 15228977 NR Description: hypothetical protein; protein id: At3g23160.1
  misc_feature (372)..(511): Homolog of NCBI NO: 15228977 NR Description: hypothetical protein; protein id: At3g23160.1

SEQ ID NO: 92074 - protein, 608 aa, Arabidopsis thaliana; identical to SEQ ID NO: 88318
  peptide (1)..(608): Ceres Seq. ID no. 12707563
  misc_feature (325)..(410): Pfam Name: Protein of unknown function (DUF668) Pfam Description: Protein of unknown function (DUF668)
  misc_feature (1)..(590): Homolog of NCBI NO: 15218580 NR Description: hypothetical protein; protein id: At1g34320.1
  misc_feature (216)..(590): Homolog of NCBI NO: 25403424 NR Description: protein F23M19.3 [imported] - Arabidopsis >gi|5091616|gb|AAD39604.1|AC007454_3 F23M19.3 [Arabidopsis
  misc_feature (1)..(207): Homolog of NCBI NO: 25403424 NR Description: protein F23M19.3 [imported] - Arabidopsis >gi|5091616|gb|AAD39604.1|AC007454_3 F23M19.3 [Arabidopsis
  misc_feature (56)..(587): Homolog of NCBI NO: 18397646 NR Description: unknown protein; protein id: At1g30755.1, by cDNA: gi_20466801 [Arabidopsis thaliana]
  misc_feature (66)..(492): Homolog of NCBI NO: 38345368 NR Description: OSJNBa0088K19.7 [Oryza sativa (japonica
  misc_feature (67)..(587): Homolog of NCBI NO: 34908726 NR Description: P0491F11.23 [Oryza sativa (japonica
  misc_feature (56)..(410): Homolog of NCBI NO: 25513510 NR Description: T5I8.21 protein - Arabidopsis thaliana
  misc_feature (25)..(162): Homolog of NCBI NO: 34908726 NR Description: P0491F11.23 [Oryza sativa (japonica
  misc_feature (103)..(353): Homolog of NCBI NO: 15228977 NR Description: hypothetical protein; protein id: At3g23160.1
  misc_feature (326)..(465): Homolog of NCBI NO: 15228977 NR Description: hypothetical protein; protein id: At3g23160.1

SEQ ID NO: 92075 - protein, 604 aa, Arabidopsis thaliana; identical to SEQ ID NO: 88319
  peptide (1)..(604): Ceres Seq. ID no. 12707564
  misc_feature (321)..(406): Pfam Name: Protein of unknown function (DUF668) Pfam Description: Protein of unknown function (DUF668)
  misc_feature (1)..(586): Homolog of NCBI NO: 15218580 NR Description: hypothetical protein; protein id: At1g34320.1
  misc_feature (212)..(586): Homolog of NCBI NO: 25403424 NR Description: protein F23M19.3 [imported] - Arabidopsis >gi|5091616|gb|AAD39604.1|AC007454_3 F23M19.3 [Arabidopsis
  misc_feature (1)..(203): Homolog of NCBI NO: 25403424 NR Description: protein F23M19.3 [imported] - Arabidopsis >gi|5091616|gb|AAD39604.1|AC007454_3 F23M19.3 [Arabidopsis
  misc_feature (52)..(583): Homolog of NCBI NO: 18397646 NR Description: unknown protein; protein id: At1g30755.1, by cDNA: gi_20466801 [Arabidopsis thaliana]
  misc_feature (62)..(488): Homolog of NCBI NO: 38345368 NR Description: OSJNBa0088K19.7 [Oryza sativa (japonica
  misc_feature (63)..(583): Homolog of NCBI NO: 34908726 NR Description: P0491F11.23 [Oryza sativa (japonica
  misc_feature (52)..(406): Homolog of NCBI NO: 25513510 NR Description: T5I8.21 protein - Arabidopsis thaliana
  misc_feature (21)..(158): Homolog of NCBI NO: 34908726 NR Description: P0491F11.23 [Oryza sativa (japonica
  misc_feature (99)..(349): Homolog of NCBI NO: 15228977 NR Description: hypothetical protein; protein id: At3g23160.1
  misc_feature (322)..(461): Homolog of NCBI NO: 15228977 NR Description: hypothetical protein; protein id: At3g23160.1

SEQ ID NO: 92076 - DNA, 1334 bp, Arabidopsis thaliana; identical to SEQ ID NO: 88320
  misc_feature (1)..(1334): Ceres Seq. ID no. 12707565
  misc_feature: MA Experiment ID: 108435 Result: Up-regulated in Transcription
  misc_feature: MA Experiment 108435 PARAMETER Experiment Name: At_stm_Mutants_cDNA_P Parameter: Plant Line Value: wt Landsburg vs stm
  misc_feature: MA Experiment 108435 PARAMETER Experiment Name: At_stm_Mutants_cDNA_P Parameter: Tissue Value: Shoot Apical Meristem Region
  misc_feature: MA Experiment ID: 108461 Result: Up-regulated in Transcription
  misc_feature: MA Experiment 108461 PARAMETER Experiment Name: At_Germinating_Seeds_cDNA_P Parameter: Age (day) Value: 1 vs. 0
  misc_feature: MA Experiment 108461 PARAMETER Experiment Name: At_Germinating_Seeds_cDNA_P Parameter: Tissue Value: Germinating Seeds
  misc_feature: MA Experiment ID: 108462 Result: Up-regulated in Transcription
  misc_feature: MA Experiment 108462 PARAMETER Experiment Name: At_Germinating_Seeds_cDNA_P Parameter: Age (day) Value: 2 vs. 0
  misc_feature: MA Experiment 108462 PARAMETER Experiment Name: At_Germinating_Seeds_cDNA_P Parameter: Tissue Value: Germinating Seeds
  misc_feature: MA Experiment ID: 108463 Result: Up-regulated in Transcription
  misc_feature: MA Experiment 108463 PARAMETER Experiment Name: At_Germinating_Seeds_cDNA_P Parameter: Age (day) Value: 3 vs. 0
  misc_feature: MA Experiment 108463 PARAMETER Experiment Name: At_Germinating_Seeds_cDNA_P Parameter: Tissue Value: Germinating Seeds
  misc_feature: MA Experiment ID: 108464 Result: Up-regulated in Transcription
  misc_feature: MA Experiment 108464 PARAMETER Experiment Name: At_Germinating_Seeds_cDNA_P Parameter: Age (day) Value: 4 vs. 0
  misc_feature: MA Experiment 108464 PARAMETER Experiment Name: At_Germinating_Seeds_cDNA_P Parameter: Tissue Value: Germinating Seeds
  misc_feature: MA Experiment ID: 108501 Result: Up-regulated in Transcription
  misc_feature: MA Experiment 108501 PARAMETER Experiment Name: At_ap2_floral_buds_cDNA_P Parameter: Plant Line Value: ap2 (Ler.)
  misc_feature: MA Experiment 108501 PARAMETER Experiment Name: At_ap2_floral_buds_cDNA_P Parameter: Tissue Value: Closed Flower
  misc_feature: MA Experiment ID: 108561 Result: Down-regulated in Transcription
  misc_feature: MA Experiment 108561 PARAMETER Experiment Name: At_100uM_ABA_cDNA_P Parameter: Timepoint (hr) Value: 6
  misc_feature: MA Experiment 108561 PARAMETER Experiment Name: At_100uM_ABA_cDNA_P Parameter: Tissue Value: Aerial
  misc_feature: MA Experiment 108561 PARAMETER Experiment Name: At_100uM_ABA_cDNA_P Parameter: Treatment Value: 100uM ABA vs. No Treatment
  misc_feature: MA Experiment ID: 108573 Result: Down-regulated in Transcription
  misc_feature: MA Experiment 108573 PARAMETER Experiment Name: At_Drought_cDNA_P Parameter: Timepoint (hr) Value: 6
  misc_feature: MA Experiment 108573 PARAMETER Experiment Name: At_Drought_cDNA_P Parameter: Tissue Value: Aerial
  misc_feature: MA Experiment 108573 PARAMETER Experiment Name: At_Drought_cDNA_P Parameter: Treatment Value: Drought vs. No Drought
  misc_feature: MA Experiment ID: 108579 Result: Up-regulated in Transcription
  misc_feature: MA Experiment 108579 PARAMETER Experiment Name: At_4deg_Cold_cDNA_P Parameter: Temperature (deg C) Value: 4 vs. 22
  misc_feature: MA Experiment 108579 PARAMETER Experiment Name: At_4deg_Cold_cDNA_P Parameter: Timepoint (hr) Value: 6
  misc_feature: MA Experiment 108579 PARAMETER Experiment Name: At_4deg_Cold_cDNA_P Parameter: Tissue Value: Aerial
  misc_feature: MA Experiment ID: 108594 Result: Down-regulated in Transcription
  misc_feature: MA Experiment 108594 PARAMETER Experiment Name: At_Ler-rhl_Root_cDNA_P Parameter: Plant Line Value: null
  misc_feature: MA Experiment ID: 108605 Result: Down-regulated in Transcription
  misc_feature: MA Experiment 108605 PARAMETER Experiment Name: At_100uM_ABA_cDNA_P Parameter: Timepoint (hr) Value: 6
  misc_feature: MA Experiment 108605 PARAMETER Experiment Name: At_100uM_ABA_cDNA_P Parameter: Tissue Value: Aerial
  misc_feature: MA Experiment 108605 PARAMETER Experiment Name: At_100uM_ABA_cDNA_P Parameter: Treatment Value: 100uM ABA vs. No Treatment
  misc_feature: MA Experiment ID: 108609 Result: Down-regulated in Transcription
  misc_feature: MA Experiment 108609 PARAMETER Experiment Name: At_100uM_ABA_cDNA_P Parameter: Timepoint (hr) Value: 24
  misc_feature: MA Experiment 108609 PARAMETER Experiment Name: At_100uM_ABA_cDNA_P Parameter: Tissue Value: Aerial
  misc_feature: MA Experiment 108609 PARAMETER Experiment Name: At_100uM_ABA_cDNA_P Parameter: Treatment Value: 100uM ABA vs. No Treatment
  misc_feature: MA Experiment ID: 20000069 Result: Down-regulated in Transcription
  misc_feature: MA Experiment 20000069 PARAMETER Experiment Name: At_100uM_ABA_Mutants_cDNA_P Parameter: Plant Line Value: CS23
  misc_feature: MA Experiment 20000069 PARAMETER Experiment Name: At_100uM_ABA_Mutants_cDNA_P Parameter: Timepoint (hr) Value: 6
  misc_feature: MA Experiment 20000069 PARAMETER Experiment Name: At_100uM_ABA_Mutants_cDNA_P Parameter: Tissue Value: Aerial
  misc_feature: MA Experiment 20000069 PARAMETER Experiment Name: At_100uM_ABA_Mutants_cDNA_P Parameter: Treatment Value: 100uM ABA vs. No Treatment
  misc_feature: MA Experiment ID: 20000070 Result: Down-regulated in Transcription
  misc_feature: MA Experiment 20000070 PARAMETER Experiment Name: At_100uM_ABA_Mutants_cDNA_P Parameter: Plant Line Value: CS24
  misc_feature: MA Experiment 20000070 PARAMETER Experiment Name: At_100uM_ABA_Mutants_cDNA_P Parameter: Timepoint (hr) Value: 6
  misc_feature: MA Experiment 20000070 PARAMETER Experiment Name: At_100uM_ABA_Mutants_cDNA_P Parameter: Tissue Value: Aerial
  misc_feature: MA Experiment 20000070 PARAMETER Experiment Name: At_100uM_ABA_Mutants_cDNA_P Parameter: Treatment Value: 100uM ABA vs. No Treatment
  misc_feature: MA Experiment ID: 20000071 Result: Down-regulated in Transcription
  misc_feature: MA Experiment 20000071 PARAMETER Experiment Name: At_100uM_ABA_Mutants_cDNA_P Parameter: Plant Line Value: CS8104
  misc_feature: MA Experiment 20000071 PARAMETER Experiment Name: At_100uM_ABA_Mutants_cDNA_P Parameter: Timepoint (hr) Value: 6
  misc_feature: MA Experiment 20000071 PARAMETER Experiment Name: At_100uM_ABA_Mutants_cDNA_P Parameter: Tissue Value: Aerial
  misc_feature: MA Experiment 20000071 PARAMETER Experiment Name: At_100uM_ABA_Mutants_cDNA_P Parameter: Treatment Value: 100uM ABA vs. No Treatment
  misc_feature: MA Experiment ID: 20000086 Result: Down-regulated in Transcription
  misc_feature: MA Experiment 20000086 PARAMETER Experiment Name: At_100uM_ABA_Mutants_cDNA_P Parameter: Plant Line Value: CS22
  misc_feature: MA Experiment 20000086 PARAMETER Experiment Name: At_100uM_ABA_Mutants_cDNA_P Parameter: Timepoint (hr) Value: 6
  misc_feature: MA Experiment 20000086 PARAMETER Experiment Name: At_100uM_ABA_Mutants_cDNA_P Parameter: Tissue Value: Aerial
  misc_feature: MA Experiment 20000086 PARAMETER Experiment Name: At_100uM_ABA_Mutants_cDNA_P Parameter: Treatment Value: 100uM ABA vs. No Treatment
  misc_feature: MA Experiment ID: 20000087 Result: Down-regulated in Transcription
  misc_feature: MA Experiment 20000087 PARAMETER Experiment Name: At_100uM_ABA_Mutants_cDNA_P Parameter: Plant Line Value: WS
  misc_feature: MA Experiment 20000087 PARAMETER Experiment Name: At_100uM_ABA_Mutants_cDNA_P Parameter: Timepoint (hr) Value: 6
  misc_feature: MA Experiment 20000087 PARAMETER Experiment Name: At_100uM_ABA_Mutants_cDNA_P Parameter: Tissue Value: Aerial
  misc_feature: MA Experiment 20000087 PARAMETER Experiment Name: At_100uM_ABA_Mutants_cDNA_P Parameter: Treatment Value: 100uM ABA vs. No Treatment
  misc_feature: MA Experiment ID: 20000088 Result: Down-regulated in Transcription
  misc_feature: MA Experiment 20000088 PARAMETER Experiment Name: At_100uM_ABA_Mutants_cDNA_P Parameter: Plant Line Value: Landsberg
  misc_feature: MA Experiment 20000088 PARAMETER Experiment Name: At_100uM_ABA_Mutants_cDNA_P Parameter: Timepoint (hr) Value: 6
  misc_feature: MA Experiment 20000088 PARAMETER Experiment Name: At_100uM_ABA_Mutants_cDNA_P Parameter: Tissue Value: Aerial
  misc_feature: MA Experiment 20000088 PARAMETER Experiment Name: At_100uM_ABA_Mutants_cDNA_P Parameter: Treatment Value: 100uM ABA vs. No Treatment
  misc_feature: MA Experiment ID: 20000089 Result: Down-regulated in Transcription
  misc_feature: MA Experiment ID: 20000090 Result: Down-regulated in Transcription
  misc_feature: MA Experiment ID: 20000117 Result: Down-regulated in Transcription
  misc_feature: MA Experiment 20000117 PARAMETER Experiment Name: At_100uM_ABA_Mutants_cDNA_P Parameter: Plant Line Value: Columbia
  misc_feature: MA Experiment 20000117 PARAMETER Experiment Name: At_100uM_ABA_Mutants_cDNA_P Parameter: Timepoint (hr) Value: 6
  misc_feature: MA Experiment 20000117 PARAMETER Experiment Name: At_100uM_ABA_Mutants_cDNA_P Parameter: Tissue Value: Aerial
  misc_feature: MA Experiment 20000117 PARAMETER Experiment Name: At_100uM_ABA_Mutants_cDNA_P Parameter: Treatment Value: 100uM ABA vs. No Treatment
  misc_feature: MA Experiment ID: 20000169 Result: Down-regulated in Transcription
  misc_feature: MA Experiment 20000169 PARAMETER Experiment Name: At_100uM_ABA_P Parameter: Age (day) Value: 14
  misc_feature: MA Experiment 20000169 PARAMETER Experiment Name: At_100uM_ABA_P Parameter: Organism Value: A. thaliana
  misc_feature: MA Experiment 20000169 PARAMETER Experiment Name: At_100uM_ABA_P Parameter: Plant Line Value: WS
  misc_feature: MA Experiment 20000169 PARAMETER Experiment Name: At_100uM_ABA_P Parameter: Timepoint (hr) Value: 6
  misc_feature: MA Experiment 20000169 PARAMETER Experiment Name: At_100uM_ABA_P Parameter: Tissue Value: Aerial
  misc_feature: MA Experiment 20000169 PARAMETER Experiment Name: At_100uM_ABA_P Parameter: Treatment Value: 100uM ABA vs. No Treatment
  misc_feature: MA Experiment ID: 20000179 Result: Up-regulated in Transcription
  misc_feature: MA Experiment 20000179 PARAMETER Experiment Name: At_Germinating_Seeds_P Parameter: Age (hr) Value: 6 vs. 0
  misc_feature: MA Experiment 20000179 PARAMETER Experiment Name: At_Germinating_Seeds_P Parameter: Tissue Value: Germinating Seeds
  misc_feature: MA Experiment ID: 20000180 Result: Up-regulated in Transcription
  misc_feature: MA Experiment 20000180 PARAMETER Experiment Name: At_Germinating_Seeds_P Parameter: Age (hr) Value: 24 vs. 0
  misc_feature: MA Experiment 20000180 PARAMETER Experiment Name: At_Germinating_Seeds_P Parameter: Tissue Value: Germinating Seeds
  misc_feature: MA Experiment ID: 20000185 Result: Up-regulated in Transcription
  misc_feature: MA Experiment 20000185 PARAMETER Experiment Name: At_Roots__P Parameter: Age (day) Value: 7 vs. 21
  misc_feature: MA Experiment 20000185 PARAMETER Experiment Name: At_Roots__P Parameter: Organism Value: A. thaliana
  misc_feature: MA Experiment 20000185 PARAMETER Experiment Name: At_Roots__P Parameter: Tissue Value: Roots vs. Whole Plant
  misc_feature: MA Experiment ID: 20000224 Result: Up-regulated in Transcription
  misc_feature: MA Experiment ID: 20000264 Result: Up-regulated in Transcription
  misc_feature: MA Experiment 20000264 PARAMETER Experiment Name: At_Open_Flower_P Parameter: Age (day) Value: 21
  misc_feature: MA Experiment 20000264 PARAMETER Experiment Name: At_Open_Flower_P Parameter: Plant Line Value: WS
  misc_feature: MA Experiment 20000264 PARAMETER Experiment Name: At_Open_Flower_P Parameter: Tissue Value: Open Flower vs. Whole Plant
  misc_feature: MA Experiment ID: 20000286 Result: Up-regulated in Transcription
  misc_feature: MA Experiment 20000286 PARAMETER Experiment Name: At_Open_Flower_P Parameter: Age (day) Value: 21
  misc_feature: MA Experiment 20000286 PARAMETER Experiment Name: At_Open_Flower_P Parameter: Plant Line Value: WS
  misc_feature: MA Experiment 20000286 PARAMETER Experiment Name: At_Open_Flower_P Parameter: Tissue Value: Half Open vs. Whole Plant
  misc_feature: MA Experiment ID: 20000437 Result: Down-regulated in Transcription
  misc_feature: MA Experiment 20000437 PARAMETER Experiment Name: At_Drought_P Parameter: Age (day) Value: 8
  misc_feature: MA Experiment 20000437 PARAMETER Experiment Name: At_Drought_P Parameter: Organism Value: A. thaliana
  misc_feature: MA Experiment 20000437 PARAMETER Experiment Name: At_Drought_P Parameter: Plant Line Value: WS
  misc_feature: MA Experiment 20000437 PARAMETER Experiment Name: At_Drought_P Parameter: Timepoint (hr) Value: 24
  misc_feature: MA Experiment 20000437 PARAMETER Experiment Name: At_Drought_P Parameter: Tissue Value: Whole Plant
  misc_feature: MA Experiment 20000437 PARAMETER Experiment Name: At_Drought_P Parameter: Treatment Value: Drought vs. No Drought
  misc_feature: MA Experiment ID: 20000441 Result: Down-regulated in Transcription
  misc_feature: MA Experiment 20000441 PARAMETER Experiment Name: At_1uM_BR-BRZ__P Parameter: Tissue Value: Shoot Apices
  misc_feature: MA Experiment 20000441 PARAMETER Experiment Name: At_1uM_BR-BRZ__P Parameter: Treatment Value: 1uM BR vs. No Treatment
  misc_feature: MA Experiment ID: 20000443 Result: Down-regulated in Transcription
  misc_feature: MA Experiment 20000443 PARAMETER Experiment Name: At_1uM_BR-BRZ__P Parameter: Tissue Value: Shoot Apices
  misc_feature: MA Experiment 20000443 PARAMETER Experiment Name: At_1uM_BR-BRZ__P Parameter: Treatment Value: 1uM BRZ vs. No Treatment
  misc_feature: MA Experiment ID: 20000453 Result: Down-regulated in Transcription
  misc_feature: MA Experiment 20000453 PARAMETER Experiment Name: At_100uM_ABA_P Parameter: Age (day) Value: 15
  misc_feature: MA Experiment 20000453 PARAMETER Experiment Name: At_100uM_ABA_P Parameter: Organism Value: A. thaliana
  misc_feature: MA Experiment 20000453 PARAMETER Experiment Name: At_100uM_ABA_P Parameter: Plant Line Value: WS
  misc_feature: MA Experiment 20000453 PARAMETER Experiment Name: At_100uM_ABA_P Parameter: Timepoint (hr) Value: 24
  misc_feature: MA Experiment 20000453 PARAMETER Experiment Name: At_100uM_ABA_P Parameter: Tissue Value: Aerial
  misc_feature: MA Experiment 20000453 PARAMETER Experiment Name: At_100uM_ABA_P Parameter: Treatment Value: 100uM ABA vs. No Treatment
  misc_feature: MA Experiment ID: 20000495 Result: Down-regulated in Transcription
  misc_feature: MA Experiment 20000495 PARAMETER Experiment Name: At_Guard_Cells_P Parameter: Harvest Date Value: 8/2/2002
  misc_feature: MA Experiment 20000495 PARAMETER Experiment Name: At_Guard_Cells_P Parameter: Organism Value: A. thaliana
  misc_feature: MA Experiment 20000495 PARAMETER Experiment Name: At_Guard_Cells_P Parameter: Tissue Value: Guard Cells vs. Leaves
  misc_feature: MA Experiment ID: 20000573 Result: Down-regulated in Transcription
  misc_feature: MA Experiment 20000573 PARAMETER Experiment Name: At_100uM_ABA_Mutants__P Parameter: Organism Value: A. thaliana
  misc_feature: MA Experiment 20000573 PARAMETER Experiment Name: At_100uM_ABA_Mutants__P Parameter: Plant Line Value: CS22 vs. Ler wt
  misc_feature: MA Experiment 20000573 PARAMETER Experiment Name: At_100uM_ABA_Mutants__P Parameter: Timepoint (hr) Value: N/A
  misc_feature: MA Experiment 20000573 PARAMETER Experiment Name: At_100uM_ABA_Mutants__P Parameter: Tissue Value: Whole Plant
  misc_feature: MA Experiment 20000573 PARAMETER Experiment Name: At_100uM_ABA_Mutants__P Parameter: Treatment Value: None
  misc_feature: MA Experiment ID: 20000574 Result: Down-regulated in Transcription
  misc_feature: MA Experiment 20000574 PARAMETER Experiment Name: At_100uM_ABA_Mutants__P Parameter: Organism Value: A. thaliana
  misc_feature: MA Experiment 20000574 PARAMETER Experiment Name: At_100uM_ABA_Mutants__P Parameter: Plant Line Value: CS23 vs. Ler wt
  misc_feature: MA Experiment 20000574 PARAMETER Experiment Name: At_100uM_ABA_Mutants__P Parameter: Timepoint (hr) Value: N/A
  misc_feature: MA Experiment 20000574 PARAMETER Experiment Name: At_100uM_ABA_Mutants__P Parameter: Tissue Value: Whole Plant
  misc_feature: MA Experiment 20000574 PARAMETER Experiment Name: At_100uM_ABA_Mutants__P Parameter: Treatment Value: None
  misc_feature: MA Experiment ID: 20001247 Result: Down-regulated in Transcription
  misc_feature: MA Experiment 20001247 PARAMETER Experiment Name: At_Far-red-induction_P Parameter: Age (day) Value: 7
  misc_feature: MA Experiment 20001247 PARAMETER Experiment Name: At_Far-red-induction_P Parameter: Light Value: Far-red vs. White
  misc_feature: MA Experiment 20001247 PARAMETER Experiment Name: At_Far-red-induction_P Parameter: Organism Value: A. thaliana
  misc_feature: MA Experiment 20001247 PARAMETER Experiment Name: At_Far-red-induction_P Parameter: Plant Line Value: Columbia
  misc_feature: MA Experiment 20001247 PARAMETER Experiment Name: At_Far-red-induction_P Parameter: Timepoint (hr) Value: 1
  misc_feature: MA Experiment 20001247 PARAMETER Experiment Name: At_Far-red-induction_P Parameter: Tissue Value: Whole Plant
  misc_feature: MA Experiment ID: 20001450 Result: Down-regulated in Transcription
  misc_feature: MA Experiment 20001450 PARAMETER Experiment Name: At_Far-red-induction_P Parameter: Age (day) Value: 7
  misc_feature: MA Experiment 20001450 PARAMETER Experiment Name: At_Far-red-induction_P Parameter: Light Value: Far-red vs. White
  misc_feature: MA Experiment 20001450 PARAMETER Experiment Name: At_Far-red-induction_P Parameter: Organism Value: A. thaliana
  misc_feature: MA Experiment 20001450 PARAMETER Experiment Name: At_Far-red-induction_P Parameter: Plant Line Value: Columbia
  misc_feature: MA Experiment 20001450 PARAMETER Experiment Name: At_Far-red-induction_P Parameter: Timepoint (hr) Value: 8
  misc_feature: MA Experiment 20001450 PARAMETER Experiment Name: At_Far-red-induction_P Parameter: Tissue Value: Whole Plant
  misc_feature: MA Experiment ID: 20001504 Result: Up-regulated in Transcription
  misc_feature: MA Experiment 20001504 PARAMETER Experiment Name: At_Far-red-enriched_P Parameter: Age (day) Value: 10
  misc_feature: MA Experiment 20001504 PARAMETER Experiment Name: At_Far-red-enriched_P Parameter: Light Value: Far-red enriched vs. White
  misc_feature: MA Experiment 20001504 PARAMETER Experiment Name: At_Far-red-enriched_P Parameter: Organism Value: A. thaliana
  misc_feature: MA Experiment 20001504 PARAMETER Experiment Name: At_Far-red-enriched_P Parameter: Plant Line Value: Columbia
  misc_feature: MA Experiment 20001504 PARAMETER Experiment Name: At_Far-red-enriched_P Parameter: Timepoint (day) Value: 6
  misc_feature: MA Experiment 20001504 PARAMETER Experiment Name: At_Far-red-enriched_P Parameter: Tissue Value: Whole Plant
  misc_feature: MA Experiment ID: 20001556 Result: Up-regulated in Transcription
  misc_feature: MA Experiment 20001556 PARAMETER Experiment Name: At_Drought_Soil_Dry_P Parameter: Age (day) Value: 26
  misc_feature: MA Experiment 20001556 PARAMETER Experiment Name: At_Drought_Soil_Dry_P Parameter: Organism Value: A. thaliana
  misc_feature: MA Experiment 20001556 PARAMETER Experiment Name: At_Drought_Soil_Dry_P Parameter: Plant Line Value: WS
  misc_feature: MA Experiment 20001556 PARAMETER Experiment Name: At_Drought_Soil_Dry_P Parameter: Post Timepoint (hr) Value: None
  misc_feature: MA Experiment 20001556 PARAMETER Experiment Name: At_Drought_Soil_Dry_P Parameter: Post-Treatment Value: None
  misc_feature: MA Experiment 20001556 PARAMETER Experiment Name: At_Drought_Soil_Dry_P Parameter: Timepoint (day) Value: 12
  misc_feature: MA Experiment 20001556 PARAMETER Experiment Name: At_Drought_Soil_Dry_P Parameter: Treatment Value: Drought vs. No Drought
  misc_feature: MA Experiment ID: 20001557 Result: Up-regulated in Transcription
  misc_feature: MA Experiment 20001557 PARAMETER Experiment Name: At_Drought_Soil_Dry_P Parameter: Age (day) Value: 27
  misc_feature: MA Experiment 20001557 PARAMETER Experiment Name: At_Drought_Soil_Dry_P Parameter: Organism Value: A. thaliana
  misc_feature: MA Experiment 20001557 PARAMETER Experiment Name: At_Drought_Soil_Dry_P Parameter: Plant Line Value: WS
  misc_feature: MA Experiment 20001557 PARAMETER Experiment Name: At_Drought_Soil_Dry_P Parameter: Post Timepoint (hr) Value: 3
  misc_feature: MA Experiment 20001557 PARAMETER Experiment Name: At_Drought_Soil_Dry_P Parameter: Post-Treatment Value: Re-Water vs. No Drought
  misc_feature: MA Experiment 20001557 PARAMETER Experiment Name: At_Drought_Soil_Dry_P Parameter: Timepoint (day) Value: 13
  misc_feature: MA Experiment 20001557 PARAMETER Experiment Name: At_Drought_Soil_Dry_P Parameter: Treatment Value: Drought vs. No Drought
  misc_feature: MA Experiment ID: 20001558 Result: Up-regulated in Transcription
  misc_feature: MA Experiment 20001558 PARAMETER Experiment Name: At_Drought_Soil_Dry_P Parameter: Age (day) Value: 27
  misc_feature: MA Experiment 20001558 PARAMETER Experiment Name: At_Drought_Soil_Dry_P Parameter: Organism Value: A. thaliana
  misc_feature: MA Experiment 20001558 PARAMETER Experiment Name: At_Drought_Soil_Dry_P Parameter: Plant Line Value: WS
  misc_feature: MA Experiment 20001558 PARAMETER Experiment Name: At_Drought_Soil_Dry_P Parameter: Post Timepoint (hr) Value: 6
  misc_feature: MA Experiment 20001558 PARAMETER Experiment Name: At_Drought_Soil_Dry_P Parameter: Post-Treatment Value: Re-Water vs. No Drought
  misc_feature: MA Experiment 20001558 PARAMETER Experiment Name: At_Drought_Soil_Dry_P Parameter: Timepoint (day) Value: 13
  misc_feature: MA Experiment 20001558 PARAMETER Experiment Name: At_Drought_Soil_Dry_P Parameter: Treatment Value: Drought vs. No Drought
  misc_feature: MA Experiment ID: 20001911 Result: Down-regulated in Transcription
  misc_feature: MA Experiment 20001911 PARAMETER Experiment Name: At_Drought_Reproduction_P Parameter: Age (day) Value: 40
  misc_feature: MA Experiment 20001911 PARAMETER Experiment Name: At_Drought_Reproduction_P Parameter: Organism Value: A. thaliana
  misc_feature: MA Experiment 20001911 PARAMETER Experiment Name: At_Drought_Reproduction_P Parameter: Plant Line Value: WS
  misc_feature: MA Experiment 20001911 PARAMETER Experiment Name: At_Drought_Reproduction_P Parameter: Timepoint (day) Value: 10
  misc_feature: MA Experiment 20001911 PARAMETER Experiment Name: At_Drought_Reproduction_P Parameter: Tissue Value: Flowers
  misc_feature: MA Experiment 20001911 PARAMETER Experiment Name: At_Drought_Reproduction_P Parameter: Treatment Value: Drought vs. No Drought

SEQ ID NO: 92077 - protein, 353 aa, Arabidopsis thaliana; identical to SEQ ID NO: 35579
  peptide (1)..(353): Ceres Seq. ID no. 12707566
  misc_feature (214)..(313): Pfam Name: 2OG-Fe(II) oxygenase superfamily Pfam Description: 2OG-Fe(II) oxygenase superfamily
  misc_feature (18)..(353): Homolog of NCBI NO: 15242339 NR Description: flavonol synthase (FLS) (sp Q96330); protein id: supported by cDNA: 23924., supported by cDNA: gi_16604339, by cDNA: gi_1805306, supported by cDNA: gi_1805308 [Arabidopsis
  misc_feature (18)..(351): Homolog of NCBI NO: 14916566 NR Description: Flavonol synthase (FLS) (CitFLS)
  misc_feature (18)..(351): Homolog of NCBI NO: 14916564 NR Description: Flavonol synthase (FLS)
  misc_feature (18)..(351): Homolog of NCBI NO: 1706822 NR Description: Flavonol synthase (FLS) >gi|421946|pir||S33510
  misc_feature (18)..(351): Homolog of NCBI NO: 29123532 NR Description: flavonol synthase [Allium cepa]
  misc_feature (60)..(353): Homolog of NCBI NO: 15242827 NR Description: flavonol synthase; protein id: At5g63590.1, by cDNA: 21505. [Arabidopsis thaliana] flavonol synthase [Arabidopsis thaliana]
  misc_feature (60)..(353): Homolog of NCBI NO: 21554244 NR Description: flavonol synthase [Arabidopsis thaliana]
  misc_feature (18)..(351): Homolog of NCBI NO: 2492613 NR Description: Flavonol synthase (FLS) >gi|7433193|pir||T07373
  misc_feature (18)..(351): Homolog of NCBI NO: 29420435 NR Description: flavonol synthase [Rosa hybrid cultivar
  misc_feature (18)..(351): Homolog of NCBI NO: 22759897 NR Description: flavonol synthase [Nierembergia sp. NB17]

SEQ ID NO: 92078 - protein, 336 aa, Arabidopsis thaliana; identical to SEQ ID NO: 35580
  peptide (1)..(336): Ceres Seq. ID no. 12707567
  misc_feature (197)..(296): Pfam Name: 2OG-Fe(II) oxygenase superfamily Pfam Description: 2OG-Fe(II) oxygenase superfamily
  misc_feature (1)..(336): Homolog of NCBI NO: 15242339 NR Description: flavonol synthase (FLS) (sp Q96330); protein id: supported by cDNA: 23924., supported by cDNA: gi_16604339, by cDNA: gi_1805306, supported by cDNA: gi_1805308 [Arabidopsis
  misc_feature (1)..(334): Homolog of NCBI NO: 14916566 NR Description: Flavonol synthase (FLS) (CitFLS)
  misc_feature (1)..(334): Homolog of NCBI NO: 14916564 NR Description: Flavonol synthase (FLS)
  misc_feature (1)..(334): Homolog of NCBI NO: 1706822 NR Description: Flavonol synthase (FLS) >gi|421946|pir||S33510
  misc_feature (1)..(334): Homolog of NCBI NO: 29123532 NR Description: flavonol synthase [Allium cepa]
  misc_feature (43)..(336): Homolog of NCBI NO: 15242827 NR Description: flavonol synthase; protein id: At5g63590.1, by cDNA: 21505. [Arabidopsis thaliana] flavonol synthase [Arabidopsis thaliana]
  misc_feature (43)..(336): Homolog of NCBI NO: 21554244 NR Description: flavonol synthase [Arabidopsis thaliana]
  misc_feature (1)..(334): Homolog of NCBI NO: 2492613 NR Description: Flavonol synthase (FLS) >gi|7433193|pir||T07373
  misc_feature (1)..(334): Homolog of NCBI NO: 29420435 NR Description: flavonol synthase [Rosa hybrid cultivar
  misc_feature (1)..(334): Homolog of NCBI NO: 22759897 NR Description: flavonol synthase [Nierembergia sp. NB17]

SEQ ID NO: 92079 - DNA, 1359 bp, Arabidopsis thaliana; identical to SEQ ID NO: 88323
  misc_feature (1)..(1359): Ceres Seq. ID no. 12707680
  misc_feature: MA Experiment ID: 20000184 Result: Down-regulated in Transcription
  misc_feature: MA Experiment 20000184 PARAMETER Experiment Name: At_Shoots__P Parameter: Age (day) Value: 7
  misc_feature: MA Experiment 20000184 PARAMETER Experiment Name: At_Shoots__P Parameter: Tissue Value: Shoots vs. Whole Plant
  misc_feature: MA Experiment ID: 20000234 Result: Up-regulated in Transcription
  misc_feature: MA Experiment 20000234 PARAMETER Experiment Name: At_Siliques_P Parameter: Age (day) Value: 21
  misc_feature: MA Experiment 20000234 PARAMETER Experiment Name: At_Siliques_P Parameter: Organism Value: A. thaliana
  misc_feature: MA Experiment 20000234 PARAMETER Experiment Name: At_Siliques_P Parameter: Plant Line Value: WS
  misc_feature: MA Experiment 20000234 PARAMETER Experiment Name: At_Siliques_P Parameter: Tissue Value: Less Than 5mm Siliques vs. Whole Plant
  misc_feature: MA Experiment ID: 20000286 Result: Up-regulated in Transcription
  misc_feature: MA Experiment 20000286 PARAMETER Experiment Name: At_Open_Flower_P Parameter: Age (day) Value: 21
  misc_feature: MA Experiment 20000286 PARAMETER Experiment Name: At_Open_Flower_P Parameter: Plant Line Value: WS
  misc_feature: MA Experiment 20000286 PARAMETER Experiment Name: At_Open_Flower_P Parameter: Tissue Value: Half Open vs. Whole Plant
  misc_feature: MA Experiment ID: 20000439 Result: Up-regulated in Transcription
  misc_feature: MA Experiment 20000439 PARAMETER Experiment Name: At_Roots__P Parameter: Age (day) Value: 14 vs. 21
  misc_feature: MA Experiment 20000439 PARAMETER Experiment Name: At_Roots__P Parameter: Organism Value: A. thaliana
  misc_feature: MA Experiment 20000439 PARAMETER Experiment Name: At_Roots__P Parameter: Tissue Value: Roots vs. Whole Plant
  misc_feature: MA Experiment ID: 20000496 Result: Up-regulated in Transcription
  misc_feature: MA Experiment 20000496 PARAMETER Experiment Name: At_Guard_Cells_P Parameter: Harvest Date Value: 7/19/2002
  misc_feature: MA Experiment 20000496 PARAMETER Experiment Name: At_Guard_Cells_P Parameter: Organism Value: Canola
  misc_feature: MA Experiment 20000496 PARAMETER Experiment Name: At_Guard_Cells_P Parameter: Tissue Value: Guard Cells vs. Leaves
  misc_feature: MA Experiment ID: 20000794 Result: Up-regulated in Transcription
  misc_feature: MA Experiment 20000794 PARAMETER Experiment Name: At_Petals_P Parameter: Age (day) Value: 23-25 days
  misc_feature: MA Experiment 20000794 PARAMETER Experiment Name: At_Petals_P Parameter: Plant Line Value: WS
  misc_feature: MA Experiment 20000794 PARAMETER Experiment Name: At_Petals_P Parameter: Tissue Value: Petals vs. Whole plant

SEQ ID NO: 92080 - protein, 452 aa, Arabidopsis thaliana; identical to SEQ ID NO: 88324
  peptide (1)..(452): Ceres Seq. ID no. 12707681
  misc_feature (23)..(366): Pfam Name: Transcription factor Tfb2 Pfam Description: Transcription factor Tfb2
  misc_feature (3)..(450): Homolog of NCBI NO: 39794736 NR Description: Unknown (protein for MGC:77721) [Danio rerio]
  misc_feature (3)..(450): Homolog of NCBI NO: 4504201 NR Description: general transcription factor IIH, polypeptide 4 subunit); General transcription factor IIH, polypeptide 4 [Homo >gi|17380328|sp|Q92759|TFH4_HUMAN TFIIH basal transcription
  misc_feature (9)..(450): Homolog of NCBI NO: 34852067 NR Description: similar to TFIIH transcription/DNA repair factor
  misc_feature (9)..(450): Homolog of NCBI NO: 6754094 NR Description: general transcription factor II H, polypeptide 4; transcription factor IIH, polypeptide 4 [Mus musculus] TFIIH basal transcription factor complex p52 subunit (Basic
  misc_feature (23)..(452): Homolog of NCBI NO: 21357821 NR Description: CG7764-PA [Drosophila melanogaster]
  misc_feature (18)..(285): Homolog of NCBI NO: 6325135 NR Description: Transcription/repair factor TFIIH subunit; Tfb2p
  misc_feature (366)..(446): Homolog of NCBI NO: 6325135 NR Description: Transcription/repair factor TFIIH subunit; Tfb2p
  misc_feature (296)..(367): Homolog of NCBI NO: 6325135 NR Description: Transcription/repair factor TFIIH subunit; Tfb2p
  misc_feature (13)..(431): Homolog of NCBI NO: 19113355 NR Description: putative transcription factor TFIIH
  misc_feature (139)..(452): Homolog of NCBI NO: 16198089 NR Description: LD30622p [Drosophila melanogaster]

SEQ ID NO: 92081 - protein, 441 aa, Arabidopsis thaliana; identical to SEQ ID NO: 88325
  peptide (1)..(441): Ceres Seq. ID no. 12707682
  misc_feature (12)..(355): Pfam Name: Transcription factor Tfb2 Pfam Description: Transcription factor Tfb2
  misc_feature (1)..(439): Homolog of NCBI NO: 39794736 NR Description: Unknown (protein for MGC:77721) [Danio rerio]
  misc_feature (1)..(439): Homolog of NCBI NO: 4504201 NR Description: general transcription factor IIH, polypeptide 4 subunit); General transcription factor IIH, polypeptide 4 [Homo >gi|17380328|sp|Q92759|TFH4_HUMAN TFIIH basal transcription
  misc_feature (1)..(439): Homolog of NCBI NO: 34852067 NR Description: similar to TFIIH transcription/DNA repair factor
  misc_feature (1)..(439): Homolog of NCBI NO: 6754094 NR Description: general transcription factor II H, polypeptide 4; transcription factor IIH, polypeptide 4 [Mus musculus] TFIIH basal transcription factor complex p52 subunit (Basic
  misc_feature (12)..(441): Homolog of NCBI NO: 21357821 NR Description: CG7764-PA [Drosophila melanogaster]
  misc_feature (7)..(274): Homolog of NCBI NO: 6325135 NR Description: Transcription/repair factor TFIIH subunit; Tfb2p
  misc_feature (355)..(435): Homolog of NCBI NO: 6325135 NR Description: Transcription/repair factor TFIIH subunit; Tfb2p
  misc_feature (285)..(356): Homolog of NCBI NO: 6325135 NR Description: Transcription/repair factor TFIIH subunit; Tfb2p
  misc_feature (2)..(420): Homolog of NCBI NO: 19113355 NR Description: putative transcription factor TFIIH
  misc_feature (128)..(441): Homolog of NCBI NO: 16198089 NR Description: LD30622p [Drosophila melanogaster]

SEQ ID NO: 92082 - protein, 439 aa, Arabidopsis thaliana; identical to SEQ ID NO: 88326
  peptide (1)..(439): Ceres Seq. ID no. 12707683
  misc_feature (10)..(353): Pfam Name: Transcription factor Tfb2 Pfam Description: Transcription factor Tfb2
  misc_feature (1)..(437): Homolog of NCBI NO: 39794736 NR Description: Unknown (protein for MGC:77721) [Danio rerio]
  misc_feature (1)..(437): Homolog of NCBI NO: 4504201 NR Description: general transcription factor IIH, polypeptide 4 subunit); General transcription factor IIH, polypeptide 4 [Homo >gi|17380328|sp|Q92759|TFH4_HUMAN TFIIH basal transcription
  misc_feature (1)..(437): Homolog of NCBI NO: 34852067 NR Description: similar to TFIIH transcription/DNA repair factor
  misc_feature (1)..(437): Homolog of NCBI NO: 6754094 NR Description: general transcription factor II H, polypeptide 4; transcription factor IIH, polypeptide 4 [Mus musculus] TFIIH basal transcription factor complex p52 subunit (Basic
  misc_feature (10)..(439): Homolog of NCBI NO: 21357821 NR Description: CG7764-PA [Drosophila melanogaster]
  misc_feature (5)..(272): Homolog of NCBI NO: 6325135 NR Description: Transcription/repair factor TFIIH subunit; Tfb2p
  misc_feature (353)..(433): Homolog of NCBI NO: 6325135 NR Description: Transcription/repair factor TFIIH subunit; Tfb2p
  misc_feature (283)..(354): Homolog of NCBI NO: 6325135 NR Description: Transcription/repair factor TFIIH subunit; Tfb2p
  misc_feature (1)..(418): Homolog of NCBI NO: 19113355 NR Description: putative transcription factor TFIIH
  misc_feature (126)..(439): Homolog of NCBI NO: 16198089 NR Description: LD30622p [Drosophila melanogaster]

SEQ ID NO: 92083 - DNA, 753 bp, Arabidopsis thaliana; identical to SEQ ID NO: 88327
  misc_feature (1)..(753): Ceres Seq. ID no. 12707684
  misc_feature: MA Experiment ID: 20000169 Result: Up-regulated in Transcription
  misc_feature: MA Experiment 20000169 PARAMETER Experiment Name: At_100uM_ABA_P Parameter: Age (day) Value: 14
  misc_feature: MA Experiment 20000169 PARAMETER Experiment Name: At_100uM_ABA_P Parameter: Organism Value: A. thaliana
  misc_feature: MA Experiment 20000169 PARAMETER Experiment Name: At_100uM_ABA_P Parameter: Plant Line Value: WS
  misc_feature: MA Experiment 20000169 PARAMETER Experiment Name: At_100uM_ABA_P Parameter: Timepoint (hr) Value: 6
  misc_feature: MA Experiment 20000169 PARAMETER Experiment Name: At_100uM_ABA_P Parameter: Tissue Value: Aerial
  misc_feature: MA Experiment 20000169 PARAMETER Experiment Name: At_100uM_ABA_P Parameter: Treatment Value: 100uM ABA vs. No Treatment
  misc_feature: MA Experiment ID: 20000234 Result: Down-regulated in Transcription
  misc_feature: MA Experiment 20000234 PARAMETER Experiment Name: At_Siliques_P Parameter: Age (day) Value: 21
  misc_feature: MA Experiment 20000234 PARAMETER Experiment Name: At_Siliques_P Parameter: Organism Value: A. thaliana
  misc_feature: MA Experiment 20000234 PARAMETER Experiment Name: At_Siliques_P Parameter: Plant Line Value: WS
  misc_feature: MA Experiment 20000234 PARAMETER Experiment Name: At_Siliques_P Parameter: Tissue Value: Less Than 5mm Siliques vs. Whole Plant
  misc_feature: MA Experiment ID: 20000267 Result: Up-regulated in Transcription
  misc_feature: MA Experiment 20000267 PARAMETER Experiment Name: At_Drought_P Parameter: Age (day) Value: 7
  misc_feature: MA Experiment 20000267 PARAMETER Experiment Name: At_Drought_P Parameter: Organism Value: A. thaliana
  misc_feature: MA Experiment 20000267 PARAMETER Experiment Name: At_Drought_P Parameter: Plant Line Value: WS
  misc_feature: MA Experiment 20000267 PARAMETER Experiment Name: At_Drought_P Parameter: Timepoint (hr) Value: 6
  misc_feature: MA Experiment 20000267 PARAMETER Experiment Name: At_Drought_P Parameter: Tissue Value: Whole Plant
  misc_feature: MA Experiment 20000267 PARAMETER Experiment Name: At_Drought_P Parameter: Treatment Value: Drought vs. No Drought
  misc_feature: MA Experiment ID: 20000268 Result: Up-regulated in Transcription
  misc_feature: MA Experiment 20000268 PARAMETER Experiment Name: At_100mM_NaCl__P Parameter: Age (day) Value: 14
  misc_feature: MA Experiment 20000268 PARAMETER Experiment Name: At_100mM_NaCl__P Parameter: Organism Value: A. thaliana
  misc_feature: MA Experiment 20000268 PARAMETER Experiment Name: At_100mM_NaCl__P Parameter: Plant Line Value: WS
  misc_feature: MA Experiment 20000268 PARAMETER Experiment Name: At_100mM_NaCl__P Parameter: Timepoint (hr) Value: 6
  misc_feature: MA Experiment 20000268 PARAMETER Experiment Name: At_100mM_NaCl__P Parameter: Tissue Value: Whole Plant
  misc_feature: MA Experiment 20000268 PARAMETER Experiment Name: At_100mM_NaCl__P Parameter: Treatment Value: 100mM NaCl vs. No Treatment
  misc_feature: MA Experiment ID: 20000436 Result: Up-regulated in Transcription
  misc_feature: MA Experiment 20000436 PARAMETER Experiment Name: At_Drought_P Parameter: Age (day) Value: 7
  misc_feature: MA Experiment 20000436 PARAMETER Experiment Name: At_Drought_P Parameter: Organism Value: A. thaliana
  misc_feature: MA Experiment 20000436 PARAMETER Experiment Name: At_Drought_P Parameter: Plant Line Value: WS
  misc_feature: MA Experiment 20000436 PARAMETER Experiment Name: At_Drought_P Parameter: Timepoint (hr) Value: 12
  misc_feature: MA Experiment 20000436 PARAMETER Experiment Name: At_Drought_P Parameter: Tissue Value: Whole Plant
  misc_feature: MA Experiment 20000436 PARAMETER Experiment Name: At_Drought_P Parameter: Treatment Value: Drought vs. No Drought
  misc_feature: MA Experiment ID: 20000437 Result: Up-regulated in Transcription
  misc_feature: MA Experiment 20000437 PARAMETER Experiment Name: At_Drought_P Parameter: Age (day) Value: 8
  misc_feature: MA Experiment 20000437 PARAMETER Experiment Name: At_Drought_P Parameter: Organism Value: A. thaliana
  misc_feature: MA Experiment 20000437 PARAMETER Experiment Name: At_Drought_P Parameter: Plant Line Value: WS
  misc_feature: MA Experiment 20000437 PARAMETER Experiment Name: At_Drought_P Parameter: Timepoint (hr) Value: 24
  misc_feature: MA Experiment 20000437 PARAMETER Experiment Name: At_Drought_P Parameter: Tissue Value: Whole Plant
  misc_feature: MA Experiment 20000437 PARAMETER Experiment Name: At_Drought_P Parameter: Treatment Value: Drought vs. No Drought
  misc_feature: MA Experiment ID: 20000451 Result: Up-regulated in Transcription
  misc_feature: MA Experiment 20000451 PARAMETER Experiment Name: At_CS6879_Shoots-Roots_P Parameter: Age (day) Value: 14
  misc_feature: MA Experiment 20000451 PARAMETER Experiment Name: At_CS6879_Shoots-Roots_P Parameter: Organism Value: A. thaliana
  misc_feature: MA Experiment 20000451 PARAMETER Experiment Name: At_CS6879_Shoots-Roots_P Parameter: Plant Line Value: CS6879 vs. WS
  misc_feature: MA Experiment 20000451 PARAMETER Experiment Name: At_CS6879_Shoots-Roots_P Parameter: Tissue Value: Roots
  misc_feature: MA Experiment ID: 20000453 Result: Up-regulated in Transcription
  misc_feature: MA Experiment 20000453 PARAMETER Experiment Name: At_100uM_ABA_P Parameter: Age (day) Value: 15
  misc_feature: MA Experiment 20000453 PARAMETER Experiment Name: At_100uM_ABA_P Parameter: Organism Value: A. thaliana
  misc_feature: MA Experiment 20000453 PARAMETER Experiment Name: At_100uM_ABA_P Parameter: Plant Line Value: WS
  misc_feature: MA Experiment 20000453 PARAMETER Experiment Name: At_100uM_ABA_P Parameter: Timepoint (hr) Value: 24
  misc_feature: MA Experiment 20000453 PARAMETER Experiment Name: At_100uM_ABA_P Parameter: Tissue Value: Aerial
  misc_feature: MA Experiment 20000453 PARAMETER Experiment Name: At_100uM_ABA_P Parameter: Treatment Value: 100uM ABA vs. No Treatment
  misc_feature: MA Experiment ID: 20000455 Result: Up-regulated in Transcription
  misc_feature: MA Experiment 20000455 PARAMETER Experiment Name: At_100uM_ABA_P Parameter: Age (day) Value: 16
  misc_feature: MA Experiment 20000455 PARAMETER Experiment Name: At_100uM_ABA_P Parameter: Organism Value: A. thaliana
  misc_feature: MA Experiment 20000455 PARAMETER Experiment Name: At_100uM_ABA_P Parameter: Plant Line Value: WS
  misc_feature: MA Experiment 20000455 PARAMETER Experiment Name: At_100uM_ABA_P Parameter: Timepoint (hr) Value: 48
  misc_feature: MA Experiment 20000455 PARAMETER Experiment Name: At_100uM_ABA_P Parameter: Tissue Value: Aerial
  misc_feature: MA Experiment 20000455 PARAMETER Experiment Name: At_100uM_ABA_P Parameter: Treatment Value: 100uM ABA vs. No Treatment
  misc_feature: MA Experiment ID: 20000495 Result: Up-regulated in Transcription
  misc_feature: MA Experiment 20000495 PARAMETER Experiment Name: At_Guard_Cells_P Parameter: Harvest Date Value: 8/2/2002
  misc_feature: MA Experiment 20000495 PARAMETER Experiment Name: At_Guard_Cells_P Parameter: Organism Value: A. thaliana
  misc_feature: MA Experiment 20000495 PARAMETER Experiment Name: At_Guard_Cells_P Parameter: Tissue Value: Guard Cells vs. Leaves
  misc_feature: MA Experiment ID: 20000527 Result: Down-regulated in Transcription
  misc_feature: MA Experiment 20000527 PARAMETER Experiment Name: At_10percent_PEG_P Parameter: Age (day) Value: 20
  misc_feature: MA Experiment 20000527 PARAMETER Experiment Name: At_10percent_PEG_P Parameter: Organism Value: A. thaliana
  misc_feature: MA Experiment 20000527 PARAMETER Experiment Name: At_10percent_PEG_P Parameter: Plant Line Value: WS
  misc_feature: MA Experiment 20000527 PARAMETER Experiment Name: At_10percent_PEG_P Parameter: Timepoint (day) Value: 20
  misc_feature: MA Experiment 20000527 PARAMETER Experiment Name: At_10percent_PEG_P Parameter: Tissue Value: Whole Plant
  misc_feature: MA Experiment 20000527 PARAMETER Experiment Name: At_10percent_PEG_P Parameter: Treatment Value: 10percent PEG vs. No Treatment
  misc_feature: MA Experiment ID: 20000574 Result: Down-regulated in Transcription
  misc_feature: MA Experiment 20000574 PARAMETER Experiment Name: At_100uM_ABA_Mutants__P Parameter: Organism Value: A. thaliana
  misc_feature: MA Experiment 20000574 PARAMETER Experiment Name: At_100uM_ABA_Mutants__P Parameter: Plant Line Value: CS23 vs. Ler wt
  misc_feature: MA Experiment 20000574 PARAMETER Experiment Name: At_100uM_ABA_Mutants__P Parameter: Timepoint (hr) Value: N/A
  misc_feature: MA Experiment 20000574 PARAMETER Experiment Name: At_100uM_ABA_Mutants__P Parameter: Tissue Value: Whole Plant
  misc_feature: MA Experiment 20000574 PARAMETER Experiment Name: At_100uM_ABA_Mutants__P Parameter: Treatment Value: None
  misc_feature: MA Experiment ID: 20000575 Result: Up-regulated in Transcription
  misc_feature: MA Experiment 20000575 PARAMETER Experiment Name: At_100uM_ABA_Mutants__P Parameter: Organism Value: A. thaliana
  misc_feature: MA Experiment 20000575 PARAMETER Experiment Name: At_100uM_ABA_Mutants__P Parameter: Plant Line Value: CS22
  misc_feature: MA Experiment 20000575 PARAMETER Experiment Name: At_100uM_ABA_Mutants__P Parameter: Timepoint (hr) Value: 6
  misc_feature: MA Experiment 20000575 PARAMETER Experiment Name: At_100uM_ABA_Mutants__P Parameter: Tissue Value: Whole Plant
  misc_feature: MA Experiment 20000575 PARAMETER Experiment Name: At_100uM_ABA_Mutants__P Parameter: Treatment Value: 1uM ABA vs. No Treatment
  misc_feature: MA Experiment ID: 20000576 Result: Up-regulated in Transcription
  misc_feature: MA Experiment 20000576 PARAMETER Experiment Name: At_100uM_ABA_Mutants__P Parameter: Organism Value: A. thaliana
  misc_feature: MA Experiment 20000576 PARAMETER Experiment Name: At_100uM_ABA_Mutants__P Parameter: Plant Line Value: CS23
  misc_feature: MA Experiment 20000576 PARAMETER Experiment Name: At_100uM_ABA_Mutants__P Parameter: Timepoint (hr) Value: 6
  misc_feature: MA Experiment 20000576 PARAMETER Experiment Name: At_100uM_ABA_Mutants__P Parameter: Tissue Value: Whole Plant
  misc_feature: MA Experiment 20000576 PARAMETER Experiment Name: At_100uM_ABA_Mutants__P Parameter: Treatment Value: 1uM ABA vs. No Treatment
  misc_feature: MA Experiment ID: 20001248 Result: Down-regulated in Transcription
  misc_feature: MA Experiment 20001248 PARAMETER Experiment Name: At_Far-red-induction_P Parameter: Age (day) Value: 7
  misc_feature: MA Experiment 20001248 PARAMETER Experiment Name: At_Far-red-induction_P Parameter: Light Value: Far-red vs. White
  misc_feature: MA Experiment 20001248 PARAMETER Experiment Name: At_Far-red-induction_P Parameter: Organism Value: A. thaliana
  misc_feature: MA Experiment 20001248 PARAMETER Experiment Name: At_Far-red-induction_P Parameter: Plant Line Value: Columbia
  misc_feature: MA Experiment 20001248 PARAMETER Experiment Name: At_Far-red-induction_P Parameter: Timepoint (hr) Value: 4
  misc_feature: MA Experiment 20001248 PARAMETER Experiment Name: At_Far-red-induction_P Parameter: Tissue Value: Whole Plant
  misc_feature: MA Experiment ID: 20001450 Result: Down-regulated in Transcription
  misc_feature: MA Experiment 20001450 PARAMETER Experiment Name: At_Far-red-induction_P Parameter: Age (day) Value: 7
  misc_feature: MA Experiment 20001450 PARAMETER Experiment Name: At_Far-red-induction_P Parameter: Light Value: Far-red vs. White
  misc_feature: MA Experiment 20001450 PARAMETER Experiment Name: At_Far-red-induction_P Parameter: Organism Value: A. thaliana
  misc_feature: MA Experiment 20001450 PARAMETER Experiment Name: At_Far-red-induction_P Parameter: Plant Line Value: Columbia
  misc_feature: MA Experiment 20001450 PARAMETER Experiment Name: At_Far-red-induction_P Parameter: Timepoint (hr) Value: 8
  misc_feature: MA Experiment 20001450 PARAMETER Experiment Name: At_Far-red-induction_P Parameter: Tissue Value: Whole Plant
  misc_feature: MA Experiment ID: 20001451 Result: Down-regulated in Transcription
  misc_feature: MA Experiment 20001451 PARAMETER Experiment Name: At_Far-red-induction_P Parameter: Age (day) Value: 7
  misc_feature: MA Experiment 20001451 PARAMETER Experiment Name: At_Far-red-induction_P Parameter: Light Value: Far-red vs. White
  misc_feature: MA Experiment 20001451 PARAMETER Experiment Name: At_Far-red-induction_P Parameter: Organism Value: A. thaliana
  misc_feature: MA Experiment 20001451 PARAMETER Experiment Name: At_Far-red-induction_P Parameter: Plant Line Value: Columbia
  misc_feature: MA Experiment 20001451 PARAMETER Experiment Name: At_Far-red-induction_P Parameter: Timepoint (hr) Value: 24
  misc_feature: MA Experiment 20001451 PARAMETER Experiment Name: At_Far-red-induction_P Parameter: Tissue Value: Whole Plant
  misc_feature: MA Experiment ID: 20001554 Result: Up-regulated in Transcription
  misc_feature: MA Experiment 20001554 PARAMETER Experiment Name: At_Drought_Soil_Dry_P Parameter: Age (day) Value: 21
  misc_feature: MA Experiment 20001554 PARAMETER Experiment Name: At_Drought_Soil_Dry_P Parameter: Organism Value: A. thaliana
  misc_feature: MA Experiment 20001554 PARAMETER Experiment Name: At_Drought_Soil_Dry_P Parameter: Plant Line Value: WS
  misc_feature: MA Experiment 20001554 PARAMETER Experiment Name: At_Drought_Soil_Dry_P Parameter: Post Timepoint (hr) Value: None
  misc_feature: MA Experiment 20001554 PARAMETER Experiment Name: At_Drought_Soil_Dry_P Parameter: Post-Treatment Value: None
  misc_feature: MA Experiment 20001554 PARAMETER Experiment Name: At_Drought_Soil_Dry_P Parameter: Timepoint (day) Value: 7
  misc_feature: MA Experiment 20001554 PARAMETER Experiment Name: At_Drought_Soil_Dry_P Parameter: Treatment Value: Drought vs. No Drought
  misc_feature: MA Experiment ID: 20001555 Result: Up-regulated in Transcription
  misc_feature: MA Experiment 20001555 PARAMETER Experiment Name: At_Drought_Soil_Dry_P Parameter: Age (day) Value: 24
  misc_feature: MA Experiment 20001555 PARAMETER Experiment Name: At_Drought_Soil_Dry_P Parameter: Organism Value: A. thaliana
  misc_feature: MA Experiment 20001555 PARAMETER Experiment Name: At_Drought_Soil_Dry_P Parameter: Plant Line Value: WS
  misc_feature: MA Experiment 20001555 PARAMETER Experiment Name: At_Drought_Soil_Dry_P Parameter: Post Timepoint (hr) Value: None
  misc_feature: MA Experiment 20001555 PARAMETER Experiment Name: At_Drought_Soil_Dry_P Parameter: Post-Treatment Value: None
  misc_feature: MA Experiment 20001555 PARAMETER Experiment Name: At_Drought_Soil_Dry_P Parameter: Timepoint (day) Value: 10
  misc_feature: MA Experiment 20001555 PARAMETER Experiment Name: At_Drought_Soil_Dry_P Parameter: Treatment Value: Drought vs. No Drought
  misc_feature: MA Experiment ID: 20001556 Result: Up-regulated in Transcription
  misc_feature: MA Experiment 20001556 PARAMETER Experiment Name: At_Drought_Soil_Dry_P Parameter: Age (day) Value: 26
  misc_feature: MA Experiment 20001556 PARAMETER Experiment Name: At_Drought_Soil_Dry_P Parameter: Organism Value: A. thaliana
  misc_feature: MA Experiment 20001556 PARAMETER Experiment Name: At_Drought_Soil_Dry_P Parameter: Plant Line Value: WS
  misc_feature: MA Experiment 20001556 PARAMETER Experiment Name: At_Drought_Soil_Dry_P Parameter: Post Timepoint (hr) Value: None
  misc_feature: MA Experiment 20001556 PARAMETER Experiment Name: At_Drought_Soil_Dry_P Parameter: Post-Treatment Value: None
  misc_feature: MA Experiment 20001556 PARAMETER Experiment Name: At_Drought_Soil_Dry_P Parameter: Timepoint (day) Value: 12
  misc_feature: MA Experiment 20001556 PARAMETER Experiment Name: At_Drought_Soil_Dry_P Parameter: Treatment Value: Drought vs. No Drought
  misc_feature: MA Experiment ID: 20001559 Result: Up-regulated in Transcription
  misc_feature: MA Experiment 20001559 PARAMETER Experiment Name: At_Drought_Soil_Dry_P Parameter: Age (day) Value: 28
  misc_feature: MA Experiment 20001559 PARAMETER Experiment Name: At_Drought_Soil_Dry_P Parameter: Organism Value: A. thaliana
  misc_feature: MA Experiment 20001559 PARAMETER Experiment Name: At_Drought_Soil_Dry_P Parameter: Plant Line Value: WS
  misc_feature: MA Experiment 20001559 PARAMETER Experiment Name: At_Drought_Soil_Dry_P Parameter: Post Timepoint (hr) Value: 29
  misc_feature: MA Experiment 20001559 PARAMETER Experiment Name: At_Drought_Soil_Dry_P Parameter: Post-Treatment Value: Re-Water vs. No Drought
  misc_feature: MA Experiment 20001559 PARAMETER Experiment Name: At_Drought_Soil_Dry_P Parameter: Timepoint (day) Value: 14
  misc_feature: MA Experiment 20001559 PARAMETER Experiment Name: At_Drought_Soil_Dry_P Parameter: Treatment Value: Drought vs. No Drought
  misc_feature: MA Experiment ID: 20001560 Result: Up-regulated in Transcription
  misc_feature: MA Experiment 20001560 PARAMETER Experiment Name: At_Drought_Soil_Dry_P Parameter: Age (day) Value: 28
  misc_feature: MA Experiment 20001560 PARAMETER Experiment Name: At_Drought_Soil_Dry_P Parameter: Organism Value: A. thaliana
  misc_feature: MA Experiment 20001560 PARAMETER Experiment Name: At_Drought_Soil_Dry_P Parameter: Plant Line Value: WS
  misc_feature: MA Experiment 20001560 PARAMETER Experiment Name: At_Drought_Soil_Dry_P Parameter: Post Timepoint (hr) Value: None
  misc_feature: MA Experiment 20001560 PARAMETER Experiment Name: At_Drought_Soil_Dry_P Parameter: Post-Treatment Value: None
  misc_feature: MA Experiment 20001560 PARAMETER Experiment Name: At_Drought_Soil_Dry_P Parameter: Timepoint (day) Value: 14
  misc_feature: MA Experiment 20001560 PARAMETER Experiment Name: At_Drought_Soil_Dry_P Parameter: Treatment Value: Drought vs. No Drought
  misc_feature: MA Experiment ID: 20001757 Result: Down-regulated in Transcription
  misc_feature: MA Experiment 20001757 PARAMETER Experiment Name: At_50mM_NH4NO3_L-to-H_P Parameter: Timepoint (hr) Value: 6
  misc_feature: MA Experiment 20001757 PARAMETER Experiment Name: At_50mM_NH4NO3_L-to-H_P Parameter: Tissue Value: Leaf
  misc_feature: MA Experiment 20001757 PARAMETER Experiment Name: At_50mM_NH4NO3_L-to-H_P Parameter: Treatment Value: 50mM NH4NO3 vs 100mM Mannitol
  misc_feature: MA Experiment ID: 20001904 Result: Up-regulated in Transcription
  misc_feature: MA Experiment 20001904 PARAMETER Experiment Name: At_Drought_Reproduction_P Parameter: Age (day) Value: 37
  misc_feature: MA Experiment 20001904 PARAMETER Experiment Name: At_Drought_Reproduction_P Parameter: Organism Value: A. thaliana
  misc_feature: MA Experiment 20001904 PARAMETER Experiment Name: At_Drought_Reproduction_P Parameter: Plant Line Value: WS
  misc_feature: MA Experiment 20001904 PARAMETER Experiment Name: At_Drought_Reproduction_P Parameter: Timepoint (day) Value: 7
  misc_feature: MA Experiment 20001904 PARAMETER Experiment Name: At_Drought_Reproduction_P Parameter: Tissue Value: Rosettes
  misc_feature: MA Experiment 20001904 PARAMETER Experiment Name: At_Drought_Reproduction_P Parameter: Treatment Value: Drought vs. No Drought
  misc_feature: MA Experiment ID: 20001910 Result: Up-regulated in Transcription
  misc_feature: MA Experiment 20001910 PARAMETER Experiment Name: At_Drought_Reproduction_P Parameter: Age (day) Value: 37
  misc_feature: MA Experiment 20001910 PARAMETER Experiment Name: At_Drought_Reproduction_P Parameter: Organism Value: A. thaliana
  misc_feature: MA Experiment 20001910 PARAMETER Experiment Name: At_Drought_Reproduction_P Parameter: Plant Line Value: WS
  misc_feature: MA Experiment 20001910 PARAMETER Experiment Name: At_Drought_Reproduction_P Parameter: Timepoint (day) Value: 7
  misc_feature: MA Experiment 20001910 PARAMETER Experiment Name: At_Drought_Reproduction_P Parameter: Tissue Value: Flowers
  misc_feature: MA Experiment 20001910 PARAMETER Experiment Name: At_Drought_Reproduction_P Parameter: Treatment Value: Drought vs. No Drought

SEQ ID NO: 92084 - protein, 250 aa, Arabidopsis thaliana; identical to SEQ ID NO: 88328
  peptide (1)..(250): Ceres Seq. ID no. 12707685
  misc_feature (151)..(234): Pfam Name: Pollen allergen Pfam Description: Pollen allergen
  misc_feature (1)..(250): Homolog of NCBI NO: 30683908 NR Description: expansin- related [Arabidopsis thaliana]
  misc_feature (46)..(198): Homolog of NCBI NO: 7488049 NR Description: probable allergen - Arabidopsis thaliana allergen like protein [Arabidopsis thaliana]
  misc_feature (186)..(250): Homolog of NCBI NO: 7488049 NR Description: probable allergen - Arabidopsis thaliana allergen like protein [Arabidopsis thaliana]
  misc_feature (8)..(247): Homolog of NCBI NO: 34901812 NR Description: expansin-related protein 1-like [Oryza sativa
  misc_feature (30)..(250): Homolog of NCBI NO: 33111959 NR Description: expansin-like protein [Quercus robur]
  misc_feature (9)..(250): Homolog of NCBI NO: 15233841 NR Description: putative pollen allergen; protein id: supported by cDNA: gi_14190354, supported by cDNA: gi_15215878
  misc_feature (4)..(250): Homolog of NCBI NO: 21654743 NR Description: expansin-like protein 1 [Oryza sativa]
  misc_feature (30)..(250): Homolog of NCBI NO: 20138389 NR Description: Expansin-like 3 precursor (At-EXPL3)
  misc_feature (25)..(250): Homolog of NCBI NO: 30038051 NR Description: beta expansin EXPB2.1 [Mirabilis jalapa]
  misc_feature (30)..(250): Homolog of NCBI NO: 15231303 NR Description: putative protein; protein id: At3g45970.1, by cDNA: 27534., supported by cDNA: gi_14190436, supported by

SEQ ID NO: 92085 - protein, 131 aa, Arabidopsis thaliana; identical to SEQ ID NO: 88329
  peptide (1)..(131): Ceres Seq. ID no. 12707686
  misc_feature (32)..(115): Pfam Name: Pollen allergen Pfam Description: Pollen allergen
  misc_feature (1)..(131): Homolog of NCBI NO: 30683908 NR Description: expansin- related [Arabidopsis thaliana]
  misc_feature (1)..(79): Homolog of NCBI NO: 7488049 NR Description: probable allergen - Arabidopsis thaliana allergen like protein [Arabidopsis thaliana]
  misc_feature (67)..(131): Homolog of NCBI NO: 7488049 NR Description: probable allergen - Arabidopsis thaliana allergen like protein [Arabidopsis thaliana]
  misc_feature (1)..(128): Homolog of NCBI NO: 34901812 NR Description: expansin-related protein 1-like [Oryza sativa
  misc_feature (1)..(131): Homolog of NCBI NO: 33111959 NR Description: expansin-like protein [Quercus robur]
  misc_feature (1)..(131): Homolog of NCBI NO: 15233841 NR Description: putative pollen allergen; protein id: supported by cDNA: gi_14190354, supported by cDNA: gi_15215878
  misc_feature (1)..(131): Homolog of NCBI NO: 21654743 NR Description: expansin-like protein 1 [Oryza sativa]
  misc_feature (1)..(131): Homolog of NCBI NO: 20138389 NR Description: Expansin-like 3 precursor (At-EXPL3)
  misc_feature (1)..(131): Homolog of NCBI NO: 30038051 NR Description: beta expansin EXPB2.1 [Mirabilis jalapa]
  misc_feature (1)..(131): Homolog of NCBI NO: 15231303 NR Description: putative protein; protein id: At3g45970.1, by cDNA: 27534., supported by cDNA: gi_14190436, supported by

SEQ ID NO: 92086 - DNA, 1236 bp, Arabidopsis thaliana; identical to SEQ ID NO: 88330
  misc_feature (1)..(1236): Ceres Seq. ID no. 12707687
  misc_feature: MA Experiment ID: 108434 Result: Up-regulated in Transcription
  misc_feature: MA Experiment 108434 PARAMETER Experiment Name: At_Root_Tips_cDNA_P Parameter: Tissue Value: Root Tips
  misc_feature: MA Experiment ID: 108595 Result: Down-regulated in Transcription
  misc_feature: MA Experiment 108595 PARAMETER Experiment Name: At_Ler-pi_Ovule_cDNA_P Parameter: Plant Line Value: null
  misc_feature: MA Experiment ID: 20000185 Result: Down-regulated in Transcription
  misc_feature: MA Experiment 20000185 PARAMETER Experiment Name: At_Roots__P Parameter: Age (day) Value: 7 vs. 21
  misc_feature: MA Experiment 20000185 PARAMETER Experiment Name: At_Roots__P Parameter: Organism Value: A. thaliana
  misc_feature: MA Experiment 20000185 PARAMETER Experiment Name: At_Roots__P Parameter: Tissue Value: Roots vs. Whole Plant
  misc_feature: MA Experiment ID: 20000286 Result: Down-regulated in Transcription
  misc_feature: MA Experiment 20000286 PARAMETER Experiment Name: At_Open_Flower_P Parameter: Age (day) Value: 21
  misc_feature: MA Experiment 20000286 PARAMETER Experiment Name: At_Open_Flower_P Parameter: Plant Line Value: WS
  misc_feature: MA Experiment 20000286 PARAMETER Experiment Name: At_Open_Flower_P Parameter: Tissue Value: Half Open vs. Whole Plant
  misc_feature: MA Experiment ID: 20000439 Result: Down-regulated in Transcription
  misc_feature: MA Experiment 20000439 PARAMETER Experiment Name: At_Roots__P Parameter: Age (day) Value: 14 vs. 21
  misc_feature: MA Experiment 20000439 PARAMETER Experiment Name: At_Roots__P Parameter: Organism Value: A. thaliana
  misc_feature: MA Experiment 20000439 PARAMETER Experiment Name: At_Roots__P Parameter: Tissue Value: Roots vs. Whole Plant

SEQ ID NO: 92087 - protein, 326 aa, Arabidopsis thaliana; identical to SEQ ID NO: 88331
  peptide (1)..(326): Ceres Seq. ID no. 12707688
  misc_feature (115)..(308): Pfam Name: Clp protease Pfam Description: Clp protease
  misc_feature (22)..(326): Homolog of NCBI NO: 18414804 NR Description: ATP-dependent Clp protease proteolytic subunit putative; protein id: At4g17040.1, supported by cDNA: 36017.,
  misc_feature (22)..(326): Homolog of NCBI NO: 19698857 NR Description: unknown protein [Arabidopsis thaliana]
  misc_feature (22)..(246): Homolog of NCBI NO: 7488077 NR Description: probable Clp proteinase - Arabidopsis thaliana Clp proteinase like protein [Arabidopsis thaliana]
  misc_feature (300)..(326): Homolog of NCBI NO: 7488077 NR Description: probable Clp proteinase - Arabidopsis thaliana Clp proteinase like protein [Arabidopsis thaliana]
  misc_feature (105)..(241): Homolog of NCBI NO: 34903202 NR Description: unnamed protein product [Oryza sativa (japonica group)] >gi|6815090|dbj|BAA90376.1| unnamed protein product
  misc_feature (123)..(314): Homolog of NCBI NO: 13812146 NR Description: ATP-dependent Clp protease proteolytic subunit
  misc_feature (113)..(308): Homolog of NCBI NO: 17231850 NR Description: ATP-dependent Clp protease proteolytic subunit
  misc_feature (117)..(308): Homolog of NCBI NO: 22299302 NR Description: ATP-dependent Clp protease proteolytic subunit 3
  misc_feature (113)..(308): Homolog of NCBI NO: 23126723 NR Description: hypothetical protein [Nostoc punctiforme]
  misc_feature (123)..(320): Homolog of NCBI NO: 18390982 NR Description: ATP-dependent Clp protease proteolytic subunit

SEQ ID NO: 92088 - protein, 305 aa, Arabidopsis thaliana; identical to SEQ ID NO: 88332
  peptide (1)..(305): Ceres Seq. ID no. 12707689
  misc_feature (94)..(287): Pfam Name: Clp protease Pfam Description: Clp protease
  misc_feature (1)..(305): Homolog of NCBI NO: 18414804 NR Description: ATP-dependent Clp protease proteolytic subunit putative; protein id: At4g17040.1, supported by cDNA: 36017.,
  misc_feature (1)..(305): Homolog of NCBI NO: 19698857 NR Description: unknown protein [Arabidopsis thaliana]
  misc_feature (1)..(225): Homolog of NCBI NO: 7488077 NR Description: probable Clp proteinase - Arabidopsis thaliana Clp proteinase like protein [Arabidopsis thaliana]
  misc_feature (279)..(305): Homolog of NCBI NO: 7488077 NR Description: probable Clp proteinase - Arabidopsis thaliana Clp proteinase like protein [Arabidopsis thaliana]
  misc_feature (84)..(220): Homolog of NCBI NO: 34903202 NR Description: unnamed protein product [Oryza sativa (japonica group)] >gi|6815090|dbj|BAA90376.1| unnamed protein product
  misc_feature (102)..(293): Homolog of NCBI NO: 13812146 NR Description: ATP-dependent Clp protease proteolytic subunit
  misc_feature (92)..(287): Homolog of NCBI NO: 17231850 NR Description: ATP-dependent Clp protease proteolytic subunit
  misc_feature (96)..(287): Homolog of NCBI NO: 22299302 NR Description: ATP-dependent Clp protease proteolytic subunit 3
  misc_feature (92)..(287): Homolog of NCBI NO: 23126723 NR Description: hypothetical protein [Nostoc punctiforme]
  misc_feature (102)..(299): Homolog of NCBI NO: 18390982 NR Description: ATP-dependent Clp protease proteolytic subunit

SEQ ID NO: 92089 - protein, 217 aa, Arabidopsis thaliana; identical to SEQ ID NO: 88333
  peptide (1)..(217): Ceres Seq. ID no. 12707690
  misc_feature (6)..(199): Pfam Name: Clp protease Pfam Description: Clp protease
  misc_feature (1)..(217): Homolog of NCBI NO: 18414804 NR Description: ATP-dependent Clp protease proteolytic subunit putative; protein id: At4g17040.1, supported by cDNA: 36017.,
  misc_feature (1)..(217): Homolog of NCBI NO: 19698857 NR Description: unknown protein [Arabidopsis thaliana]
  misc_feature (1)..(137): Homolog of NCBI NO: 7488077 NR Description: probable Clp proteinase - Arabidopsis thaliana Clp proteinase like protein [Arabidopsis thaliana]
  misc_feature (191)..(217): Homolog of NCBI NO: 7488077 NR Description: probable Clp proteinase - Arabidopsis thaliana Clp proteinase like protein [Arabidopsis thaliana]
  misc_feature (1)..(132): Homolog of NCBI NO: 34903202 NR Description: unnamed protein product [Oryza sativa (japonica group)] >gi|6815090|dbj|BAA90376.1| unnamed protein product
  misc_feature (14)..(205): Homolog of NCBI NO: 13812146 NR Description: ATP-dependent Clp protease proteolytic subunit
  misc_feature (4)..(199): Homolog of NCBI NO: 17231850 NR Description: ATP-dependent Clp protease proteolytic subunit
  misc_feature (8)..(199): Homolog of NCBI NO: 22299302 NR Description: ATP-dependent Clp protease proteolytic subunit 3
  misc_feature (4)..(199): Homolog of NCBI NO: 23126723 NR Description: hypothetical protein [Nostoc punctiforme]
  misc_feature (14)..(211): Homolog of NCBI NO: 18390982 NR Description: ATP-dependent Clp protease proteolytic subunit

SEQ ID NO: 92090 - DNA, 1506 bp, Arabidopsis thaliana; identical to SEQ ID NO: 88334
  misc_feature (1)..(1506): Ceres Seq. ID no. 12707699
  misc_feature: MA Experiment ID: 20000327 Result: Down-regulated in Transcription
  misc_feature: MA Experiment 20000327 PARAMETER Experiment Name: At_42deg_Heat_Sub_P Parameter: Age (day) Value: 14
  misc_feature: MA Experiment 20000327 PARAMETER Experiment Name: At_42deg_Heat_Sub_P Parameter: Organism Value: A. thaliana
  misc_feature: MA Experiment 20000327 PARAMETER Experiment Name: At_42deg_Heat_Sub_P Parameter: Plant Line Value: WS
  misc_feature: MA Experiment 20000327 PARAMETER Experiment Name: At_42deg_Heat_Sub_P Parameter: Temperature (deg C) Value: 42 vs. 22
  misc_feature: MA Experiment 20000327 PARAMETER Experiment Name: At_42deg_Heat_Sub_P Parameter: Timepoint (hr) Value: 1
  misc_feature: MA Experiment 20000327 PARAMETER Experiment Name: At_42deg_Heat_Sub_P Parameter: Tissue Value: Aerial

SEQ ID NO: 92091 - protein, 501 aa, Arabidopsis thaliana; identical to SEQ ID NO: 88335
  peptide (1)..(501): Ceres Seq. ID no. 12707700
  misc_feature (273)..(295): Pfam Name: MORN repeat Pfam Description: MORN repeat
  misc_feature (1)..(501): Homolog of NCBI NO: 21928129 NR Description: AT4g17080/dl4570w [Arabidopsis thaliana]
  misc_feature (152)..(501): Homolog of NCBI NO: 15235967 NR Description: hypothetical protein; protein id: At4g17080.1
  misc_feature (22)..(498): Homolog of NCBI NO: 18403768 NR Description: expressed protein; protein id: At2g35170.1, by cDNA: gi_16604413, supported by cDNA: gi_19699213 [Arabidopsis >gi|25370691|pir||E84765 hypothetical protein At2g35170
  misc_feature (36)..(501): Homolog of NCBI NO: 37536922 NR Description: putative phosphatidylinositol-4-phosphate
  misc_feature (1)..(395): Homolog of NCBI NO: 15235967 NR Description: hypothetical protein; protein id: At4g17080.1
  misc_feature (125)..(490): Homolog of NCBI NO: 15219142 NR Description: phosphatidylinositol-4-phosphate 5-kinase, protein id: At1g21920.1, supported by cDNA: 37462., supported by gi_13878044 [Arabidopsis thaliana]
  misc_feature (156)..(490): Homolog of NCBI NO: 21593251 NR Description: phosphatidylinositol-4-phosphate 5-kinase,
  misc_feature (128)..(490): Homolog of NCBI NO: 15217439 NR Description: unknown protein; protein id: At1g77660.1
  misc_feature (238)..(417): Homolog of NCBI NO: 40062709 NR Description: MORN repeat protein [uncultured bacterium 314]
  misc_feature (223)..(418): Homolog of NCBI NO: 40062709 NR Description: MORN repeat protein [uncultured bacterium 314]

SEQ ID NO: 92092 - DNA, 960 bp, Arabidopsis thaliana; identical to SEQ ID NO: 88336
  misc_feature (1)..(960): Ceres Seq. ID no. 12707701
  misc_feature: MA Experiment ID: 20000180 Result: Up-regulated in Transcription
  misc_feature: MA Experiment 20000180 PARAMETER Experiment Name: At_Germinating_Seeds_P Parameter: Age (hr) Value: 24 vs. 0
  misc_feature: MA Experiment 20000180 PARAMETER Experiment Name: At_Germinating_Seeds_P Parameter: Tissue Value: Germinating Seeds
  misc_feature: MA Experiment ID: 20001247 Result: Down-regulated in Transcription
  misc_feature: MA Experiment 20001247 PARAMETER Experiment Name: At_Far-red-induction_P Parameter: Age (day) Value: 7
  misc_feature: MA Experiment 20001247 PARAMETER Experiment Name: At_Far-red-induction_P Parameter: Light Value: Far-red vs. White
  misc_feature: MA Experiment 20001247 PARAMETER Experiment Name: At_Far-red-induction_P Parameter: Organism Value: A. thaliana
  misc_feature: MA Experiment 20001247 PARAMETER Experiment Name: At_Far-red-induction_P Parameter: Plant Line Value: Columbia
  misc_feature: MA Experiment 20001247 PARAMETER Experiment Name: At_Far-red-induction_P Parameter: Timepoint (hr) Value: 1
  misc_feature: MA Experiment 20001247 PARAMETER Experiment Name: At_Far-red-induction_P Parameter: Tissue Value: Whole Plant
  misc_feature: MA Experiment ID: 20001451 Result: Down-regulated in Transcription
  misc_feature: MA Experiment 20001451 PARAMETER Experiment Name: At_Far-red-induction_P Parameter: Age (day) Value: 7
  misc_feature: MA Experiment 20001451 PARAMETER Experiment Name: At_Far-red-induction_P Parameter: Light Value: Far-red vs. White
  misc_feature: MA Experiment 20001451 PARAMETER Experiment Name: At_Far-red-induction_P Parameter: Organism Value: A. thaliana
  misc_feature: MA Experiment 20001451 PARAMETER Experiment Name: At_Far-red-induction_P Parameter: Plant Line Value: Columbia
  misc_feature: MA Experiment 20001451 PARAMETER Experiment Name: At_Far-red-induction_P Parameter: Timepoint (hr) Value: 24
  misc_feature: MA Experiment 20001451 PARAMETER Experiment Name: At_Far-red-induction_P Parameter: Tissue Value: Whole Plant
  misc_feature: MA Experiment ID: 20001911 Result: Down-regulated in Transcription
  misc_feature: MA Experiment 20001911 PARAMETER Experiment Name: At_Drought_Reproduction_P Parameter: Age (day) Value: 40
  misc_feature: MA Experiment 20001911 PARAMETER Experiment Name: At_Drought_Reproduction_P Parameter: Organism Value: A. thaliana
  misc_feature: MA Experiment 20001911 PARAMETER Experiment Name: At_Drought_Reproduction_P Parameter: Plant Line Value: WS
  misc_feature: MA Experiment 20001911 PARAMETER Experiment Name: At_Drought_Reproduction_P Parameter: Timepoint (day) Value: 10
  misc_feature: MA Experiment 20001911 PARAMETER Experiment Name: At_Drought_Reproduction_P Parameter: Tissue Value: Flowers
  misc_feature: MA Experiment 20001911 PARAMETER Experiment Name: At_Drought_Reproduction_P Parameter: Treatment Value: Drought vs. No Drought

SEQ ID NO: 92093 - protein, 319 aa, Arabidopsis thaliana; identical to SEQ ID NO: 88337
  peptide (1)..(319): Ceres Seq. ID no. 12707702
  misc_feature (2)..(194): Homolog of NCBI NO: 20260612 NR Description: putative serine protease-like protein
  misc_feature (195)..(292): Homolog of NCBI NO: 20260612 NR Description: putative serine protease-like protein
  misc_feature (18)..(319): Homolog of NCBI NO: 25407557 NR Description: probable serine proteinase-like protein
  misc_feature (13)..(202): Homolog of NCBI NO: 38345945 NR Description: OSJNBb0103I08.16 [Oryza sativa (japonica
  misc_feature (176)..(292): Homolog of NCBI NO: 38345945 NR Description: OSJNBb0103I08.16 [Oryza sativa (japonica
  misc_feature (24)..(202): Homolog of NCBI NO: 29367523 NR Description: putative serine protease-like protein [Oryza
  misc_feature (176)..(292): Homolog of NCBI NO: 29367523 NR Description: putative serine protease-like protein [Oryza
  misc_feature (18)..(194): Homolog of NCBI NO: 30683929 NR Description: serine protease protein -related [Arabidopsis
  misc_feature (69)..(194): Homolog of NCBI NO: 7488185 NR Description: probable serine proteinase - Arabidopsis thaliana
  misc_feature (53)..(194): Homolog of NCBI NO: 22797893 NR Description: endoU protein [Xenopus laevis]

SEQ ID NO: 92094 - protein, 234 aa, Arabidopsis thaliana; identical to SEQ ID NO: 88338
  peptide (1)..(234): Ceres Seq. ID no. 12707703
  misc_feature (1)..(109): Homolog of NCBI NO: 20260612 NR Description: putative serine protease-like protein
  misc_feature (110)..(207): Homolog of NCBI NO: 20260612 NR Description: putative serine protease-like protein
  misc_feature (1)..(234): Homolog of NCBI NO: 25407557 NR Description: probable serine proteinase-like protein
  misc_feature (1)..(117): Homolog of NCBI NO: 38345945 NR Description: OSJNBb0103I08.16 [Oryza sativa (japonica
  misc_feature (91)..(207): Homolog of NCBI NO: 38345945 NR Description: OSJNBb0103I08.16 [Oryza sativa (japonica
  misc_feature (1)..(117): Homolog of NCBI NO: 29367523 NR Description: putative serine protease-like protein [Oryza
  misc_feature (91)..(207): Homolog of NCBI NO: 29367523 NR Description: putative serine protease-like protein [Oryza
  misc_feature (1)..(109): Homolog of NCBI NO: 30683929 NR Description: serine protease protein -related [Arabidopsis
  misc_feature (1)..(109): Homolog of NCBI NO: 7488185 NR Description: probable serine proteinase - Arabidopsis thaliana
  misc_feature (1)..(109): Homolog of NCBI NO: 22797893 NR Description: endoU protein [Xenopus laevis]

SEQ ID NO: 92095 - DNA, 1842 bp, Arabidopsis thaliana; identical to SEQ ID NO: 88339
  misc_feature (1)..(1842): Ceres Seq. ID no. 12707770
  misc_feature: MA Experiment ID: 20000315 Result: Down-regulated in Transcription
  misc_feature: MA Experiment 20000315 PARAMETER Experiment Name: At_14day_Shoots-Roots_Sub_P Parameter: Age (day) Value: 14
  misc_feature: MA Experiment 20000315 PARAMETER Experiment Name: At_14day_Shoots-Roots_Sub_P Parameter: Organism Value: A. thaliana
  misc_feature: MA Experiment 20000315 PARAMETER Experiment Name: At_14day_Shoots-Roots_Sub_P Parameter: Plant Line Value: WS
  misc_feature: MA Experiment 20000315 PARAMETER Experiment Name: At_14day_Shoots-Roots_Sub_P Parameter: Tissue Value: Shoots vs. Whole Plant
  misc_feature: MA Experiment ID: 20000440 Result: Up-regulated in Transcription
  misc_feature: MA Experiment 20000440 PARAMETER Experiment Name: At_Closed-Flower__Sub_P Parameter: Tissue Value: Closed Flower vs. Whole Plant
  misc_feature: MA Experiment ID: 20001807 Result: Down-regulated in Transcription
  misc_feature: MA Experiment 20001807 PARAMETER Experiment Name: At_50mM_NH4NO3_L-to-H_Sub_P Parameter: Timepoint (hr) Value: 6
  misc_feature: MA Experiment 20001807 PARAMETER Experiment Name: At_50mM_NH4NO3_L-to-H_Sub_P Parameter: Tissue Value: Leaf
  misc_feature: MA Experiment 20001807 PARAMETER Experiment Name: At_50mM_NH4NO3_L-to-H_Sub_P Parameter: Treatment Value: 50mM NH4NO3 vs 100mM Mannitol

SEQ ID NO: 92096 - protein, 613 aa, Arabidopsis thaliana; identical to SEQ ID NO: 88340
  peptide (1)..(613): Ceres Seq. ID no. 12707771
  misc_feature (24)..(296): Pfam Name: Palmitoyl protein thioesterase Pfam Description: Palmitoyl protein thioesterase
  misc_feature (62)..(299): Homolog of NCBI NO: 7488215 NR Description: probable thioesterase - Arabidopsis thaliana thioesterase like protein [Arabidopsis thaliana]
  misc_feature (490)..(578): Homolog of NCBI NO: 7488215 NR Description: probable thioesterase - Arabidopsis thaliana thioesterase like protein [Arabidopsis thaliana]
  misc_feature (339)..(418): Homolog of NCBI NO: 7488215 NR Description: probable thioesterase - Arabidopsis thaliana thioesterase like protein [Arabidopsis thaliana]
  misc_feature (300)..(338): Homolog of NCBI NO: 7488215 NR Description: probable thioesterase - Arabidopsis thaliana thioesterase like protein [Arabidopsis thaliana]
  misc_feature (1)..(298): Homolog of NCBI NO: 15236079 NR Description: putative protein; protein id: At4g17483.1 thaliana] >gi|22136628|gb|AAM91633.1| unknown protein
  misc_feature (300)..(578): Homolog of NCBI NO: 15236078 NR Description: putative protein; protein id: At4g17480.1, by cDNA: 253398. [Arabidopsis thaliana] unknown protein [Arabidopsis thaliana]
  misc_feature (300)..(578): Homolog of NCBI NO: 21554369 NR Description: palmitoyl-protein thioesterase precursor-like
  misc_feature (1)..(309): Homolog of NCBI NO: 15236078 NR Description: putative protein; protein id: At4g17480.1, by cDNA: 253398. [Arabidopsis thaliana] unknown protein [Arabidopsis thaliana]
  misc_feature (1)..(309): Homolog of NCBI NO: 21554369 NR Description: palmitoyl-protein thioesterase precursor-like
  misc_feature (288)..(572): Homolog of NCBI NO: 15238063 NR Description: palmitoyl-protein thioesterase precursor-like;

SEQ ID NO: 92097 - protein, 539 aa, Arabidopsis thaliana; identical to SEQ ID NO: 88341
  peptide (1)..(539): Ceres Seq. ID no. 12707772
  misc_feature (1)..(222): Pfam Name: Palmitoyl protein thioesterase Pfam Description: Palmitoyl protein thioesterase
  misc_feature (1)..(225): Homolog of NCBI NO: 7488215 NR Description: probable thioesterase - Arabidopsis thaliana thioesterase like protein [Arabidopsis thaliana]
  misc_feature (416)..(504): Homolog of NCBI NO: 7488215 NR Description: probable thioesterase - Arabidopsis thaliana thioesterase like protein [Arabidopsis thaliana]
  misc_feature (265)..(344): Homolog of NCBI NO: 7488215 NR Description: probable thioesterase - Arabidopsis thaliana thioesterase like protein [Arabidopsis thaliana]
  misc_feature (226)..(264): Homolog of NCBI NO: 7488215 NR Description: probable thioesterase - Arabidopsis thaliana thioesterase like protein [Arabidopsis thaliana]
  misc_feature (1)..(224): Homolog of NCBI NO: 15236079 NR Description: putative protein; protein id: At4g17483.1 thaliana] >gi|22136628|gb|AAM91633.1| unknown protein
  misc_feature (226)..(504): Homolog of NCBI NO: 15236078 NR Description: putative protein; protein id: At4g17480.1, by cDNA: 253398. [Arabidopsis thaliana] unknown protein [Arabidopsis thaliana]
  misc_feature (226)..(504): Homolog of NCBI NO: 21554369 NR Description: palmitoyl-protein thioesterase precursor-like
  misc_feature (1)..(235): Homolog of NCBI NO: 15236078 NR Description: putative protein; protein id: At4g17480.1, by cDNA: 253398. [Arabidopsis thaliana] unknown protein [Arabidopsis thaliana]
  misc_feature (1)..(235): Homolog of NCBI NO: 21554369 NR Description: palmitoyl-protein thioesterase precursor-like
  misc_feature (214)..(498): Homolog of NCBI NO: 15238063 NR Description: palmitoyl-protein thioesterase precursor-like;

SEQ ID NO: 92098 - protein, 523 aa, Arabidopsis thaliana; identical to SEQ ID NO: 88342
  peptide (1)..(523): Ceres Seq. ID no. 12707773
  misc_feature (1)..(206): Pfam Name: Palmitoyl protein thioesterase Pfam Description: Palmitoyl protein thioesterase
  misc_feature (1)..(209): Homolog of NCBI NO: 7488215 NR Description: probable thioesterase - Arabidopsis thaliana thioesterase like protein [Arabidopsis thaliana]
  misc_feature (400)..(488): Homolog of NCBI NO: 7488215 NR Description: probable thioesterase - Arabidopsis thaliana thioesterase like protein [Arabidopsis thaliana]
  misc_feature (249)..(328): Homolog of NCBI NO: 7488215 NR Description: probable thioesterase - Arabidopsis thaliana thioesterase like protein [Arabidopsis thaliana]
  misc_feature (210)..(248): Homolog of NCBI NO: 7488215 NR Description: probable thioesterase - Arabidopsis thaliana thioesterase like protein [Arabidopsis thaliana]
  misc_feature (1)..(208): Homolog of NCBI NO: 15236079 NR Description: putative protein; protein id: At4g17483.1 thaliana] >gi|22136628|gb|AAM91633.1| unknown protein
  misc_feature (210)..(488): Homolog of NCBI NO: 15236078 NR Description: putative protein; protein id: At4g17480.1, by cDNA: 253398. [Arabidopsis thaliana] unknown protein [Arabidopsis thaliana]
  misc_feature (210)..(488): Homolog of NCBI NO: 21554369 NR Description: palmitoyl-protein thioesterase precursor-like
  misc_feature (1)..(219): Homolog of NCBI NO: 15236078 NR Description: putative protein; protein id: At4g17480.1, by cDNA: 253398. [Arabidopsis thaliana] unknown protein [Arabidopsis thaliana]
  misc_feature (1)..(219): Homolog of NCBI NO: 21554369 NR Description: palmitoyl-protein thioesterase precursor-like
  misc_feature (198)..(482): Homolog of NCBI NO: 15238063 NR Description: palmitoyl-protein thioesterase precursor-like;

SEQ ID NO: 92099 - DNA, 807 bp, Arabidopsis thaliana; identical to SEQ ID NO: 88343
  misc_feature (1)..(807): Ceres Seq. ID no. 12707778
  misc_feature: MA Experiment ID: 108434 Result: Down-regulated in Transcription
  misc_feature: MA Experiment 108434 PARAMETER Experiment Name: At_Root_Tips_cDNA_P Parameter: Tissue Value: Root Tips
  misc_feature: MA Experiment ID: 108463 Result: Up-regulated in Transcription
  misc_feature: MA Experiment 108463 PARAMETER Experiment Name: At_Germinating_Seeds_cDNA_P Parameter: Age (day) Value: 3 vs. 0
  misc_feature: MA Experiment 108463 PARAMETER Experiment Name: At_Germinating_Seeds_cDNA_P Parameter: Tissue Value: Germinating Seeds
  misc_feature: MA Experiment ID: 108464 Result: Up-regulated in Transcription
  misc_feature: MA Experiment 108464 PARAMETER Experiment Name: At_Germinating_Seeds_cDNA_P Parameter: Age (day) Value: 4 vs. 0
  misc_feature: MA Experiment 108464 PARAMETER Experiment Name: At_Germinating_Seeds_cDNA_P Parameter: Tissue Value: Germinating Seeds
  misc_feature: MA Experiment ID: 108469 Result: Up-regulated in Transcription
  misc_feature: MA Experiment ID: 108488 Result: Down-regulated in Transcription
  misc_feature: MA Experiment ID: 108501 Result: Down-regulated in Transcription
  misc_feature: MA Experiment 108501 PARAMETER Experiment Name: At_ap2_floral_buds_cDNA_P Parameter: Plant Line Value: ap2 (Ler.)
  misc_feature: MA Experiment 108501 PARAMETER Experiment Name: At_ap2_floral_buds_cDNA_P Parameter: Tissue Value: Closed Flower
  misc_feature: MA Experiment ID: 108577 Result: Down-regulated in Transcription
  misc_feature: MA Experiment 108577 PARAMETER Experiment Name: At_42deg_Heat_cDNA_P Parameter: Temperature (deg C) Value: 42 vs. 22
  misc_feature: MA Experiment 108577 PARAMETER Experiment Name: At_42deg_Heat_cDNA_P Parameter: Timepoint (hr) Value: 6
  misc_feature: MA Experiment 108577 PARAMETER Experiment Name: At_42deg_Heat_cDNA_P Parameter: Tissue Value: Aerial
  misc_feature: MA Experiment ID: 108585 Result: Up-regulated in Transcription
  misc_feature: MA Experiment 108585 PARAMETER Experiment Name: At_5mM_NaNP_cDNA_P Parameter: Timepoint (hr) Value: 6
  misc_feature: MA Experiment 108585 PARAMETER Experiment Name: At_5mM_NaNP_cDNA_P Parameter: Tissue Value: Aerial
  misc_feature: MA Experiment 108585 PARAMETER Experiment Name: At_5mM_NaNP_cDNA_P Parameter: Treatment Value: null
  misc_feature: MA Experiment ID: 108594 Result: Up-regulated in Transcription
  misc_feature: MA Experiment 108594 PARAMETER Experiment Name: At_Ler-rhl_Root_cDNA_P Parameter: Plant Line Value: null
  misc_feature: MA Experiment ID: 108595 Result: Up-regulated in Transcription
  misc_feature: MA Experiment 108595 PARAMETER Experiment Name: At_Ler-pi_Ovule_cDNA_P Parameter: Plant Line Value: null
  misc_feature: MA Experiment ID: 108667 Result: Up-regulated in Transcription
  misc_feature: MA Experiment 108667 PARAMETER Experiment Name: At_2mM_SA_cDNA_P Parameter: Plant Line Value: WS
  misc_feature: MA Experiment 108667 PARAMETER Experiment Name: At_2mM_SA_cDNA_P Parameter: Timepoint (hr) Value: 1
  misc_feature: MA Experiment 108667 PARAMETER Experiment Name: At_2mM_SA_cDNA_P Parameter: Treatment Value: 2mM SA vs. No Treatment
  misc_feature: MA Experiment ID: 108668 Result: Up-regulated in Transcription
  misc_feature: MA Experiment 108668 PARAMETER Experiment Name: At_2mM_SA_cDNA_P Parameter: Plant Line Value: WS
  misc_feature: MA Experiment 108668 PARAMETER Experiment Name: At_2mM_SA_cDNA_P Parameter: Timepoint (hr) Value: 6
  misc_feature: MA Experiment 108668 PARAMETER Experiment Name: At_2mM_SA_cDNA_P Parameter: Treatment Value: 2mM SA vs. No Treatment
  misc_feature: MA Experiment ID: 20000070 Result: Up-regulated in Transcription
  misc_feature: MA Experiment 20000070 PARAMETER Experiment Name: At_100uM_ABA_Mutants_cDNA_P Parameter: Plant Line Value: CS24
  misc_feature: MA Experiment 20000070 PARAMETER Experiment Name: At_100uM_ABA_Mutants_cDNA_P Parameter: Timepoint (hr) Value: 6
  misc_feature: MA Experiment 20000070 PARAMETER Experiment Name: At_100uM_ABA_Mutants_cDNA_P Parameter: Tissue Value: Aerial
  misc_feature: MA Experiment 20000070 PARAMETER Experiment Name: At_100uM_ABA_Mutants_cDNA_P Parameter: Treatment Value: 100uM ABA vs. No Treatment
  misc_feature: MA Experiment ID: 20000072 Result: Up-regulated in Transcription
  misc_feature: MA Experiment 20000072 PARAMETER Experiment Name: At_100uM_ABA_Mutants_cDNA_P Parameter: Plant Line Value: CS8105
  misc_feature: MA Experiment 20000072 PARAMETER Experiment Name: At_100uM_ABA_Mutants_cDNA_P Parameter: Timepoint (hr) Value: 6
  misc_feature: MA Experiment 20000072 PARAMETER Experiment Name: At_100uM_ABA_Mutants_cDNA_P Parameter: Tissue Value: Aerial
  misc_feature: MA Experiment 20000072 PARAMETER Experiment Name: At_100uM_ABA_Mutants_cDNA_P Parameter: Treatment Value: 100uM ABA vs. No Treatment
  misc_feature: MA Experiment ID: 20000086 Result: Up-regulated in Transcription
  misc_feature: MA Experiment 20000086 PARAMETER Experiment Name: At_100uM_ABA_Mutants_cDNA_P Parameter: Plant Line Value: CS22
  misc_feature: MA Experiment 20000086 PARAMETER Experiment Name: At_100uM_ABA_Mutants_cDNA_P Parameter: Timepoint (hr) Value: 6
  misc_feature: MA Experiment 20000086 PARAMETER Experiment Name: At_100uM_ABA_Mutants_cDNA_P Parameter: Tissue Value: Aerial
  misc_feature: MA Experiment 20000086 PARAMETER Experiment Name: At_100uM_ABA_Mutants_cDNA_P Parameter: Treatment Value: 100uM ABA vs. No Treatment
  misc_feature: MA Experiment ID: 20000088 Result: Up-regulated in Transcription
  misc_feature: MA Experiment 20000088 PARAMETER Experiment Name: At_100uM_ABA_Mutants_cDNA_P Parameter: Plant Line Value: Landsberg
  misc_feature: MA Experiment 20000088 PARAMETER Experiment Name: At_100uM_ABA_Mutants_cDNA_P Parameter: Timepoint (hr) Value: 6
  misc_feature: MA Experiment 20000088 PARAMETER Experiment Name: At_100uM_ABA_Mutants_cDNA_P Parameter: Tissue Value: Aerial
  misc_feature: MA Experiment 20000088 PARAMETER Experiment Name: At_100uM_ABA_Mutants_cDNA_P Parameter: Treatment Value: 100uM ABA vs. No Treatment
  misc_feature: MA Experiment ID: 20000111 Result: Down-regulated in Transcription
  misc_feature: MA Experiment 20000111 PARAMETER Experiment Name: At_42deg_Heat_cDNA_P Parameter: Temperature (deg C) Value: 42 vs. 22
  misc_feature: MA Experiment 20000111 PARAMETER Experiment Name: At_42deg_Heat_cDNA_P Parameter: Timepoint (hr) Value: 6
  misc_feature: MA Experiment 20000111 PARAMETER Experiment Name: At_42deg_Heat_cDNA_P Parameter: Tissue Value: Aerial
  misc_feature: MA Experiment ID: 20000117 Result: Up-regulated in Transcription
  misc_feature: MA Experiment 20000117 PARAMETER Experiment Name: At_100uM_ABA_Mutants_cDNA_P Parameter: Plant Line Value: Columbia
  misc_feature: MA Experiment 20000117 PARAMETER Experiment Name: At_100uM_ABA_Mutants_cDNA_P Parameter: Timepoint (hr) Value: 6
  misc_feature: MA Experiment 20000117 PARAMETER Experiment Name: At_100uM_ABA_Mutants_cDNA_P Parameter: Tissue Value: Aerial
  misc_feature: MA Experiment 20000117 PARAMETER Experiment Name: At_100uM_ABA_Mutants_cDNA_P Parameter: Treatment Value: 100uM ABA vs. No Treatment
  misc_feature: MA Experiment ID: 20000144 Result: Down-regulated in Transcription
  misc_feature: MA Experiment 20000144 PARAMETER Experiment Name: At_42deg_Heat_cDNA_P Parameter: Temperature (deg C) Value: 42 vs. 22
  misc_feature: MA Experiment 20000144 PARAMETER Experiment Name: At_42deg_Heat_cDNA_P Parameter: Timepoint (hr) Value: 1
  misc_feature: MA Experiment 20000144 PARAMETER Experiment Name: At_42deg_Heat_cDNA_P Parameter: Tissue Value: Aerial
  misc_feature: MA Experiment ID: 20000171 Result: Down-regulated in Transcription
  misc_feature: MA Experiment 20000171 PARAMETER Experiment Name: At_42deg_Heat_P Parameter: Age (day) Value: 14
  misc_feature: MA Experiment 20000171 PARAMETER Experiment Name: At_42deg_Heat_P Parameter: Organism Value: A. thaliana
  misc_feature: MA Experiment 20000171 PARAMETER Experiment Name: At_42deg_Heat_P Parameter: Plant Line Value: WS
  misc_feature: MA Experiment 20000171 PARAMETER Experiment Name: At_42deg_Heat_P Parameter: Temperature (deg C) Value: 42 vs. 22
  misc_feature: MA Experiment 20000171 PARAMETER Experiment Name: At_42deg_Heat_P Parameter: Timepoint (hr) Value: 1
  misc_feature: MA Experiment 20000171 PARAMETER Experiment Name: At_42deg_Heat_P Parameter: Tissue Value: Aerial
  misc_feature: MA Experiment ID: 20000179 Result: Down-regulated in Transcription
  misc_feature: MA Experiment 20000179 PARAMETER Experiment Name: At_Germinating_Seeds_P Parameter: Age (hr) Value: 6 vs. 0
  misc_feature: MA Experiment 20000179 PARAMETER Experiment Name: At_Germinating_Seeds_P Parameter: Tissue Value: Germinating Seeds
  misc_feature: MA Experiment ID: 20000182 Result: Up-regulated in Transcription
  misc_feature: MA Experiment 20000182 PARAMETER Experiment Name: At_2mM_SA_P Parameter: Age (day) Value: 14
  misc_feature: MA Experiment 20000182 PARAMETER Experiment Name: At_2mM_SA_P Parameter: Organism Value: A. thaliana
  misc_feature: MA Experiment 20000182 PARAMETER Experiment Name: At_2mM_SA_P Parameter: Plant Line Value: WS
  misc_feature: MA Experiment 20000182 PARAMETER Experiment Name: At_2mM_SA_P Parameter: Timepoint (hr) Value: 6
  misc_feature: MA Experiment 20000182 PARAMETER Experiment Name: At_2mM_SA_P Parameter: Tissue Value: Aerial
  misc_feature: MA Experiment 20000182 PARAMETER Experiment Name: At_2mM_SA_P Parameter: Treatment Value: 2mM SA vs. No Treatment
  misc_feature: MA Experiment ID: 20000185 Result: Down-regulated in Transcription
  misc_feature: MA Experiment 20000185 PARAMETER Experiment Name: At_Roots__P Parameter: Age (day) Value: 7 vs. 21
  misc_feature: MA Experiment 20000185 PARAMETER Experiment Name: At_Roots__P Parameter: Organism Value: A. thaliana
  misc_feature: MA Experiment 20000185 PARAMETER Experiment Name: At_Roots__P Parameter: Tissue Value: Roots vs. Whole Plant
  misc_feature: MA Experiment ID: 20000227 Result: Down-regulated in Transcription
  misc_feature: MA Experiment 20000227 PARAMETER Experiment Name: At_Root-Tips-vs-Tops_P Parameter: Tissue Value: Root Tips vs. Root Tops
  misc_feature: MA Experiment ID: 20000234 Result: Down-regulated in Transcription
  misc_feature: MA Experiment 20000234 PARAMETER Experiment Name: At_Siliques_P Parameter: Age (day) Value: 21
  misc_feature: MA Experiment 20000234 PARAMETER Experiment Name: At_Siliques_P Parameter: Organism Value: A. thaliana
  misc_feature: MA Experiment 20000234 PARAMETER Experiment Name: At_Siliques_P Parameter: Plant Line Value: WS
  misc_feature: MA Experiment 20000234 PARAMETER Experiment Name: At_Siliques_P Parameter: Tissue Value: Less Than 5mm Siliques vs. Whole Plant
  misc_feature: MA Experiment ID: 20000235 Result: Down-regulated in Transcription
  misc_feature: MA Experiment 20000235 PARAMETER Experiment Name: At_Siliques_P Parameter: Age (day) Value: 21
  misc_feature: MA Experiment 20000235 PARAMETER Experiment Name: At_Siliques_P Parameter: Organism Value: A. thaliana
  misc_feature: MA Experiment 20000235 PARAMETER Experiment Name: At_Siliques_P Parameter: Plant Line Value: WS
  misc_feature: MA Experiment 20000235 PARAMETER Experiment Name: At_Siliques_P Parameter: Tissue Value: 5-10mm Siliques vs. Whole Plant
  misc_feature: MA Experiment ID: 20000264 Result: Down-regulated in Transcription
  misc_feature: MA Experiment 20000264 PARAMETER Experiment Name: At_Open_Flower_P Parameter: Age (day) Value: 21
  misc_feature: MA Experiment 20000264 PARAMETER Experiment Name: At_Open_Flower_P Parameter: Plant Line Value: WS
  misc_feature: MA Experiment 20000264 PARAMETER Experiment Name: At_Open_Flower_P Parameter: Tissue Value: Open Flower vs. Whole Plant
  misc_feature: MA Experiment ID: 20000265 Result: Down-regulated in Transcription
  misc_feature: MA Experiment 20000265 PARAMETER Experiment Name: At_Open_Flower_P Parameter: Age (day) Value: 21
  misc_feature: MA Experiment 20000265 PARAMETER Experiment Name: At_Open_Flower_P Parameter: Plant Line Value: WS
  misc_feature: MA Experiment 20000265 PARAMETER Experiment Name: At_Open_Flower_P Parameter: Tissue Value: Closed Flower vs. Whole Plant
  misc_feature: MA Experiment ID: 20000286 Result: Down-regulated in Transcription
  misc_feature: MA Experiment 20000286 PARAMETER Experiment Name: At_Open_Flower_P Parameter: Age (day) Value: 21
  misc_feature: MA Experiment 20000286 PARAMETER Experiment Name: At_Open_Flower_P Parameter: Plant Line Value: WS
  misc_feature: MA Experiment 20000286 PARAMETER Experiment Name: At_Open_Flower_P Parameter: Tissue Value: Half Open vs. Whole Plant
  misc_feature: MA Experiment ID: 20000436 Result: Down-regulated in Transcription
  misc_feature: MA Experiment 20000436 PARAMETER Experiment Name: At_Drought_P Parameter: Age (day) Value: 7
  misc_feature: MA Experiment 20000436 PARAMETER Experiment Name: At_Drought_P Parameter: Organism Value: A. thaliana
  misc_feature: MA Experiment 20000436 PARAMETER Experiment Name: At_Drought_P Parameter: Plant Line Value: WS
  misc_feature: MA Experiment 20000436 PARAMETER Experiment Name: At_Drought_P Parameter: Timepoint (hr) Value: 12
  misc_feature: MA Experiment 20000436 PARAMETER Experiment Name: At_Drought_P Parameter: Tissue Value: Whole Plant
  misc_feature: MA Experiment 20000436 PARAMETER Experiment Name: At_Drought_P Parameter: Treatment Value: Drought vs. No Drought
  misc_feature: MA Experiment ID: 20000437 Result: Down-regulated in Transcription
  misc_feature: MA Experiment 20000437 PARAMETER Experiment Name: At_Drought_P Parameter: Age (day) Value: 8
  misc_feature: MA Experiment 20000437 PARAMETER Experiment Name: At_Drought_P Parameter: Organism Value: A. thaliana
  misc_feature: MA Experiment 20000437 PARAMETER Experiment Name: At_Drought_P Parameter: Plant Line Value: WS
  misc_feature: MA Experiment 20000437 PARAMETER Experiment Name: At_Drought_P Parameter: Timepoint (hr) Value: 24
  misc_feature: MA Experiment 20000437 PARAMETER Experiment Name: At_Drought_P Parameter: Tissue Value: Whole Plant
  misc_feature: MA Experiment 20000437 PARAMETER Experiment Name: At_Drought_P Parameter: Treatment Value: Drought vs. No Drought
  misc_feature: MA Experiment ID: 20000438 Result: Down-regulated in Transcription
  misc_feature: MA Experiment 20000438 PARAMETER Experiment Name: At_Shoots__P Parameter: Age (day) Value: 14
  misc_feature: MA Experiment 20000438 PARAMETER Experiment Name: At_Shoots__P Parameter: Tissue Value: Shoots vs. Whole Plant
  misc_feature: MA Experiment ID: 20000439 Result: Down-regulated in Transcription
  misc_feature: MA Experiment 20000439 PARAMETER Experiment Name: At_Roots__P Parameter: Age (day) Value: 14 vs. 21
  misc_feature: MA Experiment 20000439 PARAMETER Experiment Name: At_Roots__P Parameter: Organism Value: A. thaliana
  misc_feature: MA Experiment 20000439 PARAMETER Experiment Name: At_Roots__P Parameter: Tissue Value: Roots vs. Whole Plant
  misc_feature: MA Experiment ID: 20000441 Result: Up-regulated in Transcription
  misc_feature: MA Experiment 20000441 PARAMETER Experiment Name: At_1uM_BR-BRZ__P Parameter: Tissue Value: Shoot Apices
  misc_feature: MA Experiment 20000441 PARAMETER Experiment Name: At_1uM_BR-BRZ__P Parameter: Treatment Value: 1uM BR vs. No Treatment
  misc_feature: MA Experiment ID: 20000443 Result: Up-regulated in Transcription
  misc_feature: MA Experiment 20000443 PARAMETER Experiment Name: At_1uM_BR-BRZ__P Parameter: Tissue Value: Shoot Apices
  misc_feature: MA Experiment 20000443 PARAMETER Experiment Name: At_1uM_BR-BRZ__P Parameter: Treatment Value: 1uM BRZ vs. No Treatment
  misc_feature: MA Experiment ID: 20000460 Result: Up-regulated in Transcription
  misc_feature: MA Experiment 20000460 PARAMETER Experiment Name: At_10percent_PEG_P Parameter: Age (day) Value: 12
  misc_feature: MA Experiment 20000460 PARAMETER Experiment Name: At_10percent_PEG_P Parameter: Organism Value: A. thaliana
  misc_feature: MA Experiment 20000460 PARAMETER Experiment Name: At_10percent_PEG_P Parameter: Plant Line Value: WS
  misc_feature: MA Experiment 20000460 PARAMETER Experiment Name: At_10percent_PEG_P Parameter: Timepoint (day) Value: 12
  misc_feature: MA Experiment 20000460 PARAMETER Experiment Name: At_10percent_PEG_P Parameter: Tissue Value: Whole Plant
  misc_feature: MA Experiment 20000460 PARAMETER Experiment Name: At_10percent_PEG_P Parameter: Treatment Value: 10percent PEG vs. No Treatment
  misc_feature: MA Experiment ID: 20000573 Result: Down-regulated in Transcription
  misc_feature: MA Experiment 20000573 PARAMETER Experiment Name: At_100uM_ABA_Mutants__P Parameter: Organism Value: A. thaliana
  misc_feature: MA Experiment 20000573 PARAMETER Experiment Name: At_100uM_ABA_Mutants__P Parameter: Plant Line Value: CS22 vs. Ler wt
  misc_feature: MA Experiment 20000573 PARAMETER Experiment Name: At_100uM_ABA_Mutants__P Parameter: Timepoint (hr) Value: N/A
  misc_feature: MA Experiment 20000573 PARAMETER Experiment Name: At_100uM_ABA_Mutants__P Parameter: Tissue Value: Whole Plant
  misc_feature: MA Experiment 20000573 PARAMETER Experiment Name: At_100uM_ABA_Mutants__P Parameter: Treatment Value: None
  misc_feature: MA Experiment ID: 20000574 Result: Down-regulated in Transcription
  misc_feature: MA Experiment 20000574 PARAMETER Experiment Name: At_100uM_ABA_Mutants__P Parameter: Organism Value: A. thaliana
  misc_feature: MA Experiment 20000574 PARAMETER Experiment Name: At_100uM_ABA_Mutants__P Parameter: Plant Line Value: CS23 vs. Ler wt
  misc_feature: MA Experiment 20000574 PARAMETER Experiment Name: At_100uM_ABA_Mutants__P Parameter: Timepoint (hr) Value: N/A
  misc_feature: MA Experiment 20000574 PARAMETER Experiment Name: At_100uM_ABA_Mutants__P Parameter: Tissue Value: Whole Plant
  misc_feature: MA Experiment 20000574 PARAMETER Experiment Name: At_100uM_ABA_Mutants__P Parameter: Treatment Value: None
  misc_feature: MA Experiment ID: 20000576 Result: Down-regulated in Transcription
  misc_feature: MA Experiment 20000576 PARAMETER Experiment Name: At_100uM_ABA_Mutants__P Parameter: Organism Value: A. thaliana
  misc_feature: MA Experiment 20000576 PARAMETER Experiment Name: At_100uM_ABA_Mutants__P Parameter: Plant Line Value: CS23
  misc_feature: MA Experiment 20000576 PARAMETER Experiment Name: At_100uM_ABA_Mutants__P Parameter: Timepoint (hr) Value: 6
  misc_feature: MA Experiment 20000576 PARAMETER Experiment Name: At_100uM_ABA_Mutants__P Parameter: Tissue Value: Whole Plant
  misc_feature: MA Experiment 20000576 PARAMETER Experiment Name: At_100uM_ABA_Mutants__P Parameter: Treatment Value: 1uM ABA vs. No Treatment
  misc_feature: MA Experiment ID: 20000709 Result: Up-regulated in Transcription
  misc_feature: MA Experiment 20000709 PARAMETER Experiment Name: At_15mM_NH4NO3_L-to-H_P Parameter: Age (hr) Value: 14
  misc_feature: MA Experiment 20000709 PARAMETER Experiment Name: At_15mM_NH4NO3_L-to-H_P Parameter: Organism Value: A. thaliana
  misc_feature: MA Experiment 20000709 PARAMETER Experiment Name: At_15mM_NH4NO3_L-to-H_P Parameter: Plant Line Value: WS
  misc_feature: MA Experiment 20000709 PARAMETER Experiment Name: At_15mM_NH4NO3_L-to-H_P Parameter: Timepoint (hr) Value: 4
  misc_feature: MA Experiment 20000709 PARAMETER Experiment Name: At_15mM_NH4NO3_L-to-H_P Parameter: Tissue Value: Aerial
  misc_feature: MA Experiment 20000709 PARAMETER Experiment Name: At_15mM_NH4NO3_L-to-H_P Parameter: Treatment Value: 15mM NH4NO3 vs. 30mM Mannitol
  misc_feature: MA Experiment ID: 20000794 Result: Down-regulated in Transcription
  misc_feature: MA Experiment 20000794 PARAMETER Experiment Name: At_Petals_P Parameter: Age (day) Value: 23-25 days
  misc_feature: MA Experiment 20000794 PARAMETER Experiment Name: At_Petals_P Parameter: Plant Line Value: WS
  misc_feature: MA Experiment 20000794 PARAMETER Experiment Name: At_Petals_P Parameter: Tissue Value: Petals vs. Whole plant
  misc_feature: MA Experiment ID: 20001556 Result: Down-regulated in Transcription
  misc_feature: MA Experiment 20001556 PARAMETER Experiment Name: At_Drought_Soil_Dry_P Parameter: Age (day) Value: 26
  misc_feature: MA Experiment 20001556 PARAMETER Experiment Name: At_Drought_Soil_Dry_P Parameter: Organism Value: A. thaliana
  misc_feature: MA Experiment 20001556 PARAMETER Experiment Name: At_Drought_Soil_Dry_P Parameter: Plant Line Value: WS
  misc_feature: MA Experiment 20001556 PARAMETER Experiment Name: At_Drought_Soil_Dry_P Parameter: Post Timepoint (hr) Value: None
  misc_feature: MA Experiment 20001556 PARAMETER Experiment Name: At_Drought_Soil_Dry_P Parameter: Post-Treatment Value: None
  misc_feature: MA Experiment 20001556 PARAMETER Experiment Name: At_Drought_Soil_Dry_P Parameter: Timepoint (day) Value: 12
  misc_feature: MA Experiment 20001556 PARAMETER Experiment Name: At_Drought_Soil_Dry_P Parameter: Treatment Value: Drought vs. No Drought
  misc_feature: MA Experiment ID: 20001904 Result: Down-regulated in Transcription
  misc_feature: MA Experiment 20001904 PARAMETER Experiment Name: At_Drought_Reproduction_P Parameter: Age (day) Value: 37
  misc_feature: MA Experiment 20001904 PARAMETER Experiment Name: At_Drought_Reproduction_P Parameter: Organism Value: A. thaliana
  misc_feature: MA Experiment 20001904 PARAMETER Experiment Name: At_Drought_Reproduction_P Parameter: Plant Line Value: WS
  misc_feature: MA Experiment 20001904 PARAMETER Experiment Name: At_Drought_Reproduction_P Parameter: Timepoint (day) Value: 7
  misc_feature: MA Experiment 20001904 PARAMETER Experiment Name: At_Drought_Reproduction_P Parameter: Tissue Value: Rosettes
  misc_feature: MA Experiment 20001904 PARAMETER Experiment Name: At_Drought_Reproduction_P Parameter: Treatment Value: Drought vs. No Drought

SEQ ID NO: 92100 - protein, 268 aa, Arabidopsis thaliana; identical to SEQ ID NO: 88344
  peptide (1)..(268): Ceres Seq. ID no. 12707779
  misc_feature (145)..(210): Pfam Name: AP2 domain Pfam Description: AP2 domain
  misc_feature (1)..(268): Homolog of NCBI NO: 21264420 NR Description: Ethylene responsive element binding factor 1
  misc_feature (3)..(268): Homolog of NCBI NO: 25350258 NR Description: ethylene responsive element binding factor 1 - Arabidopsis thaliana >gi|3434967|dbj|BAA32418.1| ethylene
  misc_feature (44)..(268): Homolog of NCBI NO: 25350257 NR Description: EREBP-2 protein [imported] - Arabidopsis thaliana
  misc_feature (81)..(268): Homolog of NCBI NO: 18414897 NR Description: ethylene responsive element binding factor 1 !); protein id: At4g17500.1, supported by cDNA: gi_16648794, by cDNA: gi_17064913, supported by cDNA: gi_3434966 [Arabidopsis
  misc_feature (63)..(267): Homolog of NCBI NO: 15238041 NR Description: ethylene responsive element binding factor 2 protein id: At5g47220.1, supported by cDNA: 3012., supported by gi_3434968 [Arabidopsis thaliana]
  misc_feature (8)..(43): Homolog of NCBI NO: 15238041 NR Description: ethylene responsive element binding factor 2 protein id: At5g47220.1, supported by cDNA: 3012., supported by gi_3434968 [Arabidopsis thaliana]
  misc_feature (63)..(267): Homolog of NCBI NO: 21592595 NR Description: ethylene responsive element binding factor 2
  misc_feature (8)..(43): Homolog of NCBI NO: 21592595 NR Description: ethylene responsive element binding factor 2
  misc_feature (1)..(238): Homolog of NCBI NO: 7528276 NR Description: AP2-related transcription factor
  misc_feature (49)..(242): Homolog of NCBI NO: 28274828 NR Description: ethylene response factor 1 [Lycopersicon

SEQ ID NO: 92101 - protein, 266 aa, Arabidopsis thaliana; identical to SEQ ID NO: 88345
  peptide (1)..(266): Ceres Seq. ID no. 12707780
  misc_feature (143)..(208): Pfam Name: AP2 domain Pfam Description: AP2 domain
  misc_feature (1)..(266): Homolog of NCBI NO: 21264420 NR Description: Ethylene responsive element binding factor 1
  misc_feature (1)..(266): Homolog of NCBI NO: 25350258 NR Description: ethylene responsive element binding factor 1 - Arabidopsis thaliana >gi|3434967|dbj|BAA32418.1| ethylene
  misc_feature (42)..(266): Homolog of NCBI NO: 25350257 NR Description: EREBP-2 protein [imported] - Arabidopsis thaliana
  misc_feature (79)..(266): Homolog of NCBI NO: 18414897 NR Description: ethylene responsive element binding factor 1 !); protein id: At4g17500.1, supported by cDNA: gi_16648794, by cDNA: gi_17064913, supported by cDNA: gi_3434966 [Arabidopsis
  misc_feature (61)..(265): Homolog of NCBI NO: 15238041 NR Description: ethylene responsive element binding factor 2 protein id: At5g47220.1, supported by cDNA: 3012., supported by gi_3434968 [Arabidopsis thaliana]
  misc_feature (6)..(41): Homolog of NCBI NO: 15238041 NR Description: ethylene responsive element binding factor 2 protein id: At5g47220.1, supported by cDNA: 3012., supported by gi_3434968 [Arabidopsis thaliana]
  misc_feature (61)..(265): Homolog of NCBI NO: 21592595 NR Description: ethylene responsive element binding factor 2
  misc_feature (6)..(41): Homolog of NCBI NO: 21592595 NR Description: ethylene responsive element binding factor 2
  misc_feature (1)..(236): Homolog of NCBI NO: 7528276 NR Description: AP2-related transcription factor
  misc_feature (47)..(240): Homolog of NCBI NO: 28274828 NR Description: ethylene response factor 1 [Lycopersicon

SEQ ID NO: 92102 - protein, 188 aa, Arabidopsis thaliana; identical to SEQ ID NO: 27258
  peptide (1)..(188): Ceres Seq. ID no. 12707781
  misc_feature (65)..(130): Pfam Name: AP2 domain Pfam Description: AP2 domain
  misc_feature (1)..(188): Homolog of NCBI NO: 21264420 NR Description: Ethylene responsive element binding factor 1
  misc_feature (1)..(188): Homolog of NCBI NO: 25350258 NR Description: ethylene responsive element binding factor 1 - Arabidopsis thaliana >gi|3434967|dbj|BAA32418.1| ethylene
  misc_feature (1)..(188): Homolog of NCBI NO: 25350257 NR Description: EREBP-2 protein [imported] - Arabidopsis thaliana
  misc_feature (1)..(188): Homolog of NCBI NO: 18414897 NR Description: ethylene responsive element binding factor 1 !); protein id: At4g17500.1, supported by cDNA: gi_16648794, by cDNA: gi_17064913, supported by cDNA: gi_3434966 [Arabidopsis
  misc_feature (1)..(187): Homolog of NCBI NO: 15238041 NR Description: ethylene responsive element binding factor 2 protein id: At5g47220.1, supported by cDNA: 3012., supported by gi_3434968 [Arabidopsis thaliana]
  misc_feature (1)..(187): Homolog of NCBI NO: 21592595 NR Description: ethylene responsive element binding factor 2
  misc_feature (1)..(158): Homolog of NCBI NO: 7528276 NR Description: AP2-related transcription factor
  misc_feature (1)..(162): Homolog of NCBI NO: 28274828 NR Description: ethylene response factor 1 [Lycopersicon
  misc_feature (1)..(187): Homolog of NCBI NO: 8809571 NR Description: ethylene-responsive element binding factor
  misc_feature (1)..(188): Homolog of NCBI NO: 7489077 NR Description: transcription factor Pti4 - tomato (fragment)

SEQ ID NO: 92103 - DNA, 822 bp, Arabidopsis thaliana; identical to SEQ ID NO: 88347
  misc_feature (1)..(822): Ceres Seq. ID no. 12707819
  misc_feature: MA Experiment ID: 108501 Result: Up-regulated in Transcription
  misc_feature: MA Experiment 108501 PARAMETER Experiment Name: At_ap2_floral_buds_cDNA_P Parameter: Plant Line Value: ap2 (Ler.)
  misc_feature: MA Experiment 108501 PARAMETER Experiment Name: At_ap2_floral_buds_cDNA_P Parameter: Tissue Value: Closed Flower
  misc_feature: MA Experiment ID: 108572 Result: Down-regulated in Transcription
  misc_feature: MA Experiment 108572 PARAMETER Experiment Name: At_Drought_cDNA_P Parameter: Timepoint (hr) Value: 1
  misc_feature: MA Experiment 108572 PARAMETER Experiment Name: At_Drought_cDNA_P Parameter: Tissue Value: Aerial
  misc_feature: MA Experiment 108572 PARAMETER Experiment Name: At_Drought_cDNA_P Parameter: Treatment Value: Drought vs. No Drought
  misc_feature: MA Experiment ID: 108595 Result: Up-regulated in Transcription
  misc_feature: MA Experiment 108595 PARAMETER Experiment Name: At_Ler-pi_Ovule_cDNA_P Parameter: Plant Line Value: null
  misc_feature: MA Experiment ID: 20000166 Result: Down-regulated in Transcription
  misc_feature: MA Experiment 20000166 PARAMETER Experiment Name: At_100uM_ABA_P Parameter: Age (day) Value: 14
  misc_feature: MA Experiment 20000166 PARAMETER Experiment Name: At_100uM_ABA_P Parameter: Organism Value: A. thaliana
  misc_feature: MA Experiment 20000166 PARAMETER Experiment Name: At_100uM_ABA_P Parameter: Plant Line Value: WS
  misc_feature: MA Experiment 20000166 PARAMETER Experiment Name: At_100uM_ABA_P Parameter: Timepoint (hr) Value: 1
  misc_feature: MA Experiment 20000166 PARAMETER Experiment Name: At_100uM_ABA_P Parameter: Tissue Value: Aerial
  misc_feature: MA Experiment 20000166 PARAMETER Experiment Name: At_100uM_ABA_P Parameter: Treatment Value: 100uM ABA vs. No Treatment
  misc_feature: MA Experiment ID: 20000173 Result: Down-regulated in Transcription
  misc_feature: MA Experiment 20000173 PARAMETER Experiment Name: At_42deg_Heat_P Parameter: Age (day) Value: 14
  misc_feature: MA Experiment 20000173 PARAMETER Experiment Name: At_42deg_Heat_P Parameter: Organism Value: A. thaliana
  misc_feature: MA Experiment 20000173 PARAMETER Experiment Name: At_42deg_Heat_P Parameter: Plant Line Value: WS
  misc_feature: MA Experiment 20000173 PARAMETER Experiment Name: At_42deg_Heat_P Parameter: Temperature (deg C) Value: 42 vs. 22
  misc_feature: MA Experiment 20000173 PARAMETER Experiment Name: At_42deg_Heat_P Parameter: Timepoint (hr) Value: 6
  misc_feature: MA Experiment 20000173 PARAMETER Experiment Name: At_42deg_Heat_P Parameter: Tissue Value: Aerial
  misc_feature: MA Experiment ID: 20000234 Result: Up-regulated in Transcription
  misc_feature: MA Experiment 20000234 PARAMETER Experiment Name: At_Siliques_P Parameter: Age (day) Value: 21
  misc_feature: MA Experiment 20000234 PARAMETER Experiment Name: At_Siliques_P Parameter: Organism Value: A. thaliana
  misc_feature: MA Experiment 20000234 PARAMETER Experiment Name: At_Siliques_P Parameter: Plant Line Value: WS
  misc_feature: MA Experiment 20000234 PARAMETER Experiment Name: At_Siliques_P Parameter: Tissue Value: Less Than 5mm Siliques vs. Whole Plant
  misc_feature: MA Experiment ID: 20000235 Result: Up-regulated in Transcription
  misc_feature: MA Experiment 20000235 PARAMETER Experiment Name: At_Siliques_P Parameter: Age (day) Value: 21
  misc_feature: MA Experiment 20000235 PARAMETER Experiment Name: At_Siliques_P Parameter: Organism Value: A. thaliana
  misc_feature: MA Experiment 20000235 PARAMETER Experiment Name: At_Siliques_P Parameter: Plant Line Value: WS
  misc_feature: MA Experiment 20000235 PARAMETER Experiment Name: At_Siliques_P Parameter: Tissue Value: 5-10mm Siliques vs. Whole Plant
  misc_feature: MA Experiment ID: 20000264 Result: Up-regulated in Transcription
  misc_feature: MA Experiment 20000264 PARAMETER Experiment Name: At_Open_Flower_P Parameter: Age (day) Value: 21
  misc_feature: MA Experiment 20000264 PARAMETER Experiment Name: At_Open_Flower_P Parameter: Plant Line Value: WS
  misc_feature: MA Experiment 20000264 PARAMETER Experiment Name: At_Open_Flower_P Parameter: Tissue Value: Open Flower vs. Whole Plant
  misc_feature: MA Experiment ID: 20000265 Result: Up-regulated in Transcription
  misc_feature: MA Experiment 20000265 PARAMETER Experiment Name: At_Open_Flower_P Parameter: Age (day) Value: 21
  misc_feature: MA Experiment 20000265 PARAMETER Experiment Name: At_Open_Flower_P Parameter: Plant Line Value: WS
  misc_feature: MA Experiment 20000265 PARAMETER Experiment Name: At_Open_Flower_P Parameter: Tissue Value: Closed Flower vs. Whole Plant
  misc_feature: MA Experiment ID: 20000269 Result: Up-regulated in Transcription
  misc_feature: MA Experiment 20000269 PARAMETER Experiment Name: At_1mM_KNO3_L-vs-H_Roots_P Parameter: Age (day) Value: 7,10,12
  misc_feature: MA Experiment 20000269 PARAMETER Experiment Name: At_1mM_KNO3_L-vs-H_Roots_P Parameter: Organism Value: A. thaliana
  misc_feature: MA Experiment 20000269 PARAMETER Experiment Name: At_1mM_KNO3_L-vs-H_Roots_P Parameter: Plant Line Value: WS
  misc_feature: MA Experiment 20000269 PARAMETER Experiment Name: At_1mM_KNO3_L-vs-H_Roots_P Parameter: Timepoint (day) Value: 7,10,12
  misc_feature: MA Experiment 20000269 PARAMETER Experiment Name: At_1mM_KNO3_L-vs-H_Roots_P Parameter: Tissue Value: Roots
  misc_feature: MA Experiment 20000269 PARAMETER Experiment Name: At_1mM_KNO3_L-vs-H_Roots_P Parameter: Treatment Value: 1mM KNO3 vs. 50mM KNO3
  misc_feature: MA Experiment ID: 20000286 Result: Up-regulated in Transcription
  misc_feature: MA Experiment 20000286 PARAMETER Experiment Name: At_Open_Flower_P Parameter: Age (day) Value: 21
  misc_feature: MA Experiment 20000286 PARAMETER Experiment Name: At_Open_Flower_P Parameter: Plant Line Value: WS
  misc_feature: MA Experiment 20000286 PARAMETER Experiment Name: At_Open_Flower_P Parameter: Tissue Value: Half Open vs. Whole Plant
  misc_feature: MA Experiment ID: 20000438 Result: Down-regulated in Transcription
  misc_feature: MA Experiment 20000438 PARAMETER Experiment Name: At_Shoots__P Parameter: Age (day) Value: 14
  misc_feature: MA Experiment 20000438 PARAMETER Experiment Name: At_Shoots__P Parameter: Tissue Value: Shoots vs. Whole Plant
  misc_feature: MA Experiment ID: 20000460 Result: Down-regulated in Transcription
  misc_feature: MA Experiment 20000460 PARAMETER Experiment Name: At_10percent_PEG_P Parameter: Age (day) Value: 12
  misc_feature: MA Experiment 20000460 PARAMETER Experiment Name: At_10percent_PEG_P Parameter: Organism Value: A. thaliana
  misc_feature: MA Experiment 20000460 PARAMETER Experiment Name: At_10percent_PEG_P Parameter: Plant Line Value: WS
  misc_feature: MA Experiment 20000460 PARAMETER Experiment Name: At_10percent_PEG_P Parameter: Timepoint (day) Value: 12
  misc_feature: MA Experiment 20000460 PARAMETER Experiment Name: At_10percent_PEG_P Parameter: Tissue Value: Whole Plant
  misc_feature: MA Experiment 20000460 PARAMETER Experiment Name: At_10percent_PEG_P Parameter: Treatment Value: 10percent PEG vs. No Treatment
  misc_feature: MA Experiment ID: 20000527 Result: Down-regulated in Transcription
  misc_feature: MA Experiment 20000527 PARAMETER Experiment Name: At_10percent_PEG_P Parameter: Age (day) Value: 20
  misc_feature: MA Experiment 20000527 PARAMETER Experiment Name: At_10percent_PEG_P Parameter: Organism Value: A. thaliana
  misc_feature: MA Experiment 20000527 PARAMETER Experiment Name: At_10percent_PEG_P Parameter: Plant Line Value: WS
  misc_feature: MA Experiment 20000527 PARAMETER Experiment Name: At_10percent_PEG_P Parameter: Timepoint (day) Value: 20
  misc_feature: MA Experiment 20000527 PARAMETER Experiment Name: At_10percent_PEG_P Parameter: Tissue Value: Whole Plant
  misc_feature: MA Experiment 20000527 PARAMETER Experiment Name: At_10percent_PEG_P Parameter: Treatment Value: 10percent PEG vs. No Treatment
  misc_feature: MA Experiment ID: 20000573 Result: Down-regulated in Transcription
  misc_feature: MA Experiment 20000573 PARAMETER Experiment Name: At_100uM_ABA_Mutants__P Parameter: Organism Value: A. thaliana
  misc_feature: MA Experiment 20000573 PARAMETER Experiment Name: At_100uM_ABA_Mutants__P Parameter: Plant Line Value: CS22 vs. Ler wt
  misc_feature: MA Experiment 20000573 PARAMETER Experiment Name: At_100uM_ABA_Mutants__P Parameter: Timepoint (hr) Value: N/A
  misc_feature: MA Experiment 20000573 PARAMETER Experiment Name: At_100uM_ABA_Mutants__P Parameter: Tissue Value: Whole Plant
  misc_feature: MA Experiment 20000573 PARAMETER Experiment Name: At_100uM_ABA_Mutants__P Parameter: Treatment Value: None
  misc_feature: MA Experiment ID: 20000574 Result: Down-regulated in Transcription
  misc_feature: MA Experiment 20000574 PARAMETER Experiment Name: At_100uM_ABA_Mutants__P Parameter: Organism Value: A. thaliana
  misc_feature: MA Experiment 20000574 PARAMETER Experiment Name: At_100uM_ABA_Mutants__P Parameter: Plant Line Value: CS23 vs. Ler wt
  misc_feature: MA Experiment 20000574 PARAMETER Experiment Name: At_100uM_ABA_Mutants__P Parameter: Timepoint (hr) Value: N/A
  misc_feature: MA Experiment 20000574 PARAMETER Experiment Name: At_100uM_ABA_Mutants__P Parameter: Tissue Value: Whole Plant
  misc_feature: MA Experiment 20000574 PARAMETER Experiment Name: At_100uM_ABA_Mutants__P Parameter: Treatment Value: None
  misc_feature: MA Experiment ID: 20000709 Result: Down-regulated in Transcription
  misc_feature: MA Experiment 20000709 PARAMETER Experiment Name: At_15mM_NH4NO3_L-to-H_P Parameter: Age (hr) Value: 14
  misc_feature: MA Experiment 20000709 PARAMETER Experiment Name: At_15mM_NH4NO3_L-to-H_P Parameter: Organism Value: A. thaliana
  misc_feature: MA Experiment 20000709 PARAMETER Experiment Name: At_15mM_NH4NO3_L-to-H_P Parameter: Plant Line Value: WS
  misc_feature: MA Experiment 20000709 PARAMETER Experiment Name: At_15mM_NH4NO3_L-to-H_P Parameter: Timepoint (hr) Value: 4
  misc_feature: MA Experiment 20000709 PARAMETER Experiment Name: At_15mM_NH4NO3_L-to-H_P Parameter: Tissue Value: Aerial
  misc_feature: MA Experiment 20000709 PARAMETER Experiment Name: At_15mM_NH4NO3_L-to-H_P Parameter: Treatment Value: 15mM NH4NO3 vs. 30mM Mannitol
  misc_feature: MA Experiment ID: 20000794 Result: Up-regulated in Transcription
  misc_feature: MA Experiment 20000794 PARAMETER Experiment Name: At_Petals_P Parameter: Age (day) Value: 23-25 days
  misc_feature: MA Experiment 20000794 PARAMETER Experiment Name: At_Petals_P Parameter: Plant Line Value: WS
  misc_feature: MA Experiment 20000794 PARAMETER Experiment Name: At_Petals_P Parameter: Tissue Value: Petals vs. Whole plant
  misc_feature: MA Experiment ID: 20001560 Result: Down-regulated in Transcription
  misc_feature: MA Experiment 20001560 PARAMETER Experiment Name: At_Drought_Soil_Dry_P Parameter: Age (day) Value: 28
  misc_feature: MA Experiment 20001560 PARAMETER Experiment Name: At_Drought_Soil_Dry_P Parameter: Organism Value: A. thaliana
  misc_feature: MA Experiment 20001560 PARAMETER Experiment Name: At_Drought_Soil_Dry_P Parameter: Plant Line Value: WS
  misc_feature: MA Experiment 20001560 PARAMETER Experiment Name: At_Drought_Soil_Dry_P Parameter: Post Timepoint (hr) Value: None
  misc_feature: MA Experiment 20001560 PARAMETER Experiment Name: At_Drought_Soil_Dry_P Parameter: Post-Treatment Value: None
  misc_feature: MA Experiment 20001560 PARAMETER Experiment Name: At_Drought_Soil_Dry_P Parameter: Timepoint (day) Value: 14
  misc_feature: MA Experiment 20001560 PARAMETER Experiment Name: At_Drought_Soil_Dry_P Parameter: Treatment Value: Drought vs. No Drought

SEQ ID NO: 92104 - protein, 180 aa, Arabidopsis thaliana; identical to SEQ ID NO: 27583
  peptide (1)..(180): Ceres Seq. ID no. 12707820
  misc_feature (82)..(140): Pfam Name: Protein of unknown function (DUF581) Pfam Description: Protein of unknown function (DUF581)
  misc_feature (22)..(180): Homolog of NCBI NO: 18414940 NR Description: expressed protein; protein id: At4g17670.1, by cDNA: 6709. [Arabidopsis thaliana] >gi|17381090|gb|AAL36357.1| protein [Arabidopsis thaliana] >gi|21436245|gb|AAM51261.1|
  misc_feature (22)..(180): Homolog of NCBI NO: 21594214 NR Description: unknown [Arabidopsis thaliana]
  misc_feature (22)..(180): Homolog of NCBI NO: 7485163 NR Description: hypothetical protein - Arabidopsis thaliana hypothetical protein [Arabidopsis thaliana]
  misc_feature (37)..(180): Homolog of NCBI NO: 15238001 NR Description: putative protein; protein id: At5g47060.1
  misc_feature (88)..(180): Homolog of NCBI NO: 18406598 NR Description: expressed protein; protein id: At2g44670.1
  misc_feature (92)..(179): Homolog of NCBI NO: 38344280 NR Description: OSJNBa0013K16.12 [Oryza sativa (japonica
  misc_feature (93)..(160): Homolog of NCBI NO: 38344283 NR Description: OSJNBa0013K16.15 [Oryza sativa (japonica
  misc_feature (96)..(159): Homolog of NCBI NO: 38344282 NR Description: OSJNBa0013K16.14 [Oryza sativa (japonica
  misc_feature (91)..(164): Homolog of NCBI NO: 34898006 NR Description: ESTs C26056(C11550),AU082131(C11550) correspond a region of the predicted gene.~Similar to Arabidopsis thaliana chromosome 4, ESSA I FCA contig fragment No. 8; hypothetical
  misc_feature (83)..(164): Homolog of NCBI NO: 38344285 NR Description: OSJNBa0013K16.17 [Oryza sativa (japonica

SEQ ID NO: 92105 - protein, 159 aa, Arabidopsis thaliana; identical to SEQ ID NO: 27584
  peptide (1)..(159): Ceres Seq. ID no. 12707821
  misc_feature (61)..(119): Pfam Name: Protein of unknown function (DUF581) Pfam Description: Protein of unknown function (DUF581)
  misc_feature (1)..(159): Homolog of NCBI NO: 18414940 NR Description: expressed protein; protein id: At4g17670.1, by cDNA: 6709. [Arabidopsis thaliana] >gi|17381090|gb|AAL36357.1| protein [Arabidopsis thaliana] >gi|21436245|gb|AAM51261.1|
  misc_feature (1)..(159): Homolog of NCBI NO: 21594214 NR Description: unknown [Arabidopsis thaliana]
  misc_feature (1)..(159): Homolog of NCBI NO: 7485163 NR Description: hypothetical protein - Arabidopsis thaliana hypothetical protein [Arabidopsis thaliana]
  misc_feature (16)..(159): Homolog of NCBI NO: 15238001 NR Description: putative protein; protein id: At5g47060.1
  misc_feature (67)..(159): Homolog of NCBI NO: 18406598 NR Description: expressed protein; protein id: At2g44670.1
  misc_feature (71)..(158): Homolog of NCBI NO: 38344280 NR Description: OSJNBa0013K16.12 [Oryza sativa (japonica
  misc_feature (72)..(139): Homolog of NCBI NO: 38344283 NR Description: OSJNBa0013K16.15 [Oryza sativa (japonica
  misc_feature (75)..(138): Homolog of NCBI NO: 38344282 NR Description: OSJNBa0013K16.14 [Oryza sativa (japonica
  misc_feature (70)..(143): Homolog of NCBI NO: 34898006 NR Description: ESTs C26056(C11550),AU082131(C11550) correspond a region of the predicted gene.~Similar to Arabidopsis thaliana chromosome 4, ESSA I FCA contig fragment No. 8; hypothetical
  misc_feature (62)..(143): Homolog of NCBI NO: 38344285 NR Description: OSJNBa0013K16.17 [Oryza sativa (japonica

SEQ ID NO: 92106 - protein, 155 aa, Arabidopsis thaliana; identical to SEQ ID NO: 27585
  peptide (1)..(155): Ceres Seq. ID no. 12707822
  misc_feature (57)..(115): Pfam Name: Protein of unknown function (DUF581) Pfam Description: Protein of unknown function (DUF581)
  misc_feature (1)..(155): Homolog of NCBI NO: 18414940 NR Description: expressed protein; protein id: At4g17670.1, by cDNA: 6709. [Arabidopsis thaliana] >gi|17381090|gb|AAL36357.1| protein [Arabidopsis thaliana] >gi|21436245|gb|AAM51261.1|
  misc_feature (1)..(155): Homolog of NCBI NO: 21594214 NR Description: unknown [Arabidopsis thaliana]
  misc_feature (1)..(155): Homolog of NCBI NO: 7485163 NR Description: hypothetical protein - Arabidopsis thaliana hypothetical protein [Arabidopsis thaliana]
  misc_feature (12)..(155): Homolog of NCBI NO: 15238001 NR Description: putative protein; protein id: At5g47060.1
  misc_feature (63)..(155): Homolog of NCBI NO: 18406598 NR Description: expressed protein; protein id: At2g44670.1
  misc_feature (67)..(154): Homolog of NCBI NO: 38344280 NR Description: OSJNBa0013K16.12 [Oryza sativa (japonica
  misc_feature (68)..(135): Homolog of NCBI NO: 38344283 NR Description: OSJNBa0013K16.15 [Oryza sativa (japonica
  misc_feature (71)..(134): Homolog of NCBI NO: 38344282 NR Description: OSJNBa0013K16.14 [Oryza sativa (japonica
  misc_feature (66)..(139): Homolog of NCBI NO: 34898006 NR Description: ESTs C26056(C11550),AU082131(C11550) correspond a region of the predicted gene.~Similar to Arabidopsis thaliana chromosome 4, ESSA I FCA contig fragment No. 8; hypothetical
  misc_feature (58)..(139): Homolog of NCBI NO: 38344285 NR Description: OSJNBa0013K16.17 [Oryza sativa (japonica

SEQ ID NO: 92107 - DNA, 789 bp, Arabidopsis thaliana; identical to SEQ ID NO: 88351
  misc_feature (1)..(789): Ceres Seq. ID no. 12707834
  misc_feature: MA Experiment ID: 20000437 Result: Down-regulated in Transcription
  misc_feature: MA Experiment 20000437 PARAMETER Experiment Name: At_Drought_P Parameter: Age (day) Value: 8
  misc_feature: MA Experiment 20000437 PARAMETER Experiment Name: At_Drought_P Parameter: Organism Value: A. thaliana
  misc_feature: MA Experiment 20000437 PARAMETER Experiment Name: At_Drought_P Parameter: Plant Line Value: WS
  misc_feature: MA Experiment 20000437 PARAMETER Experiment Name: At_Drought_P Parameter: Timepoint (hr) Value: 24
  misc_feature: MA Experiment 20000437 PARAMETER Experiment Name: At_Drought_P Parameter: Tissue Value: Whole Plant
  misc_feature: MA Experiment 20000437 PARAMETER Experiment Name: At_Drought_P Parameter: Treatment Value: Drought vs. No Drought
  misc_feature: MA Experiment ID: 20000439 Result: Up-regulated in Transcription
  misc_feature: MA Experiment 20000439 PARAMETER Experiment Name: At_Roots__P Parameter: Age (day) Value: 14 vs. 21
  misc_feature: MA Experiment 20000439 PARAMETER Experiment Name: At_Roots__P Parameter: Organism Value: A. thaliana
  misc_feature: MA Experiment 20000439 PARAMETER Experiment Name: At_Roots__P Parameter: Tissue Value: Roots vs. Whole Plant

SEQ ID NO: 92108 - protein, 262 aa, Arabidopsis thaliana; identical to SEQ ID NO: 88352
  peptide (1)..(262): Ceres Seq. ID no. 12707835
  misc_feature (75)..(197): Pfam Name: Repair protein Rad1/Rec1/Rad17 Pfam Description: Repair protein Rad1/Rec1/Rad17
  misc_feature (6)..(262): Homolog of NCBI NO: 30684177 NR Description: expressed protein [Arabidopsis thaliana]
  misc_feature (15)..(262): Homolog of NCBI NO: 7452416 NR Description: hypothetical protein dl4915w - Arabidopsis >gi|2245135|emb|CAB10556.1| hypothetical protein [Arabidopsis >gi|7268529|emb|CAB78779.1| hypothetical protein [Arabidopsis
  misc_feature (6)..(259): Homolog of NCBI NO: 11875164 NR Description: hypothetical protein [Oryza sativa (japonica

SEQ ID NO: 92109 - protein, 185 aa, Arabidopsis thaliana; identical to SEQ ID NO: 83088
  peptide (1)..(185): Ceres Seq. ID no. 12707836
  misc_feature (1)..(120): Pfam Name: Repair protein Rad1/Rec1/Rad17 Pfam Description: Repair protein Rad1/Rec1/Rad17
  misc_feature (1)..(185): Homolog of NCBI NO: 30684177 NR Description: expressed protein [Arabidopsis thaliana]
  misc_feature (1)..(185): Homolog of NCBI NO: 7452416 NR Description: hypothetical protein dl4915w - Arabidopsis >gi|2245135|emb|CAB10556.1| hypothetical protein [Arabidopsis >gi|7268529|emb|CAB78779.1| hypothetical protein [Arabidopsis
  misc_feature (1)..(182): Homolog of NCBI NO: 11875164 NR Description: hypothetical protein [Oryza sativa (japonica

SEQ ID NO: 92110 - DNA, 1155 bp, Arabidopsis thaliana; identical to SEQ ID NO: 88354
  misc_feature (1)..(1155): Ceres Seq. ID no. 12707906
  misc_feature: MA Experiment ID: 20000306 Result: Down-regulated in Transcription
  misc_feature: MA Experiment 20000306 PARAMETER Experiment Name: At_Germinating_Seeds_Sub_P Parameter: Age (hr) Value: 6 vs. 0
  misc_feature: MA Experiment 20000306 PARAMETER Experiment Name: At_Germinating_Seeds_Sub_P Parameter: Organism Value: A. thaliana
  misc_feature: MA Experiment 20000306 PARAMETER Experiment Name: At_Germinating_Seeds_Sub_P Parameter: Plant Line Value: WS
  misc_feature: MA Experiment 20000306 PARAMETER Experiment Name: At_Germinating_Seeds_Sub_P Parameter: Tissue Value: Germinating Seeds
  misc_feature: MA Experiment ID: 20000307 Result: Down-regulated in Transcription
  misc_feature: MA Experiment 20000307 PARAMETER Experiment Name: At_Germinating_Seeds_Sub_P Parameter: Age (hr) Value: 24 vs. 0
  misc_feature: MA Experiment 20000307 PARAMETER Experiment Name: At_Germinating_Seeds_Sub_P Parameter: Organism Value: A. thaliana
  misc_feature: MA Experiment 20000307 PARAMETER Experiment Name: At_Germinating_Seeds_Sub_P Parameter: Plant Line Value: WS
  misc_feature: MA Experiment 20000307 PARAMETER Experiment Name: At_Germinating_Seeds_Sub_P Parameter: Tissue Value: Germinating Seeds
  misc_feature: MA Experiment ID: 20000314 Result: Down-regulated in Transcription
  misc_feature: MA Experiment 20000314 PARAMETER Experiment Name: At_14day_Shoots-Roots_Sub_P Parameter: Age (day) Value: 14
  misc_feature: MA Experiment 20000314 PARAMETER Experiment Name: At_14day_Shoots-Roots_Sub_P Parameter: Organism Value: A. thaliana
  misc_feature: MA Experiment 20000314 PARAMETER Experiment Name: At_14day_Shoots-Roots_Sub_P Parameter: Plant Line Value: WS
  misc_feature: MA Experiment 20000314 PARAMETER Experiment Name: At_14day_Shoots-Roots_Sub_P Parameter: Tissue Value: Roots vs. Whole Plant
  misc_feature: MA Experiment ID: 20000315 Result: Down-regulated in Transcription
  misc_feature: MA Experiment 20000315 PARAMETER Experiment Name: At_14day_Shoots-Roots_Sub_P Parameter: Age (day) Value: 14
  misc_feature: MA Experiment 20000315 PARAMETER Experiment Name: At_14day_Shoots-Roots_Sub_P Parameter: Organism Value: A. thaliana
  misc_feature: MA Experiment 20000315 PARAMETER Experiment Name: At_14day_Shoots-Roots_Sub_P Parameter: Plant Line Value: WS
  misc_feature: MA Experiment 20000315 PARAMETER Experiment Name: At_14day_Shoots-Roots_Sub_P Parameter: Tissue Value: Shoots vs. Whole Plant
  misc_feature: MA Experiment ID: 20000347 Result: Down-regulated in Transcription
  misc_feature: MA Experiment 20000347 PARAMETER Experiment Name: At_2mM_SA_Sub_P Parameter: Age (day) Value: 14
  misc_feature: MA Experiment 20000347 PARAMETER Experiment Name: At_2mM_SA_Sub_P Parameter: Organism Value: A. thaliana
  misc_feature: MA Experiment 20000347 PARAMETER Experiment Name: At_2mM_SA_Sub_P Parameter: Plant Line Value: WS
  misc_feature: MA Experiment 20000347 PARAMETER Experiment Name: At_2mM_SA_Sub_P Parameter: Timepoint (hr) Value: 6
  misc_feature: MA Experiment 20000347 PARAMETER Experiment Name: At_2mM_SA_Sub_P Parameter: Tissue Value: Aerial
  misc_feature: MA Experiment 20000347 PARAMETER Experiment Name: At_2mM_SA_Sub_P Parameter: Treatment Value: 2mM SA vs. No Treatment
  misc_feature: MA Experiment ID: 20000348 Result: Down-regulated in Transcription
  misc_feature: MA Experiment 20000348 PARAMETER Experiment Name: At_100uM_ABA_Sub_P Parameter: Age (day) Value: 14
  misc_feature: MA Experiment 20000348 PARAMETER Experiment Name: At_100uM_ABA_Sub_P Parameter: Organism Value: A. thaliana
  misc_feature: MA Experiment 20000348 PARAMETER Experiment Name: At_100uM_ABA_Sub_P Parameter: Plant Line Value: WS
  misc_feature: MA Experiment 20000348 PARAMETER Experiment Name: At_100uM_ABA_Sub_P Parameter: Timepoint (hr) Value: 1
  misc_feature: MA Experiment 20000348 PARAMETER Experiment Name: At_100uM_ABA_Sub_P Parameter: Tissue Value: Aerial
  misc_feature: MA Experiment 20000348 PARAMETER Experiment Name: At_100uM_ABA_Sub_P Parameter: Treatment Value: 100uM ABA vs. No Treatment
  misc_feature: MA Experiment ID: 20000355 Result: Down-regulated in Transcription
  misc_feature: MA Experiment 20000355 PARAMETER Experiment Name: At_Siliques_Sub_P Parameter: Age (day) Value: 21
  misc_feature: MA Experiment 20000355 PARAMETER Experiment Name: At_Siliques_Sub_P Parameter: Organism Value: A. thaliana
  misc_feature: MA Experiment 20000355 PARAMETER Experiment Name: At_Siliques_Sub_P Parameter: Plant Line Value: WS
  misc_feature: MA Experiment 20000355 PARAMETER Experiment Name: At_Siliques_Sub_P Parameter: Tissue Value: Less Than 5mm Siliques vs. Whole Plant
  misc_feature: MA Experiment ID: 20000440 Result: Down-regulated in Transcription
  misc_feature: MA Experiment 20000440 PARAMETER Experiment Name: At_Closed-Flower__Sub_P Parameter: Tissue Value: Closed Flower vs. Whole Plant

SEQ ID NO: 92111 - protein, 384 aa, Arabidopsis thaliana; identical to SEQ ID NO: 88355
  peptide (1)..(384): Ceres Seq. ID no. 12707907
  misc_feature (183)..(365): Pfam Name: Domain of unknown function, DUF250 Pfam Description: Domain of unknown function, DUF250
  misc_feature (9)..(383): Homolog of NCBI NO: 15236796 NR Description: putative protein; protein id: At4g18200.1
  misc_feature (1)..(366): Homolog of NCBI NO: 18491221 NR Description: unknown protein [Arabidopsis thaliana]
  misc_feature (20)..(366): Homolog of NCBI NO: 15236796 NR Description: putative protein; protein id: At4g18200.1
  misc_feature (122)..(383): Homolog of NCBI NO: 15236796 NR Description: putative protein; protein id: At4g18200.1
  misc_feature (20)..(150): Homolog of NCBI NO: 15236796 NR Description: putative protein; protein id: At4g18200.1
  misc_feature (12)..(369): Homolog of NCBI NO: 30684325 NR Description: purine permease family [Arabidopsis thaliana]
  misc_feature (49)..(377): Homolog of NCBI NO: 15236799 NR Description: putative protein; protein id: At4g18220.1
  misc_feature (58)..(369): Homolog of NCBI NO: 7487849 NR Description: hypothetical protein T9A21.60 - Arabidopsis >gi|2832695|emb|CAA16793.1| putative protein [Arabidopsis >gi|7268614|emb|CAB78823.1| putative protein [Arabidopsis
  misc_feature (19)..(365): Homolog of NCBI NO: 15236794 NR Description: putative protein; protein id: At4g18190.1
  misc_feature (27)..(359): Homolog of NCBI NO: 38605752 NR Description: OSJNBb0016D16.5 [Oryza sativa (japonica

SEQ ID NO: 92112 - protein, 370 aa, Arabidopsis thaliana; identical to SEQ ID NO: 88356
  peptide (1)..(370): Ceres Seq. ID no. 12707908
  misc_feature (169)..(351): Pfam Name: Domain of unknown function, DUF250 Pfam Description: Domain of unknown function, DUF250
  misc_feature (1)..(369): Homolog of NCBI NO: 15236796 NR Description: putative protein; protein id: At4g18200.1
  misc_feature (1)..(352): Homolog of NCBI NO: 18491221 NR Description: unknown protein [Arabidopsis thaliana]
  misc_feature (6)..(352): Homolog of NCBI NO: 15236796 NR Description: putative protein; protein id: At4g18200.1
  misc_feature (108)..(369): Homolog of NCBI NO: 15236796 NR Description: putative protein; protein id: At4g18200.1
  misc_feature (6)..(136): Homolog of NCBI NO: 15236796 NR Description: putative protein; protein id: At4g18200.1
  misc_feature (1)..(355): Homolog of NCBI NO: 30684325 NR Description: purine permease family [Arabidopsis thaliana]
  misc_feature (35)..(363): Homolog of NCBI NO: 15236799 NR Description: putative protein; protein id: At4g18220.1
  misc_feature (44)..(355): Homolog of NCBI NO: 7487849 NR Description: hypothetical protein T9A21.60 - Arabidopsis >gi|2832695|emb|CAA16793.1| putative protein [Arabidopsis >gi|7268614|emb|CAB78823.1| putative protein [Arabidopsis
  misc_feature (5)..(351): Homolog of NCBI NO: 15236794 NR Description: putative protein; protein id: At4g18190.1
  misc_feature (13)..(345): Homolog of NCBI NO: 38605752 NR Description: OSJNBb0016D16.5 [Oryza sativa (japonica

SEQ ID NO: 92113 - protein, 366 aa, Arabidopsis thaliana; identical to SEQ ID NO: 88357
  peptide (1)..(366): Ceres Seq. ID no. 12707909
  misc_feature (165)..(347): Pfam Name: Domain of unknown function, DUF250 Pfam Description: Domain of unknown function, DUF250
  misc_feature (1)..(365): Homolog of NCBI NO: 15236796 NR Description: putative protein; protein id: At4g18200.1
  misc_feature (1)..(348): Homolog of NCBI NO: 18491221 NR Description: unknown protein [Arabidopsis thaliana]
  misc_feature (2)..(348): Homolog of NCBI NO: 15236796 NR Description: putative protein; protein id: At4g18200.1
  misc_feature (104)..(365): Homolog of NCBI NO: 15236796 NR Description: putative protein; protein id: At4g18200.1
  misc_feature (2)..(132): Homolog of NCBI NO: 15236796 NR Description: putative protein; protein id: At4g18200.1
  misc_feature (1)..(351): Homolog of NCBI NO: 30684325 NR Description: purine permease family [Arabidopsis thaliana]
  misc_feature (31)..(359): Homolog of NCBI NO: 15236799 NR Description: putative protein; protein id: At4g18220.1
  misc_feature (40)..(351): Homolog of NCBI NO: 7487849 NR Description: hypothetical protein T9A21.60 - Arabidopsis >gi|2832695|emb|CAA16793.1| putative protein [Arabidopsis >gi|7268614|emb|CAB78823.1| putative protein [Arabidopsis
  misc_feature (1)..(347): Homolog of NCBI NO: 15236794 NR Description: putative protein; protein id: At4g18190.1
  misc_feature (9)..(341): Homolog of NCBI NO: 38605752 NR Description: OSJNBb0016D16.5 [Oryza sativa (japonica

SEQ ID NO: 92114 - DNA, 1938 bp, Arabidopsis thaliana; identical to SEQ ID NO: 88358
  misc_feature (1)..(1938): Ceres Seq. ID no. 12707910
  misc_feature: MA Experiment ID: 20000185 Result: Down-regulated in Transcription
  misc_feature: MA Experiment 20000185 PARAMETER Experiment Name: At_Roots__P Parameter: Age (day) Value: 7 vs. 21
  misc_feature: MA Experiment 20000185 PARAMETER Experiment Name: At_Roots__P Parameter: Organism Value: A. thaliana
  misc_feature: MA Experiment 20000185 PARAMETER Experiment Name: At_Roots__P Parameter: Tissue Value: Roots vs. Whole Plant
  misc_feature: MA Experiment ID: 20000527 Result: Down-regulated in Transcription
  misc_feature: MA Experiment 20000527 PARAMETER Experiment Name: At_10percent_PEG_P Parameter: Age (day) Value: 20
  misc_feature: MA Experiment 20000527 PARAMETER Experiment Name: At_10percent_PEG_P Parameter: Organism Value: A. thaliana
  misc_feature: MA Experiment 20000527 PARAMETER Experiment Name: At_10percent_PEG_P Parameter: Plant Line Value: WS
  misc_feature: MA Experiment 20000527 PARAMETER Experiment Name: At_10percent_PEG_P Parameter: Timepoint (day) Value: 20
  misc_feature: MA Experiment 20000527 PARAMETER Experiment Name: At_10percent_PEG_P Parameter: Tissue Value: Whole Plant
  misc_feature: MA Experiment 20000527 PARAMETER Experiment Name: At_10percent_PEG_P Parameter: Treatment Value: 10percent PEG vs. No Treatment
  misc_feature: MA Experiment ID: 20000573 Result: Up-regulated in Transcription
  misc_feature: MA Experiment 20000573 PARAMETER Experiment Name: At_100uM_ABA_Mutants__P Parameter: Organism Value: A. thaliana
  misc_feature: MA Experiment 20000573 PARAMETER Experiment Name: At_100uM_ABA_Mutants__P Parameter: Plant Line Value: CS22 vs. Ler wt
  misc_feature: MA Experiment 20000573 PARAMETER Experiment Name: At_100uM_ABA_Mutants__P Parameter: Timepoint (hr) Value: N/A
  misc_feature: MA Experiment 20000573 PARAMETER Experiment Name: At_100uM_ABA_Mutants__P Parameter: Tissue Value: Whole Plant
  misc_feature: MA Experiment 20000573 PARAMETER Experiment Name: At_100uM_ABA_Mutants__P Parameter: Treatment Value: None
  misc_feature: MA Experiment ID: 20000709 Result: Down-regulated in Transcription
  misc_feature: MA Experiment 20000709 PARAMETER Experiment Name: At_15mM_NH4NO3_L-to-H_P Parameter: Age (hr) Value: 14
  misc_feature: MA Experiment 20000709 PARAMETER Experiment Name: At_15mM_NH4NO3_L-to-H_P Parameter: Organism Value: A. thaliana
  misc_feature: MA Experiment 20000709 PARAMETER Experiment Name: At_15mM_NH4NO3_L-to-H_P Parameter: Plant Line Value: WS
  misc_feature: MA Experiment 20000709 PARAMETER Experiment Name: At_15mM_NH4NO3_L-to-H_P Parameter: Timepoint (hr) Value: 4
  misc_feature: MA Experiment 20000709 PARAMETER Experiment Name: At_15mM_NH4NO3_L-to-H_P Parameter: Tissue Value: Aerial
  misc_feature: MA Experiment 20000709 PARAMETER Experiment Name: At_15mM_NH4NO3_L-to-H_P Parameter: Treatment Value: 15mM NH4NO3 vs. 30mM Mannitol

SEQ ID NO: 92115 - protein, 645 aa, Arabidopsis thaliana; identical to SEQ ID NO: 88359
  peptide (1)..(645): Ceres Seq. ID no. 12707911
  misc_feature (30)..(237): Pfam Name: Thaumatin family Pfam Description: Thaumatin family
  misc_feature (172)..(645): Homolog of NCBI NO: 7488208 NR Description: probable serine/threonine-specific protein kinase
  misc_feature (14)..(622): Homolog of NCBI NO: 15223105 NR Description: receptor serine/threonine kinase PR5, putative; id: At1g70250.1 [Arabidopsis thaliana] >gi|25406045|pir||E96725
  misc_feature (49)..(634): Homolog of NCBI NO: 15240873 NR Description: receptor serine/threonine kinase PR5K; protein At5g38280.1, supported by cDNA: gi_1235679 [Arabidopsis thaliana]
  misc_feature (49)..(634): Homolog of NCBI NO: 1235680 NR Description: receptor serine/threonine kinase PR5K
  misc_feature (217)..(604): Homolog of NCBI NO: 15219803 NR Description: kinase, putative; protein id: At1g66980.1
  misc_feature (217)..(604): Homolog of NCBI NO: 25404657 NR Description: hypothetical protein F1O19.6 [imported] - thaliana >gi|9755449|gb|AAF98210.1|AC007152_6 Unknown protein
  misc_feature (259)..(631): Homolog of NCBI NO: 15219806 NR Description: receptor-like kinase, putative; protein id:
  misc_feature (222)..(622): Homolog of NCBI NO: 15219783 NR Description: receptor serine/threonine kinase PR5K, putative; id: At1g66920.1 [Arabidopsis thaliana] >gi|25404651|pir||A96693
  misc_feature (259)..(629): Homolog of NCBI NO: 9755446 NR Description: Putative protein kinase [Arabidopsis thaliana]
  misc_feature (259)..(629): Homolog of NCBI NO: 15219785 NR Description: receptor-like kinase, putative; protein id:

SEQ ID NO: 92116 - protein, 495 aa, Arabidopsis thaliana; identical to SEQ ID NO: 88360
  peptide (1)..(495): Ceres Seq. ID no. 12707912
  misc_feature (1)..(87): Pfam Name: Thaumatin family Pfam Description: Thaumatin family
  misc_feature (22)..(495): Homolog of NCBI NO: 7488208 NR Description: probable serine/threonine-specific protein kinase
  misc_feature (1)..(472): Homolog of NCBI NO: 15223105 NR Description: receptor serine/threonine kinase PR5, putative; id: At1g70250.1 [Arabidopsis thaliana] >gi|25406045|pir||E96725
  misc_feature (1)..(484): Homolog of NCBI NO: 15240873 NR Description: receptor serine/threonine kinase PR5K; protein At5g38280.1, supported by cDNA: gi_1235679 [Arabidopsis thaliana]
  misc_feature (1)..(484): Homolog of NCBI NO: 1235680 NR Description: receptor serine/threonine kinase PR5K
  misc_feature (67)..(454): Homolog of NCBI NO: 15219803 NR Description: kinase, putative; protein id: At1g66980.1
  misc_feature (67)..(454): Homolog of NCBI NO: 25404657 NR Description: hypothetical protein F1O19.6 [imported] - thaliana >gi|9755449|gb|AAF98210.1|AC007152_6 Unknown protein
  misc_feature (109)..(481): Homolog of NCBI NO: 15219806 NR Description: receptor-like kinase, putative; protein id:
  misc_feature (72)..(472): Homolog of NCBI NO: 15219783 NR Description: receptor serine/threonine kinase PR5K, putative; id: At1g66920.1 [Arabidopsis thaliana] >gi|25404651|pir||A96693
  misc_feature (109)..(479): Homolog of NCBI NO: 9755446 NR Description: Putative protein kinase [Arabidopsis thaliana]
  misc_feature (109)..(479): Homolog of NCBI NO: 25404653 NR Description: probable receptor serine/threonine kinase PR5K

SEQ ID NO: 92117 - protein, 396 aa, Arabidopsis thaliana; identical to SEQ ID NO: 88361
  peptide (1)..(396): Ceres Seq. ID no. 12707913
  misc_feature (1)..(396): Homolog of NCBI NO: 7488208 NR Description: probable serine/threonine-specific protein kinase
  misc_feature (1)..(373): Homolog of NCBI NO: 15223105 NR Description: receptor serine/threonine kinase PR5, putative; id: At1g70250.1 [Arabidopsis thaliana] >gi|25406045|pir||E96725
  misc_feature (1)..(385): Homolog of NCBI NO: 15240873 NR Description: receptor serine/threonine kinase PR5K; protein At5g38280.1, supported by cDNA: gi_1235679 [Arabidopsis thaliana]
  misc_feature (1)..(385): Homolog of NCBI NO: 1235680 NR Description: receptor serine/threonine kinase PR5K
  misc_feature (1)..(355): Homolog of NCBI NO: 15219803 NR Description: kinase, putative; protein id: At1g66980.1
  misc_feature (1)..(355): Homolog of NCBI NO: 25404657 NR Description: hypothetical protein F1O19.6 [imported] - thaliana >gi|9755449|gb|AAF98210.1|AC007152_6 Unknown protein
  misc_feature (10)..(382): Homolog of NCBI NO: 15219806 NR Description: receptor-like kinase, putative; protein id:
  misc_feature (1)..(373): Homolog of NCBI NO: 15219783 NR Description: receptor serine/threonine kinase PR5K, putative; id: At1g66920.1 [Arabidopsis thaliana] >gi|25404651|pir||A96693
  misc_feature (10)..(380): Homolog of NCBI NO: 9755446 NR Description: Putative protein kinase [Arabidopsis thaliana]
  misc_feature (10)..(380): Homolog of NCBI NO: 15219785 NR Description: receptor-like kinase, putative; protein id:

SEQ ID NO: 92118 - DNA, 774 bp, Arabidopsis thaliana; identical to SEQ ID NO: 88362
  misc_feature (1)..(774): Ceres Seq. ID no. 12707914
  misc_feature: MA Experiment ID: 20000184 Result: Down-regulated in Transcription
  misc_feature: MA Experiment 20000184 PARAMETER Experiment Name: At_Shoots__P Parameter: Age (day) Value: 7
  misc_feature: MA Experiment 20000184 PARAMETER Experiment Name: At_Shoots__P Parameter: Tissue Value: Shoots vs. Whole Plant

SEQ ID NO: 92119 - protein, 257 aa, Arabidopsis thaliana; identical to SEQ ID NO: 42493
  peptide (1)..(257): Ceres Seq. ID no. 12707915
  misc_feature (1)..(257): Homolog of NCBI NO: 15236824 NR Description: unknown protein; protein id: At4g18260.1
  misc_feature (1)..(257): Homolog of NCBI NO: 26452652 NR Description: unknown protein [Arabidopsis thaliana]
  misc_feature (7)..(153): Homolog of NCBI NO: 34910918 NR Description: OSJNBb0063G05.4 [Oryza sativa (japonica
  misc_feature (145)..(249): Homolog of NCBI NO: 34910918 NR Description: OSJNBb0063G05.4 [Oryza sativa (japonica
  misc_feature (25)..(256): Homolog of NCBI NO: 26333485 NR Description: unnamed protein product [Mus musculus]
  misc_feature (25)..(256): Homolog of NCBI NO: 29835270 NR Description: RIKEN cDNA C130022K22 gene [Mus musculus]
  misc_feature (25)..(256): Homolog of NCBI NO: 34857683 NR Description: similar to RIKEN cDNA C130022K22 gene [Rattus

SEQ ID NO: 92120 - protein, 233 aa, Arabidopsis thaliana; identical to SEQ ID NO: 42494
  peptide (1)..(233): Ceres Seq. ID no. 12707916
  misc_feature (1)..(233): Homolog of NCBI NO: 15236824 NR Description: unknown protein; protein id: At4g18260.1
  misc_feature (1)..(233): Homolog of NCBI NO: 26452652 NR Description: unknown protein [Arabidopsis thaliana]
  misc_feature (1)..(129): Homolog of NCBI NO: 34910918 NR Description: OSJNBb0063G05.4 [Oryza sativa (japonica
  misc_feature (121)..(225): Homolog of NCBI NO: 34910918 NR Description: OSJNBb0063G05.4 [Oryza sativa (japonica
  misc_feature (1)..(232): Homolog of NCBI NO: 26333485 NR Description: unnamed protein product [Mus musculus]
  misc_feature (1)..(232): Homolog of NCBI NO: 29835270 NR Description: RIKEN cDNA C130022K22 gene [Mus musculus]
  misc_feature (1)..(232): Homolog of NCBI NO: 34857683 NR Description: similar to RIKEN cDNA C130022K22 gene [Rattus

SEQ ID NO: 92121 - protein, 217 aa, Arabidopsis thaliana; identical to SEQ ID NO: 42495
  peptide (1)..(217): Ceres Seq. ID no. 12707917
  misc_feature (1)..(217): Homolog of NCBI NO: 15236824 NR Description: unknown protein; protein id: At4g18260.1
  misc_feature (1)..(217): Homolog of NCBI NO: 26452652 NR Description: unknown protein [Arabidopsis thaliana]
  misc_feature (1)..(113): Homolog of NCBI NO: 34910918 NR Description: OSJNBb0063G05.4 [Oryza sativa (japonica
  misc_feature (105)..(209): Homolog of NCBI NO: 34910918 NR Description: OSJNBb0063G05.4 [Oryza sativa (japonica
  misc_feature (1)..(216): Homolog of NCBI NO: 26333485 NR Description: unnamed protein product [Mus musculus]
  misc_feature (1)..(216): Homolog of NCBI NO: 29835270 NR Description: RIKEN cDNA C130022K22 gene [Mus musculus]
  misc_feature (1)..(216): Homolog of NCBI NO: 34857683 NR Description: similar to RIKEN cDNA C130022K22 gene [Rattus

SEQ ID NO: 92122 - DNA, 1482 bp, Arabidopsis thaliana; identical to SEQ ID NO: 88366
  misc_feature (1)..(1482): Ceres Seq. ID no. 12707924
  misc_feature: MA Experiment ID: 108434 Result: Up-regulated in Transcription
  misc_feature: MA Experiment 108434 PARAMETER Experiment Name: At_Root_Tips_cDNA_P Parameter: Tissue Value: Root Tips
  misc_feature: MA Experiment ID: 108461 Result: Down-regulated in Transcription
  misc_feature: MA Experiment 108461 PARAMETER Experiment Name: At_Germinating_Seeds_cDNA_P Parameter: Age (day) Value: 1 vs. 0
  misc_feature: MA Experiment 108461 PARAMETER Experiment Name: At_Germinating_Seeds_cDNA_P Parameter: Tissue Value: Germinating Seeds
  misc_feature: MA Experiment ID: 108462 Result: Down-regulated in Transcription
  misc_feature: MA Experiment 108462 PARAMETER Experiment Name: At_Germinating_Seeds_cDNA_P Parameter: Age (day) Value: 2 vs. 0
  misc_feature: MA Experiment 108462 PARAMETER Experiment Name: At_Germinating_Seeds_cDNA_P Parameter: Tissue Value: Germinating Seeds
  misc_feature: MA Experiment ID: 108463 Result: Down-regulated in Transcription
  misc_feature: MA Experiment 108463 PARAMETER Experiment Name: At_Germinating_Seeds_cDNA_P Parameter: Age (day) Value: 3 vs. 0
  misc_feature: MA Experiment 108463 PARAMETER Experiment Name: At_Germinating_Seeds_cDNA_P Parameter: Tissue Value: Germinating Seeds
  misc_feature: MA Experiment ID: 108464 Result: Down-regulated in Transcription
  misc_feature: MA Experiment 108464 PARAMETER Experiment Name: At_Germinating_Seeds_cDNA_P Parameter: Age (day) Value: 4 vs. 0
  misc_feature: MA Experiment 108464 PARAMETER Experiment Name: At_Germinating_Seeds_cDNA_P Parameter: Tissue Value: Germinating Seeds
  misc_feature: MA Experiment ID: 20000234 Result: Up-regulated in Transcription
  misc_feature: MA Experiment 20000234 PARAMETER Experiment Name: At_Siliques_P Parameter: Age (day) Value: 21
  misc_feature: MA Experiment 20000234 PARAMETER Experiment Name: At_Siliques_P Parameter: Organism Value: A. thaliana
  misc_feature: MA Experiment 20000234 PARAMETER Experiment Name: At_Siliques_P Parameter: Plant Line Value: WS
  misc_feature: MA Experiment 20000234 PARAMETER Experiment Name: At_Siliques_P Parameter: Tissue Value: Less Than 5mm Siliques vs. Whole Plant
  misc_feature: MA Experiment ID: 20000235 Result: Up-regulated in Transcription
  misc_feature: MA Experiment 20000235 PARAMETER Experiment Name: At_Siliques_P Parameter: Age (day) Value: 21
  misc_feature: MA Experiment 20000235 PARAMETER Experiment Name: At_Siliques_P Parameter: Organism Value: A. thaliana
  misc_feature: MA Experiment 20000235 PARAMETER Experiment Name: At_Siliques_P Parameter: Plant Line Value: WS
  misc_feature: MA Experiment 20000235 PARAMETER Experiment Name: At_Siliques_P Parameter: Tissue Value: 5-10mm Siliques vs. Whole Plant
  misc_feature: MA Experiment ID: 20000286 Result: Up-regulated in Transcription
  misc_feature: MA Experiment 20000286 PARAMETER Experiment Name: At_Open_Flower_P Parameter: Age (day) Value: 21
  misc_feature: MA Experiment 20000286 PARAMETER Experiment Name: At_Open_Flower_P Parameter: Plant Line Value: WS
  misc_feature: MA Experiment 20000286 PARAMETER Experiment Name: At_Open_Flower_P Parameter: Tissue Value: Half Open vs. Whole Plant
  misc_feature: MA Experiment ID: 20000438 Result: Up-regulated in Transcription
  misc_feature: MA Experiment 20000438 PARAMETER Experiment Name: At_Shoots__P Parameter: Age (day) Value: 14
  misc_feature: MA Experiment 20000438 PARAMETER Experiment Name: At_Shoots__P Parameter: Tissue Value: Shoots vs. Whole Plant
  misc_feature: MA Experiment ID: 20001905 Result: Down-regulated in Transcription
  misc_feature: MA Experiment 20001905 PARAMETER Experiment Name: At_Drought_Reproduction_P Parameter: Age (day) Value: 40
  misc_feature: MA Experiment 20001905 PARAMETER Experiment Name: At_Drought_Reproduction_P Parameter: Organism Value: A. thaliana
  misc_feature: MA Experiment 20001905 PARAMETER Experiment Name: At_Drought_Reproduction_P Parameter: Plant Line Value: WS
  misc_feature: MA Experiment 20001905 PARAMETER Experiment Name: At_Drought_Reproduction_P Parameter: Timepoint (day) Value: 10
  misc_feature: MA Experiment 20001905 PARAMETER Experiment Name: At_Drought_Reproduction_P Parameter: Tissue Value: Rosettes
  misc_feature: MA Experiment 20001905 PARAMETER Experiment Name: At_Drought_Reproduction_P Parameter: Treatment Value: Drought vs. No Drought

SEQ ID NO: 92123 - protein, 493 aa, Arabidopsis thaliana; identical to SEQ ID NO: 88367
  peptide (1)..(493): Ceres Seq. ID no. 12707925
  misc_feature (47)..(409): Pfam Name: mTERF Pfam Description: mTERF
  misc_feature (1)..(434): Homolog of NCBI NO: 18414260 NR Description: hypothetical protein; protein id: At4g14605.1
  misc_feature (47)..(434): Homolog of NCBI NO: 7485117 NR Description: hypothetical protein - Arabidopsis thaliana hypothetical protein [Arabidopsis thaliana]
  misc_feature (1)..(26): Homolog of NCBI NO: 7485117 NR Description: hypothetical protein - Arabidopsis thaliana hypothetical protein [Arabidopsis thaliana]
  misc_feature (215)..(471): Homolog of NCBI NO: 15226787 NR Description: hypothetical protein; protein id: At2g34620.1
  misc_feature (173)..(467): Homolog of NCBI NO: 34905080 NR Description: P0686C03.23 [Oryza sativa (japonica
  misc_feature (253)..(471): Homolog of NCBI NO: 28392870 NR Description: unknown protein [Arabidopsis thaliana]
  misc_feature (111)..(469): Homolog of NCBI NO: 18406426 NR Description: expressed protein; protein id: At2g44020.1, by cDNA: gi_14532591, supported by cDNA: gi_19310760 [Arabidopsis
  misc_feature (242)..(484): Homolog of NCBI NO: 15233700 NR Description: putative protein; protein id: At4g38160.1, by cDNA: gi_20147356 [Arabidopsis thaliana]
  misc_feature (124)..(469): Homolog of NCBI NO: 15236230 NR Description: hypothetical protein; protein id: At4g02990.1
  misc_feature (236)..(475): Homolog of NCBI NO: 15227089 NR Description: hypothetical protein; protein id: At2g21710.1

SEQ ID NO: 92124 - DNA, 1149 bp, Arabidopsis thaliana; identical to SEQ ID NO: 88368
  misc_feature (1)..(1149): Ceres Seq. ID no. 12708316
  misc_feature: MA Experiment ID: 108435 Result: Up-regulated in Transcription
  misc_feature: MA Experiment 108435 PARAMETER Experiment Name: At_stm_Mutants_cDNA_P Parameter: Plant Line Value: wt Landsburg vs stm
  misc_feature: MA Experiment 108435 PARAMETER Experiment Name: At_stm_Mutants_cDNA_P Parameter: Tissue Value: Shoot Apical Meristem Region
  misc_feature: MA Experiment ID: 108462 Result: Up-regulated in Transcription
  misc_feature: MA Experiment 108462 PARAMETER Experiment Name: At_Germinating_Seeds_cDNA_P Parameter: Age (day) Value: 2 vs. 0
  misc_feature: MA Experiment 108462 PARAMETER Experiment Name: At_Germinating_Seeds_cDNA_P Parameter: Tissue Value: Germinating Seeds
  misc_feature: MA Experiment ID: 108463 Result: Up-regulated in Transcription
  misc_feature: MA Experiment 108463 PARAMETER Experiment Name: At_Germinating_Seeds_cDNA_P Parameter: Age (day) Value: 3 vs. 0
  misc_feature: MA Experiment 108463 PARAMETER Experiment Name: At_Germinating_Seeds_cDNA_P Parameter: Tissue Value: Germinating Seeds
  misc_feature: MA Experiment ID: 108464 Result: Up-regulated in Transcription
  misc_feature: MA Experiment 108464 PARAMETER Experiment Name: At_Germinating_Seeds_cDNA_P Parameter: Age (day) Value: 4 vs. 0
  misc_feature: MA Experiment 108464 PARAMETER Experiment Name: At_Germinating_Seeds_cDNA_P Parameter: Tissue Value: Germinating Seeds
  misc_feature: MA Experiment ID: 108474 Result: Down-regulated in Transcription
  misc_feature: MA Experiment 108474 PARAMETER Experiment Name: At_Drought_Flowers_cDNA_P Parameter: Timepoint (hr) Value: null
  misc_feature: MA Experiment 108474 PARAMETER Experiment Name: At_Drought_Flowers_cDNA_P Parameter: Treatment Value: Drought vs. No Drought
  misc_feature: MA Experiment ID: 108561 Result: Down-regulated in Transcription
  misc_feature: MA Experiment 108561 PARAMETER Experiment Name: At_100uM_ABA_cDNA_P Parameter: Timepoint (hr) Value: 6
  misc_feature: MA Experiment 108561 PARAMETER Experiment Name: At_100uM_ABA_cDNA_P Parameter: Tissue Value: Aerial
  misc_feature: MA Experiment 108561 PARAMETER Experiment Name: At_100uM_ABA_cDNA_P Parameter: Treatment Value: 100uM ABA vs. No Treatment
  misc_feature: MA Experiment ID: 108576 Result: Down-regulated in Transcription
  misc_feature: MA Experiment 108576 PARAMETER Experiment Name: At_42deg_Heat_cDNA_P Parameter: Temperature (deg C) Value: 42 vs. 22
  misc_feature: MA Experiment 108576 PARAMETER Experiment Name: At_42deg_Heat_cDNA_P Parameter: Timepoint (hr) Value: 1
  misc_feature: MA Experiment 108576 PARAMETER Experiment Name: At_42deg_Heat_cDNA_P Parameter: Tissue Value: Aerial
  misc_feature: MA Experiment ID: 108577 Result: Down-regulated in Transcription
  misc_feature: MA Experiment 108577 PARAMETER Experiment Name: At_42deg_Heat_cDNA_P Parameter: Temperature (deg C) Value: 42 vs. 22
  misc_feature: MA Experiment 108577 PARAMETER Experiment Name: At_42deg_Heat_cDNA_P Parameter: Timepoint (hr) Value: 6
  misc_feature: MA Experiment 108577 PARAMETER Experiment Name: At_42deg_Heat_cDNA_P Parameter: Tissue Value: Aerial
  misc_feature: MA Experiment ID: 108595 Result: Down-regulated in Transcription
  misc_feature: MA Experiment 108595 PARAMETER Experiment Name: At_Ler-pi_Ovule_cDNA_P Parameter: Plant Line Value: null
  misc_feature: MA Experiment ID: 108605 Result: Down-regulated in Transcription
  misc_feature: MA Experiment 108605 PARAMETER Experiment Name: At_100uM_ABA_cDNA_P Parameter: Timepoint (hr) Value: 6
  misc_feature: MA Experiment 108605 PARAMETER Experiment Name: At_100uM_ABA_cDNA_P Parameter: Tissue Value: Aerial
  misc_feature: MA Experiment 108605 PARAMETER Experiment Name: At_100uM_ABA_cDNA_P Parameter: Treatment Value: 100uM ABA vs. No Treatment
  misc_feature: MA Experiment ID: 108607 Result: Down-regulated in Transcription
  misc_feature: MA Experiment 108607 PARAMETER Experiment Name: At_100uM_ABA_cDNA_P Parameter: Timepoint (hr) Value: 4
  misc_feature: MA Experiment 108607 PARAMETER Experiment Name: At_100uM_ABA_cDNA_P Parameter: Tissue Value: Aerial
  misc_feature: MA Experiment 108607 PARAMETER Experiment Name: At_100uM_ABA_cDNA_P Parameter: Treatment Value: 100uM ABA vs. No Treatment
  misc_feature: MA Experiment ID: 108668 Result: Down-regulated in Transcription
  misc_feature: MA Experiment 108668 PARAMETER Experiment Name: At_2mM_SA_cDNA_P Parameter: Plant Line Value: WS
  misc_feature: MA Experiment 108668 PARAMETER Experiment Name: At_2mM_SA_cDNA_P Parameter: Timepoint (hr) Value: 6
  misc_feature: MA Experiment 108668 PARAMETER Experiment Name: At_2mM_SA_cDNA_P Parameter: Treatment Value: 2mM SA vs. No Treatment
  misc_feature: MA Experiment ID: 20000070 Result: Down-regulated in Transcription
  misc_feature: MA Experiment 20000070 PARAMETER Experiment Name: At_100uM_ABA_Mutants_cDNA_P Parameter: Plant Line Value: CS24
  misc_feature: MA Experiment 20000070 PARAMETER Experiment Name: At_100uM_ABA_Mutants_cDNA_P Parameter: Timepoint (hr) Value: 6
  misc_feature: MA Experiment 20000070 PARAMETER Experiment Name: At_100uM_ABA_Mutants_cDNA_P Parameter: Tissue Value: Aerial
  misc_feature: MA Experiment 20000070 PARAMETER Experiment Name: At_100uM_ABA_Mutants_cDNA_P Parameter: Treatment Value: 100uM ABA vs. No Treatment
  misc_feature: MA Experiment ID: 20000071 Result: Down-regulated in Transcription
  misc_feature: MA Experiment 20000071 PARAMETER Experiment Name: At_100uM_ABA_Mutants_cDNA_P Parameter: Plant Line Value: CS8104
  misc_feature: MA Experiment 20000071 PARAMETER Experiment Name: At_100uM_ABA_Mutants_cDNA_P Parameter: Timepoint (hr) Value: 6
  misc_feature: MA Experiment 20000071 PARAMETER Experiment Name: At_100uM_ABA_Mutants_cDNA_P Parameter: Tissue Value: Aerial
  misc_feature: MA Experiment 20000071 PARAMETER Experiment Name: At_100uM_ABA_Mutants_cDNA_P Parameter: Treatment Value: 100uM ABA vs. No Treatment
  misc_feature: MA Experiment ID: 20000087 Result: Down-regulated in Transcription
  misc_feature: MA Experiment 20000087 PARAMETER Experiment Name: At_100uM_ABA_Mutants_cDNA_P Parameter: Plant Line Value: WS
  misc_feature: MA Experiment 20000087 PARAMETER Experiment Name: At_100uM_ABA_Mutants_cDNA_P Parameter: Timepoint (hr) Value: 6
  misc_feature: MA Experiment 20000087 PARAMETER Experiment Name: At_100uM_ABA_Mutants_cDNA_P Parameter: Tissue Value: Aerial
  misc_feature: MA Experiment 20000087 PARAMETER Experiment Name: At_100uM_ABA_Mutants_cDNA_P Parameter: Treatment Value: 100uM ABA vs. No Treatment
  misc_feature: MA Experiment ID: 20000112 Result: Down-regulated in Transcription
  misc_feature: MA Experiment 20000112 PARAMETER Experiment Name: At_42deg_Heat_cDNA_P Parameter: Temperature (deg C) Value: 42 vs. 22
  misc_feature: MA Experiment 20000112 PARAMETER Experiment Name: At_42deg_Heat_cDNA_P Parameter: Timepoint (hr) Value: 2
  misc_feature: MA Experiment 20000112 PARAMETER Experiment Name: At_42deg_Heat_cDNA_P Parameter: Tissue Value: Aerial
  misc_feature: MA Experiment ID: 20000113 Result: Down-regulated in Transcription
  misc_feature: MA Experiment 20000113 PARAMETER Experiment Name: At_42deg_Heat_cDNA_P Parameter: Temperature (deg C) Value: 42 vs. 22
  misc_feature: MA Experiment 20000113 PARAMETER Experiment Name: At_42deg_Heat_cDNA_P Parameter: Timepoint (hr) Value: 8
  misc_feature: MA Experiment 20000113 PARAMETER Experiment Name: At_42deg_Heat_cDNA_P Parameter: Tissue Value: Aerial
  misc_feature: MA Experiment ID: 20000117 Result: Down-regulated in Transcription
  misc_feature: MA Experiment 20000117 PARAMETER Experiment Name: At_100uM_ABA_Mutants_cDNA_P Parameter: Plant Line Value: Columbia
  misc_feature: MA Experiment 20000117 PARAMETER Experiment Name: At_100uM_ABA_Mutants_cDNA_P Parameter: Timepoint (hr) Value: 6
  misc_feature: MA Experiment 20000117 PARAMETER Experiment Name: At_100uM_ABA_Mutants_cDNA_P Parameter: Tissue Value: Aerial
  misc_feature: MA Experiment 20000117 PARAMETER Experiment Name: At_100uM_ABA_Mutants_cDNA_P Parameter: Treatment Value: 100uM ABA vs. No Treatment
  misc_feature: MA Experiment ID: 20000169 Result: Down-regulated in Transcription
  misc_feature: MA Experiment 20000169 PARAMETER Experiment Name: At_100uM_ABA_P Parameter: Age (day) Value: 14
  misc_feature: MA Experiment 20000169 PARAMETER Experiment Name: At_100uM_ABA_P Parameter: Organism Value: A. thaliana
  misc_feature: MA Experiment 20000169 PARAMETER Experiment Name: At_100uM_ABA_P Parameter: Plant Line Value: WS
  misc_feature: MA Experiment 20000169 PARAMETER Experiment Name: At_100uM_ABA_P Parameter: Timepoint (hr) Value: 6
  misc_feature: MA Experiment 20000169 PARAMETER Experiment Name: At_100uM_ABA_P Parameter: Tissue Value: Aerial
  misc_feature: MA Experiment 20000169 PARAMETER Experiment Name: At_100uM_ABA_P Parameter: Treatment Value: 100uM ABA vs. No Treatment
  misc_feature: MA Experiment ID: 20000173 Result: Down-regulated in Transcription
  misc_feature: MA Experiment 20000173 PARAMETER Experiment Name: At_42deg_Heat_P Parameter: Age (day) Value: 14
  misc_feature: MA Experiment 20000173 PARAMETER Experiment Name: At_42deg_Heat_P Parameter: Organism Value: A. thaliana
  misc_feature: MA Experiment 20000173 PARAMETER Experiment Name: At_42deg_Heat_P Parameter: Plant Line Value: WS
  misc_feature: MA Experiment 20000173 PARAMETER Experiment Name: At_42deg_Heat_P Parameter: Temperature (deg C) Value: 42 vs. 22
  misc_feature: MA Experiment 20000173 PARAMETER Experiment Name: At_42deg_Heat_P Parameter: Timepoint (hr) Value: 6
  misc_feature: MA Experiment 20000173 PARAMETER Experiment Name: At_42deg_Heat_P Parameter: Tissue Value: Aerial
  misc_feature: MA Experiment ID: 20000180 Result: Up-regulated in Transcription
  misc_feature: MA Experiment 20000180 PARAMETER Experiment Name: At_Germinating_Seeds_P Parameter: Age (hr) Value: 24 vs. 0
  misc_feature: MA Experiment 20000180 PARAMETER Experiment Name: At_Germinating_Seeds_P Parameter: Tissue Value: Germinating Seeds
  misc_feature: MA Experiment ID: 20000182 Result: Down-regulated in Transcription
  misc_feature: MA Experiment 20000182 PARAMETER Experiment Name: At_2mM_SA_P Parameter: Age (day) Value: 14
  misc_feature: MA Experiment 20000182 PARAMETER Experiment Name: At_2mM_SA_P Parameter: Organism Value: A. thaliana
  misc_feature: MA Experiment 20000182 PARAMETER Experiment Name: At_2mM_SA_P Parameter: Plant Line Value: WS
  misc_feature: MA Experiment 20000182 PARAMETER Experiment Name: At_2mM_SA_P Parameter: Timepoint (hr) Value: 6
  misc_feature: MA Experiment 20000182 PARAMETER Experiment Name: At_2mM_SA_P Parameter: Tissue Value: Aerial
  misc_feature: MA Experiment 20000182 PARAMETER Experiment Name: At_2mM_SA_P Parameter: Treatment Value: 2mM SA vs. No Treatment
  misc_feature: MA Experiment ID: 20000185 Result: Down-regulated in Transcription
  misc_feature: MA Experiment 20000185 PARAMETER Experiment Name: At_Roots__P Parameter: Age (day) Value: 7 vs. 21
  misc_feature: MA Experiment 20000185 PARAMETER Experiment Name: At_Roots__P Parameter: Organism Value: A. thaliana
  misc_feature: MA Experiment 20000185 PARAMETER Experiment Name: At_Roots__P Parameter: Tissue Value: Roots vs. Whole Plant
  misc_feature: MA Experiment ID: 20000224 Result: Down-regulated in Transcription
  misc_feature: MA Experiment ID: 20000227 Result: Up-regulated in Transcription
  misc_feature: MA Experiment 20000227 PARAMETER Experiment Name: At_Root-Tips-vs-Tops_P Parameter: Tissue Value: Root Tips vs. Root Tops
  misc_feature: MA Experiment ID: 20000234 Result: Down-regulated in Transcription
  misc_feature: MA Experiment 20000234 PARAMETER Experiment Name: At_Siliques_P Parameter: Age (day) Value: 21
  misc_feature: MA Experiment 20000234 PARAMETER Experiment Name: At_Siliques_P Parameter: Organism Value: A. thaliana
  misc_feature: MA Experiment 20000234 PARAMETER Experiment Name: At_Siliques_P Parameter: Plant Line Value: WS
  misc_feature: MA Experiment 20000234 PARAMETER Experiment Name: At_Siliques_P Parameter: Tissue Value: Less Than 5mm Siliques vs. Whole Plant
  misc_feature: MA Experiment ID: 20000265 Result: Down-regulated in Transcription
  misc_feature: MA Experiment 20000265 PARAMETER Experiment Name: At_Open_Flower_P Parameter: Age (day) Value: 21
  misc_feature: MA Experiment 20000265 PARAMETER Experiment Name: At_Open_Flower_P Parameter: Plant Line Value: WS
  misc_feature: MA Experiment 20000265 PARAMETER Experiment Name: At_Open_Flower_P Parameter: Tissue Value: Closed Flower vs. Whole Plant
  misc_feature: MA Experiment ID: 20000268 Result: Down-regulated in Transcription
  misc_feature: MA Experiment 20000268 PARAMETER Experiment Name: At_100mM_NaCl__P Parameter: Age (day) Value: 14
  misc_feature: MA Experiment 20000268 PARAMETER Experiment Name: At_100mM_NaCl__P Parameter: Organism Value: A. thaliana
  misc_feature: MA Experiment 20000268 PARAMETER Experiment Name: At_100mM_NaCl__P Parameter: Plant Line Value: WS
  misc_feature: MA Experiment 20000268 PARAMETER Experiment Name: At_100mM_NaCl__P Parameter: Timepoint (hr) Value: 6
  misc_feature: MA Experiment 20000268 PARAMETER Experiment Name: At_100mM_NaCl__P Parameter: Tissue Value: Whole Plant
  misc_feature: MA Experiment 20000268 PARAMETER Experiment Name: At_100mM_NaCl__P Parameter: Treatment Value: 100mM NaCl vs. No Treatment
  misc_feature: MA Experiment ID: 20000437 Result: Down-regulated in Transcription
  misc_feature: MA Experiment 20000437 PARAMETER Experiment Name: At_Drought_P Parameter: Age (day) Value: 8
  misc_feature: MA Experiment 20000437 PARAMETER Experiment Name: At_Drought_P Parameter: Organism Value: A. thaliana
  misc_feature: MA Experiment 20000437 PARAMETER Experiment Name: At_Drought_P Parameter: Plant Line Value: WS
  misc_feature: MA Experiment 20000437 PARAMETER Experiment Name: At_Drought_P Parameter: Timepoint (hr) Value: 24
  misc_feature: MA Experiment 20000437 PARAMETER Experiment Name: At_Drought_P Parameter: Tissue Value: Whole Plant
  misc_feature: MA Experiment 20000437 PARAMETER Experiment Name: At_Drought_P Parameter: Treatment Value: Drought vs. No Drought
  misc_feature: MA Experiment ID: 20000439 Result: Down-regulated in Transcription
  misc_feature: MA Experiment 20000439 PARAMETER Experiment Name: At_Roots__P Parameter: Age (day) Value: 14 vs. 21
  misc_feature: MA Experiment 20000439 PARAMETER Experiment Name: At_Roots__P Parameter: Organism Value: A. thaliana
  misc_feature: MA Experiment 20000439 PARAMETER Experiment Name: At_Roots__P Parameter: Tissue Value: Roots vs. Whole Plant
  misc_feature: MA Experiment ID: 20000794 Result: Up-regulated in Transcription
  misc_feature: MA Experiment 20000794 PARAMETER Experiment Name: At_Petals_P Parameter: Age (day) Value: 23-25 days
  misc_feature: MA Experiment 20000794 PARAMETER Experiment Name: At_Petals_P Parameter: Plant Line Value: WS
  misc_feature: MA Experiment 20000794 PARAMETER Experiment Name: At_Petals_P Parameter: Tissue Value: Petals vs. Whole plant
  misc_feature: MA Experiment ID: 20001248 Result: Up-regulated in Transcription
  misc_feature: MA Experiment 20001248 PARAMETER Experiment Name: At_Far-red-induction_P Parameter: Age (day) Value: 7
  misc_feature: MA Experiment 20001248 PARAMETER Experiment Name: At_Far-red-induction_P Parameter: Light Value: Far-red vs. White
  misc_feature: MA Experiment 20001248 PARAMETER Experiment Name: At_Far-red-induction_P Parameter: Organism Value: A. thaliana
  misc_feature: MA Experiment 20001248 PARAMETER Experiment Name: At_Far-red-induction_P Parameter: Plant Line Value: Columbia
  misc_feature: MA Experiment 20001248 PARAMETER Experiment Name: At_Far-red-induction_P Parameter: Timepoint (hr) Value: 4
  misc_feature: MA Experiment 20001248 PARAMETER Experiment Name: At_Far-red-induction_P Parameter: Tissue Value: Whole Plant
  misc_feature: MA Experiment ID: 20001450 Result: Up-regulated in Transcription
  misc_feature: MA Experiment 20001450 PARAMETER Experiment Name: At_Far-red-induction_P Parameter: Age (day) Value: 7
  misc_feature: MA Experiment 20001450 PARAMETER Experiment Name: At_Far-red-induction_P Parameter: Light Value: Far-red vs. White
  misc_feature: MA Experiment 20001450 PARAMETER Experiment Name: At_Far-red-induction_P Parameter: Organism Value: A. thaliana
  misc_feature: MA Experiment 20001450 PARAMETER Experiment Name: At_Far-red-induction_P Parameter: Plant Line Value: Columbia
  misc_feature: MA Experiment 20001450 PARAMETER Experiment Name: At_Far-red-induction_P Parameter: Timepoint (hr) Value: 8
  misc_feature: MA Experiment 20001450 PARAMETER Experiment Name: At_Far-red-induction_P Parameter: Tissue Value: Whole Plant
  misc_feature: MA Experiment ID: 20001451 Result: Up-regulated in Transcription
  misc_feature: MA Experiment 20001451 PARAMETER Experiment Name: At_Far-red-induction_P Parameter: Age (day) Value: 7
  misc_feature: MA Experiment 20001451 PARAMETER Experiment Name: At_Far-red-induction_P Parameter: Light Value: Far-red vs. White
  misc_feature: MA Experiment 20001451 PARAMETER Experiment Name: At_Far-red-induction_P Parameter: Organism Value: A. thaliana
  misc_feature: MA Experiment 20001451 PARAMETER Experiment Name: At_Far-red-induction_P Parameter: Plant Line Value: Columbia
  misc_feature: MA Experiment 20001451 PARAMETER Experiment Name: At_Far-red-induction_P Parameter: Timepoint (hr) Value: 24
  misc_feature: MA Experiment 20001451 PARAMETER Experiment Name: At_Far-red-induction_P Parameter: Tissue Value: Whole Plant
  misc_feature: MA Experiment ID: 20001457 Result: Up-regulated in Transcription
  misc_feature: MA Experiment 20001457 PARAMETER Experiment Name: At_50mM_NH4NO3_L-to-H_P Parameter: Age (day) Value: Undefined
  misc_feature: MA Experiment 20001457 PARAMETER Experiment Name: At_50mM_NH4NO3_L-to-H_P Parameter: Organism Value: Undefined
  misc_feature: MA Experiment 20001457 PARAMETER Experiment Name: At_50mM_NH4NO3_L-to-H_P Parameter: Plant Line Value: Undefined
  misc_feature: MA Experiment 20001457 PARAMETER Experiment Name: At_50mM_NH4NO3_L-to-H_P Parameter: Timepoint (hr) Value: 0.5
  misc_feature: MA Experiment 20001457 PARAMETER Experiment Name: At_50mM_NH4NO3_L-to-H_P Parameter: Tissue Value: Siliques
  misc_feature: MA Experiment 20001457 PARAMETER Experiment Name: At_50mM_NH4NO3_L-to-H_P Parameter: Treatment Value: 50mM NH4NO3 vs. 100mM Manitol
  misc_feature: MA Experiment ID: 20001554 Result: Down-regulated in Transcription
  misc_feature: MA Experiment 20001554 PARAMETER Experiment Name: At_Drought_Soil_Dry_P Parameter: Age (day) Value: 21
  misc_feature: MA Experiment 20001554 PARAMETER Experiment Name: At_Drought_Soil_Dry_P Parameter: Organism Value: A. thaliana
  misc_feature: MA Experiment 20001554 PARAMETER Experiment Name: At_Drought_Soil_Dry_P Parameter: Plant Line Value: WS
  misc_feature: MA Experiment 20001554 PARAMETER Experiment Name: At_Drought_Soil_Dry_P Parameter: Post Timepoint (hr) Value: None
  misc_feature: MA Experiment 20001554 PARAMETER Experiment Name: At_Drought_Soil_Dry_P Parameter: Post-Treatment Value: None
  misc_feature: MA Experiment 20001554 PARAMETER Experiment Name: At_Drought_Soil_Dry_P Parameter: Timepoint (day) Value: 7
  misc_feature: MA Experiment 20001554 PARAMETER Experiment Name: At_Drought_Soil_Dry_P Parameter: Treatment Value: Drought vs. No Drought
  misc_feature: MA Experiment ID: 20001556 Result: Down-regulated in Transcription
  misc_feature: MA Experiment 20001556 PARAMETER Experiment Name: At_Drought_Soil_Dry_P Parameter: Age (day) Value: 26
  misc_feature: MA Experiment 20001556 PARAMETER Experiment Name: At_Drought_Soil_Dry_P Parameter: Organism Value: A. thaliana
  misc_feature: MA Experiment 20001556 PARAMETER Experiment Name: At_Drought_Soil_Dry_P Parameter: Plant Line Value: WS
  misc_feature: MA Experiment 20001556 PARAMETER Experiment Name: At_Drought_Soil_Dry_P Parameter: Post Timepoint (hr) Value: None
  misc_feature: MA Experiment 20001556 PARAMETER Experiment Name: At_Drought_Soil_Dry_P Parameter: Post-Treatment Value: None
  misc_feature: MA Experiment 20001556 PARAMETER Experiment Name: At_Drought_Soil_Dry_P Parameter: Timepoint (day) Value: 12
  misc_feature: MA Experiment 20001556 PARAMETER Experiment Name: At_Drought_Soil_Dry_P Parameter: Treatment Value: Drought vs. No Drought
  misc_feature: MA Experiment ID: 20001558 Result: Up-regulated in Transcription
  misc_feature: MA Experiment 20001558 PARAMETER Experiment Name: At_Drought_Soil_Dry_P Parameter: Age (day) Value: 27
  misc_feature: MA Experiment 20001558 PARAMETER Experiment Name: At_Drought_Soil_Dry_P Parameter: Organism Value: A. thaliana
  misc_feature: MA Experiment 20001558 PARAMETER Experiment Name: At_Drought_Soil_Dry_P Parameter: Plant Line Value: WS
  misc_feature: MA Experiment 20001558 PARAMETER Experiment Name: At_Drought_Soil_Dry_P Parameter: Post Timepoint (hr) Value: 6
  misc_feature: MA Experiment 20001558 PARAMETER Experiment Name: At_Drought_Soil_Dry_P Parameter: Post-Treatment Value: Re-Water vs. No Drought
  misc_feature: MA Experiment 20001558 PARAMETER Experiment Name: At_Drought_Soil_Dry_P Parameter: Timepoint (day) Value: 13
  misc_feature: MA Experiment 20001558 PARAMETER Experiment Name: At_Drought_Soil_Dry_P Parameter: Treatment Value: Drought vs. No Drought
  misc_feature: MA Experiment ID: 20001560 Result: Up-regulated in Transcription
  misc_feature: MA Experiment 20001560 PARAMETER Experiment Name: At_Drought_Soil_Dry_P Parameter: Age (day) Value: 28
  misc_feature: MA Experiment 20001560 PARAMETER Experiment Name: At_Drought_Soil_Dry_P Parameter: Organism Value: A. thaliana
  misc_feature: MA Experiment 20001560 PARAMETER Experiment Name: At_Drought_Soil_Dry_P Parameter: Plant Line Value: WS
  misc_feature: MA Experiment 20001560 PARAMETER Experiment Name: At_Drought_Soil_Dry_P Parameter: Post Timepoint (hr) Value: None
  misc_feature: MA Experiment 20001560 PARAMETER Experiment Name: At_Drought_Soil_Dry_P Parameter: Post-Treatment Value: None
  misc_feature: MA Experiment 20001560 PARAMETER Experiment Name: At_Drought_Soil_Dry_P Parameter: Timepoint (day) Value: 14
  misc_feature: MA Experiment 20001560 PARAMETER Experiment Name: At_Drought_Soil_Dry_P Parameter: Treatment Value: Drought vs. No Drought
  misc_feature: MA Experiment ID: 20001761 Result: Up-regulated in Transcription
  misc_feature: MA Experiment 20001761 PARAMETER Experiment Name: At_50mM_NH4NO3_L-to-H_P Parameter: Timepoint (hr) Value: 4
  misc_feature: MA Experiment 20001761 PARAMETER Experiment Name: At_50mM_NH4NO3_L-to-H_P Parameter: Tissue Value: Siliques
  misc_feature: MA Experiment 20001761 PARAMETER Experiment Name: At_50mM_NH4NO3_L-to-H_P Parameter: Treatment Value: 50mM NH4NO3 vs 100mM Mannitol
  misc_feature: MA Experiment ID: 20001904 Result: Down-regulated in Transcription
  misc_feature: MA Experiment 20001904 PARAMETER Experiment Name: At_Drought_Reproduction_P Parameter: Age (day) Value: 37
  misc_feature: MA Experiment 20001904 PARAMETER Experiment Name: At_Drought_Reproduction_P Parameter: Organism Value: A. thaliana
  misc_feature: MA Experiment 20001904 PARAMETER Experiment Name: At_Drought_Reproduction_P Parameter: Plant Line Value: WS
  misc_feature: MA Experiment 20001904 PARAMETER Experiment Name: At_Drought_Reproduction_P Parameter: Timepoint (day) Value: 7
  misc_feature: MA Experiment 20001904 PARAMETER Experiment Name: At_Drought_Reproduction_P Parameter: Tissue Value: Rosettes
  misc_feature: MA Experiment 20001904 PARAMETER Experiment Name: At_Drought_Reproduction_P Parameter: Treatment Value: Drought vs. No Drought
  misc_feature: MA Experiment ID: 20001905 Result: Down-regulated in Transcription
  misc_feature: MA Experiment 20001905 PARAMETER Experiment Name: At_Drought_Reproduction_P Parameter: Age (day) Value: 40
  misc_feature: MA Experiment 20001905 PARAMETER Experiment Name: At_Drought_Reproduction_P Parameter: Organism Value: A. thaliana
  misc_feature: MA Experiment 20001905 PARAMETER Experiment Name: At_Drought_Reproduction_P Parameter: Plant Line Value: WS
  misc_feature: MA Experiment 20001905 PARAMETER Experiment Name: At_Drought_Reproduction_P Parameter: Timepoint (day) Value: 10
  misc_feature: MA Experiment 20001905 PARAMETER Experiment Name: At_Drought_Reproduction_P Parameter: Tissue Value: Rosettes
  misc_feature: MA Experiment 20001905 PARAMETER Experiment Name: At_Drought_Reproduction_P Parameter: Treatment Value: Drought vs. No Drought
  misc_feature: MA Experiment ID: 20001906 Result: Down-regulated in Transcription
  misc_feature: MA Experiment 20001906 PARAMETER Experiment Name: At_Drought_Reproduction_P Parameter: Age (day) Value: 35
  misc_feature: MA Experiment 20001906 PARAMETER Experiment Name: At_Drought_Reproduction_P Parameter: Organism Value: A. thaliana
  misc_feature: MA Experiment 20001906 PARAMETER Experiment Name: At_Drought_Reproduction_P Parameter: Plant Line Value: WS
  misc_feature: MA Experiment 20001906 PARAMETER Experiment Name: At_Drought_Reproduction_P Parameter: Timepoint (day) Value: 5
  misc_feature: MA Experiment 20001906 PARAMETER Experiment Name: At_Drought_Reproduction_P Parameter: Tissue Value: Siliques
  misc_feature: MA Experiment 20001906 PARAMETER Experiment Name: At_Drought_Reproduction_P Parameter: Treatment Value: Drought vs. No Drought
  misc_feature: MA Experiment ID: 20001907 Result: Down-regulated in Transcription
  misc_feature: MA Experiment 20001907 PARAMETER Experiment Name: At_Drought_Reproduction_P Parameter: Age (day) Value: 37
  misc_feature: MA Experiment 20001907 PARAMETER Experiment Name: At_Drought_Reproduction_P Parameter: Organism Value: A. thaliana
  misc_feature: MA Experiment 20001907 PARAMETER Experiment Name: At_Drought_Reproduction_P Parameter: Plant Line Value: WS
  misc_feature: MA Experiment 20001907 PARAMETER Experiment Name: At_Drought_Reproduction_P Parameter: Timepoint (day) Value: 7
  misc_feature: MA Experiment 20001907 PARAMETER Experiment Name: At_Drought_Reproduction_P Parameter: Tissue Value: Siliques
  misc_feature: MA Experiment 20001907 PARAMETER Experiment Name: At_Drought_Reproduction_P Parameter: Treatment Value: Drought vs. No Drought
  misc_feature: MA Experiment ID: 20001908 Result: Down-regulated in Transcription
  misc_feature: MA Experiment 20001908 PARAMETER Experiment Name: At_Drought_Reproduction_P Parameter: Age (day) Value: 40
  misc_feature: MA Experiment 20001908 PARAMETER Experiment Name: At_Drought_Reproduction_P Parameter: Organism Value: A. thaliana
  misc_feature: MA Experiment 20001908 PARAMETER Experiment Name: At_Drought_Reproduction_P Parameter: Plant Line Value: WS
  misc_feature: MA Experiment 20001908 PARAMETER Experiment Name: At_Drought_Reproduction_P Parameter: Timepoint (day) Value: 10
  misc_feature: MA Experiment 20001908 PARAMETER Experiment Name: At_Drought_Reproduction_P Parameter: Tissue Value: Siliques
  misc_feature: MA Experiment 20001908 PARAMETER Experiment Name: At_Drought_Reproduction_P Parameter: Treatment Value: Drought vs. No Drought
  misc_feature: MA Experiment ID: 20001911 Result: Down-regulated in Transcription
  misc_feature: MA Experiment 20001911 PARAMETER Experiment Name: At_Drought_Reproduction_P Parameter: Age (day) Value: 40
  misc_feature: MA Experiment 20001911 PARAMETER Experiment Name: At_Drought_Reproduction_P Parameter: Organism Value: A. thaliana
  misc_feature: MA Experiment 20001911 PARAMETER Experiment Name: At_Drought_Reproduction_P Parameter: Plant Line Value: WS
  misc_feature: MA Experiment 20001911 PARAMETER Experiment Name: At_Drought_Reproduction_P Parameter: Timepoint (day) Value: 10
  misc_feature: MA Experiment 20001911 PARAMETER Experiment Name: At_Drought_Reproduction_P Parameter: Tissue Value: Flowers
  misc_feature: MA Experiment 20001911 PARAMETER Experiment Name: At_Drought_Reproduction_P Parameter: Treatment Value: Drought vs. No Drought

SEQ ID NO: 92125 - protein, 296 aa, Arabidopsis thaliana; identical to SEQ ID NO: 29752
  peptide (1)..(296): Ceres Seq. ID no. 12708317
  misc_feature (35)..(216): Pfam Name: Glycosyl hydrolases family 16 Pfam Description: Glycosyl hydrolases family 16
  misc_feature (1)..(296): Homolog of NCBI NO: 15225605 NR Description: xyloglucan endotransglycosylase (ext/EXGT-A1); id: At2g06850.1, supported by cDNA: 15276., supported by cDNA:
  misc_feature (4)..(295): Homolog of NCBI NO: 22947847 NR Description: xyloglucan endotransglycosylase [Malus x
  misc_feature (11)..(295): Homolog of NCBI NO: 15240733 NR Description: xyloglucan endotransglycosylase (EXGT-A4); id: At5g13870.1 [Arabidopsis thaliana] endoxyloglucan transferase [Arabidopsis thaliana]
  misc_feature (3)..(295): Homolog of NCBI NO: 950299 NR Description: xyloglucan endotransglycosylase precursor
  misc_feature (3)..(295): Homolog of NCBI NO: 7447416 NR Description: xyloglucan endo-1,4-beta-D-glucanase (EC 3.2.1.-) - common nasturtium >gi|1008904|gb|AAB39950.1| xyloglucan
  misc_feature (7)..(295): Homolog of NCBI NO: 27228078 NR Description: xyloglucan endotransglycosylase precursor
  misc_feature (1)..(295): Homolog of NCBI NO: 3043422 NR Description: endoxyloglucan transferase [Cicer arietinum]
  misc_feature (5)..(295): Homolog of NCBI NO: 38605591 NR Description: Probable xyloglucan protein B precursor (VaXTH2) >gi|21734666|dbj|BAC03238.1|
  misc_feature (6)..(295): Homolog of NCBI NO: 541939 NR Description: xyloglucan endo-1,4-beta-D-glucanase (EC 3.2.1.-)
  misc_feature (1)..(290): Homolog of NCBI NO: 18391291 NR Description: xyloglucan endotransglycosylase, putative;

SEQ ID NO: 92126 - protein, 286 aa, Arabidopsis thaliana; identical to SEQ ID NO: 29753
  peptide (1)..(286): Ceres Seq. ID no. 12708318
  misc_feature (25)..(206): Pfam Name: Glycosyl hydrolases family 16 Pfam Description: Glycosyl hydrolases family 16
  misc_feature (1)..(286): Homolog of NCBI NO: 15225605 NR Description: xyloglucan endotransglycosylase (ext/EXGT-A1); id: At2g06850.1, supported by cDNA: 15276., supported by cDNA:
  misc_feature (1)..(285): Homolog of NCBI NO: 22947847 NR Description: xyloglucan endotransglycosylase [Malus x
  misc_feature (1)..(285): Homolog of NCBI NO: 15240733 NR Description: xyloglucan endotransglycosylase (EXGT-A4); id: At5g13870.1 [Arabidopsis thaliana] endoxyloglucan transferase [Arabidopsis thaliana]
  misc_feature (1)..(285): Homolog of NCBI NO: 950299 NR Description: xyloglucan endotransglycosylase precursor
  misc_feature (1)..(285): Homolog of NCBI NO: 7447416 NR Description: xyloglucan endo-1,4-beta-D-glucanase (EC 3.2.1.-) - common nasturtium >gi|1008904|gb|AAB39950.1| xyloglucan
  misc_feature (1)..(285): Homolog of NCBI NO: 27228078 NR Description: xyloglucan endotransglycosylase precursor
  misc_feature (1)..(285): Homolog of NCBI NO: 3043422 NR Description: endoxyloglucan transferase [Cicer arietinum]
  misc_feature (1)..(285): Homolog of NCBI NO: 38605591 NR Description: Probable xyloglucan protein B precursor (VaXTH2) >gi|21734666|dbj|BAC03238.1|
  misc_feature (1)..(285): Homolog of NCBI NO: 541939 NR Description: xyloglucan endo-1,4-beta-D-glucanase (EC 3.2.1.-)
  misc_feature (1)..(280): Homolog of NCBI NO: 18391291 NR Description: xyloglucan endotransglycosylase, putative;

SEQ ID NO: 92127 - protein, 281 aa, Arabidopsis thaliana; identical to SEQ ID NO: 29754
  peptide (1)..(281): Ceres Seq. ID no. 12708319
  misc_feature (20)..(201): Pfam Name: Glycosyl hydrolases family 16 Pfam Description: Glycosyl hydrolases family 16
  misc_feature (1)..(281): Homolog of NCBI NO: 15225605 NR Description: xyloglucan endotransglycosylase (ext/EXGT-A1); id: At2g06850.1, supported by cDNA: 15276., supported by cDNA:
  misc_feature (1)..(280): Homolog of NCBI NO: 22947847 NR Description: xyloglucan endotransglycosylase [Malus x
  misc_feature (1)..(280): Homolog of NCBI NO: 15240733 NR Description: xyloglucan endotransglycosylase (EXGT-A4); id: At5g13870.1 [Arabidopsis thaliana] endoxyloglucan transferase [Arabidopsis thaliana]
  misc_feature (1)..(280): Homolog of NCBI NO: 950299 NR Description: xyloglucan endotransglycosylase precursor
  misc_feature (1)..(280): Homolog of NCBI NO: 7447416 NR Description: xyloglucan endo-1,4-beta-D-glucanase (EC 3.2.1.-) - common nasturtium >gi|1008904|gb|AAB39950.1| xyloglucan
  misc_feature (1)..(280): Homolog of NCBI NO: 27228078 NR Description: xyloglucan endotransglycosylase precursor
  misc_feature (1)..(280): Homolog of NCBI NO: 3043422 NR Description: endoxyloglucan transferase [Cicer arietinum]
  misc_feature (1)..(280): Homolog of NCBI NO: 38605591 NR Description: Probable xyloglucan protein B precursor (VaXTH2) >gi|21734666|dbj|BAC03238.1|
  misc_feature (1)..(280): Homolog of NCBI NO: 541939 NR Description: xyloglucan endo-1,4-beta-D-glucanase (EC 3.2.1.-)
  misc_feature (1)..(275): Homolog of NCBI NO: 18391291 NR Description: xyloglucan endotransglycosylase, putative;

SEQ ID NO: 92128 - DNA, 1227 bp, Arabidopsis thaliana; identical to SEQ ID NO: 88372
  misc_feature (1)..(1227): Ceres Seq. ID no. 12708435
  misc_feature: MA Experiment ID: 20000314 Result: Up-regulated in Transcription
  misc_feature: MA Experiment 20000314 PARAMETER Experiment Name: At_14day_Shoots-Roots_Sub_P Parameter: Age (day) Value: 14
  misc_feature: MA Experiment 20000314 PARAMETER Experiment Name: At_14day_Shoots-Roots_Sub_P Parameter: Organism Value: A. thaliana
  misc_feature: MA Experiment 20000314 PARAMETER Experiment Name: At_14day_Shoots-Roots_Sub_P Parameter: Plant Line Value: WS
  misc_feature: MA Experiment 20000314 PARAMETER Experiment Name: At_14day_Shoots-Roots_Sub_P Parameter: Tissue Value: Roots vs. Whole Plant
  misc_feature: MA Experiment ID: 20000347 Result: Up-regulated in Transcription
  misc_feature: MA Experiment 20000347 PARAMETER Experiment Name: At_2mM_SA_Sub_P Parameter: Age (day) Value: 14
  misc_feature: MA Experiment 20000347 PARAMETER Experiment Name: At_2mM_SA_Sub_P Parameter: Organism Value: A. thaliana
  misc_feature: MA Experiment 20000347 PARAMETER Experiment Name: At_2mM_SA_Sub_P Parameter: Plant Line Value: WS
  misc_feature: MA Experiment 20000347 PARAMETER Experiment Name: At_2mM_SA_Sub_P Parameter: Timepoint (hr) Value: 6
  misc_feature: MA Experiment 20000347 PARAMETER Experiment Name: At_2mM_SA_Sub_P Parameter: Tissue Value: Aerial
  misc_feature: MA Experiment 20000347 PARAMETER Experiment Name: At_2mM_SA_Sub_P Parameter: Treatment Value: 2mM SA vs. No Treatment
  misc_feature: MA Experiment ID: 20000440 Result: Up-regulated in Transcription
  misc_feature: MA Experiment 20000440 PARAMETER Experiment Name: At_Closed-Flower__Sub_P Parameter: Tissue Value: Closed Flower vs. Whole Plant

SEQ ID NO: 92129 - protein, 408 aa, Arabidopsis thaliana; identical to SEQ ID NO: 88373
  peptide (1)..(408): Ceres Seq. ID no. 12708436
  misc_feature (194)..(270): Pfam Name: ATPase family associated with various cellular Pfam Description: ATPase family associated with various cellular
  misc_feature (12)..(160): Homolog of NCBI NO: 15218579 NR Description: unknown protein; protein id: At1g43910.1
  misc_feature (253)..(408): Homolog of NCBI NO: 15218579 NR Description: unknown protein; protein id: At1g43910.1
  misc_feature (164)..(270): Homolog of NCBI NO: 15218579 NR Description: unknown protein; protein id: At1g43910.1
  misc_feature (12)..(160): Homolog of NCBI NO: 39104583 NR Description: unknown protein [Arabidopsis thaliana]
  misc_feature (253)..(408): Homolog of NCBI NO: 39104583 NR Description: unknown protein [Arabidopsis thaliana]
  misc_feature (164)..(270): Homolog of NCBI NO: 39104583 NR Description: unknown protein [Arabidopsis thaliana]
  misc_feature (168)..(394): Homolog of NCBI NO: 30680274 NR Description: AAA-type ATPase family [Arabidopsis thaliana]
  misc_feature (7)..(160): Homolog of NCBI NO: 30680274 NR Description: AAA-type ATPase family [Arabidopsis thaliana]
  misc_feature (168)..(394): Homolog of NCBI NO: 25411838 NR Description: probable AAA-type ATPase [imported] - Arabidopsis
  misc_feature (7)..(160): Homolog of NCBI NO: 25411838 NR Description: probable AAA-type ATPase [imported] - Arabidopsis

SEQ ID NO: 92130 - protein, 395 aa, Arabidopsis thaliana; identical to SEQ ID NO: 88374
  peptide (1)..(395): Ceres Seq. ID no. 12708437
  misc_feature (181)..(257): Pfam Name: ATPase family associated with various cellular Pfam Description: ATPase family associated with various cellular
  misc_feature (1)..(147): Homolog of NCBI NO: 15218579 NR Description: unknown protein; protein id: At1g43910.1
  misc_feature (240)..(395): Homolog of NCBI NO: 15218579 NR Description: unknown protein; protein id: At1g43910.1
  misc_feature (151)..(257): Homolog of NCBI NO: 15218579 NR Description: unknown protein; protein id: At1g43910.1
  misc_feature (1)..(147): Homolog of NCBI NO: 39104583 NR Description: unknown protein [Arabidopsis thaliana]
  misc_feature (240)..(395): Homolog of NCBI NO: 39104583 NR Description: unknown protein [Arabidopsis thaliana]
  misc_feature (151)..(257): Homolog of NCBI NO: 39104583 NR Description: unknown protein [Arabidopsis thaliana]
  misc_feature (155)..(381): Homolog of NCBI NO: 30680274 NR Description: AAA-type ATPase family [Arabidopsis thaliana]
  misc_feature (1)..(147): Homolog of NCBI NO: 30680274 NR Description: AAA-type ATPase family [Arabidopsis thaliana]
  misc_feature (155)..(381): Homolog of NCBI NO: 25411838 NR Description: probable AAA-type ATPase [imported] - Arabidopsis
  misc_feature (1)..(147): Homolog of NCBI NO: 25411838 NR Description: probable AAA-type ATPase [imported] - Arabidopsis

SEQ ID NO: 92131 - protein, 380 aa, Arabidopsis thaliana; identical to SEQ ID NO: 88375
  peptide (1)..(380): Ceres Seq. ID no. 12708438
  misc_feature (166)..(242): Pfam Name: ATPase family associated with various cellular Pfam Description: ATPase family associated with various cellular
  misc_feature (1)..(132): Homolog of NCBI NO: 15218579 NR Description: unknown protein; protein id: At1g43910.1
  misc_feature (225)..(380): Homolog of NCBI NO: 15218579 NR Description: unknown protein; protein id: At1g43910.1
  misc_feature (136)..(242): Homolog of NCBI NO: 15218579 NR Description: unknown protein; protein id: At1g43910.1
  misc_feature (1)..(132): Homolog of NCBI NO: 39104583 NR Description: unknown protein [Arabidopsis thaliana]
  misc_feature (225)..(380): Homolog of NCBI NO: 39104583 NR Description: unknown protein [Arabidopsis thaliana]
  misc_feature (136)..(242): Homolog of NCBI NO: 39104583 NR Description: unknown protein [Arabidopsis thaliana]
  misc_feature (140)..(366): Homolog of NCBI NO: 30680274 NR Description: AAA-type ATPase family [Arabidopsis thaliana]
  misc_feature (1)..(132): Homolog of NCBI NO: 30680274 NR Description: AAA-type ATPase family [Arabidopsis thaliana]
  misc_feature (140)..(366): Homolog of NCBI NO: 25411838 NR Description: probable AAA-type ATPase [imported] - Arabidopsis
  misc_feature (1)..(132): Homolog of NCBI NO: 25411838 NR Description: probable AAA-type ATPase [imported] - Arabidopsis

SEQ ID NO: 92132 - DNA, 1647 bp, Arabidopsis thaliana; identical to SEQ ID NO: 88376
  misc_feature (1)..(1647): Ceres Seq. ID no. 12708521
  misc_feature: MA Experiment ID: 20000437 Result: Up-regulated in Transcription
  misc_feature: MA Experiment 20000437 PARAMETER Experiment Name: At_Drought_P Parameter: Age (day) Value: 8
  misc_feature: MA Experiment 20000437 PARAMETER Experiment Name: At_Drought_P Parameter: Organism Value: A. thaliana
  misc_feature: MA Experiment 20000437 PARAMETER Experiment Name: At_Drought_P Parameter: Plant Line Value: WS
  misc_feature: MA Experiment 20000437 PARAMETER Experiment Name: At_Drought_P Parameter: Timepoint (hr) Value: 24
  misc_feature: MA Experiment 20000437 PARAMETER Experiment Name: At_Drought_P Parameter: Tissue Value: Whole Plant
  misc_feature: MA Experiment 20000437 PARAMETER Experiment Name: At_Drought_P Parameter: Treatment Value: Drought vs. No Drought
  misc_feature: MA Experiment ID: 20001911 Result: Down-regulated in Transcription
  misc_feature: MA Experiment 20001911 PARAMETER Experiment Name: At_Drought_Reproduction_P Parameter: Age (day) Value: 40
  misc_feature: MA Experiment 20001911 PARAMETER Experiment Name: At_Drought_Reproduction_P Parameter: Organism Value: A. thaliana
  misc_feature: MA Experiment 20001911 PARAMETER Experiment Name: At_Drought_Reproduction_P Parameter: Plant Line Value: WS
  misc_feature: MA Experiment 20001911 PARAMETER Experiment Name: At_Drought_Reproduction_P Parameter: Timepoint (day) Value: 10
  misc_feature: MA Experiment 20001911 PARAMETER Experiment Name: At_Drought_Reproduction_P Parameter: Tissue Value: Flowers
  misc_feature: MA Experiment 20001911 PARAMETER Experiment Name: At_Drought_Reproduction_P Parameter: Treatment Value: Drought vs. No Drought

SEQ ID NO: 92133 - protein, 347 aa, Arabidopsis thaliana; identical to SEQ ID NO: 42696
  peptide (1)..(347): Ceres Seq. ID no. 12708522
  misc_feature (1)..(347): Homolog of NCBI NO: 18411172 NR Description: expressed protein; protein id: At1g76670.1, by cDNA: gi_14532697, supported by cDNA: gi_16604379, supported cDNA: gi_18491194 [Arabidopsis thaliana] >gi|25354481|pir||A96795
  misc_feature (1)..(346): Homolog of NCBI NO: 18394949 NR Description: expressed protein; protein id: At1g21070.1, by cDNA: 108746. [Arabidopsis thaliana] >gi|25354485|pir||G86343
  misc_feature (1)..(346): Homolog of NCBI NO: 21536703 NR Description: unknown [Arabidopsis thaliana]
  misc_feature (36)..(346): Homolog of NCBI NO: 26450366 NR Description: unknown protein [Arabidopsis thaliana]
  misc_feature (5)..(346): Homolog of NCBI NO: 15238957 NR Description: putative protein; protein id: At5g42420.1 thaliana] >gi|9759478|dbj|BAB10483.1|
  misc_feature (41)..(346): Homolog of NCBI NO: 33146838 NR Description: transporter-related-like [Oryza sativa (japonica
  misc_feature (5)..(47): Homolog of NCBI NO: 33146838 NR Description: transporter-related-like [Oryza sativa (japonica
  misc_feature (5)..(317): Homolog of NCBI NO: 30313364 NR Description: putative transmembrane protein [Oryza sativa]
  misc_feature (5)..(317): Homolog of NCBI NO: 15234794 NR Description: hypothetical protein; protein id: At4g09810.1
  misc_feature (5)..(317): Homolog of NCBI NO: 18399097 NR Description: expressed protein; protein id: At1g34020.1, by cDNA: 7642. [Arabidopsis thaliana] >gi|25354483|pir||A86464

SEQ ID NO: 92134 - protein, 328 aa, Arabidopsis thaliana; identical to SEQ ID NO: 42697
  peptide (1)..(328): Ceres Seq. ID no. 12708523
  misc_feature (1)..(328): Homolog of NCBI NO: 18411172 NR Description: expressed protein; protein id: At1g76670.1, by cDNA: gi_14532697, supported by cDNA: gi_16604379, supported cDNA: gi_18491194 [Arabidopsis thaliana] >gi|25354481|pir||A96795
  misc_feature (1)..(327): Homolog of NCBI NO: 18394949 NR Description: expressed protein; protein id: At1g21070.1, by cDNA: 108746. [Arabidopsis thaliana] >gi|25354485|pir||G86343
  misc_feature (1)..(327): Homolog of NCBI NO: 21536703 NR Description: unknown [Arabidopsis thaliana]
  misc_feature (17)..(327): Homolog of NCBI NO: 26450366 NR Description: unknown protein [Arabidopsis thaliana]
  misc_feature (1)..(327): Homolog of NCBI NO: 15238957 NR Description: putative protein; protein id: At5g42420.1 thaliana] >gi|9759478|dbj|BAB10483.1|
  misc_feature (22)..(327): Homolog of NCBI NO: 33146838 NR Description: transporter-related-like [Oryza sativa (japonica
  misc_feature (1)..(28): Homolog of NCBI NO: 33146838 NR Description: transporter-related-like [Oryza sativa (japonica
  misc_feature (1)..(298): Homolog of NCBI NO: 30313364 NR Description: putative transmembrane protein [Oryza sativa]
  misc_feature (1)..(298): Homolog of NCBI NO: 15234794 NR Description: hypothetical protein; protein id: At4g09810.1
  misc_feature (1)..(298): Homolog of NCBI NO: 18399097 NR Description: expressed protein; protein id: At1g34020.1, by cDNA: 7642. [Arabidopsis thaliana] >gi|25354483|pir||A86464

SEQ ID NO: 92135 - protein, 318 aa, Arabidopsis thaliana; identical to SEQ ID NO: 42698
  peptide (1)..(318): Ceres Seq. ID no. 12708524
  misc_feature (1)..(318): Homolog of NCBI NO: 18411172 NR Description: expressed protein; protein id: At1g76670.1, by cDNA: gi_14532697, supported by cDNA: gi_16604379, supported cDNA: gi_18491194 [Arabidopsis thaliana] >gi|25354481|pir||A96795
  misc_feature (1)..(317): Homolog of NCBI NO: 18394949 NR Description: expressed protein; protein id: At1g21070.1, by cDNA: 108746. [Arabidopsis thaliana] >gi|25354485|pir||G86343
  misc_feature (1)..(317): Homolog of NCBI NO: 21536703 NR Description: unknown [Arabidopsis thaliana]
  misc_feature (7)..(317): Homolog of NCBI NO: 26450366 NR Description: unknown protein [Arabidopsis thaliana]
  misc_feature (1)..(317): Homolog of NCBI NO: 15238957 NR Description: putative protein; protein id: At5g42420.1 thaliana] >gi|9759478|dbj|BAB10483.1|
  misc_feature (12)..(317): Homolog of NCBI NO: 33146838 NR Description: transporter-related-like [Oryza sativa (japonica
  misc_feature (1)..(18): Homolog of NCBI NO: 33146838 NR Description: transporter-related-like [Oryza sativa (japonica
  misc_feature (1)..(288): Homolog of NCBI NO: 30313364 NR Description: putative transmembrane protein [Oryza sativa]
  misc_feature (1)..(288): Homolog of NCBI NO: 15234794 NR Description: hypothetical protein; protein id: At4g09810.1
  misc_feature (1)..(288): Homolog of NCBI NO: 18399097 NR Description: expressed protein; protein id: At1g34020.1, by cDNA: 7642. [Arabidopsis thaliana] >gi|25354483|pir||A86464

SEQ ID NO: 92136 - DNA, 2346 bp, Arabidopsis thaliana; identical to SEQ ID NO: 88380
  misc_feature (1)..(2346): Ceres Seq. ID no. 12708600
  misc_feature: MA Experiment ID: 20000180 Result: Down-regulated in Transcription
  misc_feature: MA Experiment 20000180 PARAMETER Experiment Name: At_Germinating_Seeds_P Parameter: Age (hr) Value: 24 vs. 0
  misc_feature: MA Experiment 20000180 PARAMETER Experiment Name: At_Germinating_Seeds_P Parameter: Tissue Value: Germinating Seeds
  misc_feature: MA Experiment ID: 20000227 Result: Up-regulated in Transcription
  misc_feature: MA Experiment 20000227 PARAMETER Experiment Name: At_Root-Tips-vs-Tops_P Parameter: Tissue Value: Root Tips vs. Root Tops
  misc_feature: MA Experiment ID: 20000495 Result: Down-regulated in Transcription
  misc_feature: MA Experiment 20000495 PARAMETER Experiment Name: At_Guard_Cells_P Parameter: Harvest Date Value: 8/2/2002
  misc_feature: MA Experiment 20000495 PARAMETER Experiment Name: At_Guard_Cells_P Parameter: Organism Value: A. thaliana
  misc_feature: MA Experiment 20000495 PARAMETER Experiment Name: At_Guard_Cells_P Parameter: Tissue Value: Guard Cells vs. Leaves
  misc_feature: MA Experiment ID: 20001458 Result: Up-regulated in Transcription
  misc_feature: MA Experiment 20001458 PARAMETER Experiment Name: At_50mM_NH4NO3_L-to-H_P Parameter: Age (day) Value: Undefined
  misc_feature: MA Experiment 20001458 PARAMETER Experiment Name: At_50mM_NH4NO3_L-to-H_P Parameter: Organism Value: Undefined
  misc_feature: MA Experiment 20001458 PARAMETER Experiment Name: At_50mM_NH4NO3_L-to-H_P Parameter: Plant Line Value: Undefined
  misc_feature: MA Experiment 20001458 PARAMETER Experiment Name: At_50mM_NH4NO3_L-to-H_P Parameter: Timepoint (hr) Value: 2
  misc_feature: MA Experiment 20001458 PARAMETER Experiment Name: At_50mM_NH4NO3_L-to-H_P Parameter: Tissue Value: Siliques
  misc_feature: MA Experiment 20001458 PARAMETER Experiment Name: At_50mM_NH4NO3_L-to-H_P Parameter: Treatment Value: 50mM NH4NO3 vs. 100mM Manitol
  misc_feature: MA Experiment ID: 20001557 Result: Up-regulated in Transcription
  misc_feature: MA Experiment 20001557 PARAMETER Experiment Name: At_Drought_Soil_Dry_P Parameter: Age (day) Value: 27
  misc_feature: MA Experiment 20001557 PARAMETER Experiment Name: At_Drought_Soil_Dry_P Parameter: Organism Value: A. thaliana
  misc_feature: MA Experiment 20001557 PARAMETER Experiment Name: At_Drought_Soil_Dry_P Parameter: Plant Line Value: WS
  misc_feature: MA Experiment 20001557 PARAMETER Experiment Name: At_Drought_Soil_Dry_P Parameter: Post Timepoint (hr) Value: 3
  misc_feature: MA Experiment 20001557 PARAMETER Experiment Name: At_Drought_Soil_Dry_P Parameter: Post-Treatment Value: Re-Water vs. No Drought
  misc_feature: MA Experiment 20001557 PARAMETER Experiment Name: At_Drought_Soil_Dry_P Parameter: Timepoint (day) Value: 13
  misc_feature: MA Experiment 20001557 PARAMETER Experiment Name: At_Drought_Soil_Dry_P Parameter: Treatment Value: Drought vs. No Drought

SEQ ID NO: 92137 - protein, 781 aa, Arabidopsis thaliana; identical to SEQ ID NO: 88381
  peptide (1)..(781): Ceres Seq. ID no. 12708601
  misc_feature (1)..(189): Pfam Name: DEAD/DEAH box helicase Pfam Description: DEAD/DEAH box helicase
  misc_feature (1)..(455): Homolog of NCBI NO: 15223812 NR Description: DEAD/DEAH box RNA helicase, putative; protein id:
  misc_feature (1)..(778): Homolog of NCBI NO: 37573051 NR Description: putative ATP-dependent RNA-helicase [Oryza sativa
  misc_feature (1)..(710): Homolog of NCBI NO: 28076989 NR Description: RIKEN cDNA 2410015A15 [Mus musculus]
  misc_feature (1)..(710): Homolog of NCBI NO: 26327389 NR Description: unnamed protein product [Mus musculus]
  misc_feature (1)..(710): Homolog of NCBI NO: 27545287 NR Description: ATP-dependent RNA helicase homolog [Danio rerio]
  misc_feature (1)..(709): Homolog of NCBI NO: 26327531 NR Description: unnamed protein product [Mus musculus]
  misc_feature (186)..(761): Homolog of NCBI NO: 25148614 NR Description: DEAD/DEAH box RNA helicase family member elegans] >gi|14574507|gb|AAF60892.2| Hypothetical protein
  misc_feature (1)..(207): Homolog of NCBI NO: 25148614 NR Description: DEAD/DEAH box RNA helicase family member elegans] >gi|14574507|gb|AAF60892.2| Hypothetical protein
  misc_feature (739)..(779): Homolog of NCBI NO: 25148614 NR Description: DEAD/DEAH box RNA helicase family member elegans] >gi|14574507|gb|AAF60892.2| Hypothetical protein
  misc_feature (748)..(780): Homolog of NCBI NO: 25148614 NR Description: DEAD/DEAH box RNA helicase family member elegans] >gi|14574507|gb|AAF60892.2| Hypothetical protein

SEQ ID NO: 92138 - protein, 769 aa, Arabidopsis thaliana; identical to SEQ ID NO: 88382
  peptide (1)..(769): Ceres Seq. ID no. 12708602
  misc_feature (1)..(177): Pfam Name: DEAD/DEAH box helicase Pfam Description: DEAD/DEAH box helicase
  misc_feature (1)..(443): Homolog of NCBI NO: 15223812 NR Description: DEAD/DEAH box RNA helicase, putative; protein id:
  misc_feature (1)..(766): Homolog of NCBI NO: 37573051 NR Description: putative ATP-dependent RNA-helicase [Oryza sativa
  misc_feature (1)..(698): Homolog of NCBI NO: 28076989 NR Description: RIKEN cDNA 2410015A15 [Mus musculus]
  misc_feature (1)..(698): Homolog of NCBI NO: 26327389 NR Description: unnamed protein product [Mus musculus]
  misc_feature (1)..(698): Homolog of NCBI NO: 27545287 NR Description: ATP-dependent RNA helicase homolog [Danio rerio]
  misc_feature (1)..(697): Homolog of NCBI NO: 26327531 NR Description: unnamed protein product [Mus musculus]
  misc_feature (174)..(749): Homolog of NCBI NO: 25148614 NR Description: DEAD/DEAH box RNA helicase family member elegans] >gi|14574507|gb|AAF60892.2| Hypothetical protein
  misc_feature (1)..(195): Homolog of NCBI NO: 25148614 NR Description: DEAD/DEAH box RNA helicase family member elegans] >gi|14574507|gb|AAF60892.2| Hypothetical protein
  misc_feature (727)..(767): Homolog of NCBI NO: 25148614 NR Description: DEAD/DEAH box RNA helicase family member elegans] >gi|14574507|gb|AAF60892.2| Hypothetical protein
  misc_feature (736)..(768): Homolog of NCBI NO: 25148614 NR Description: DEAD/DEAH box RNA helicase family member elegans] >gi|14574507|gb|AAF60892.2| Hypothetical protein

SEQ ID NO: 92139 - protein, 754 aa, Arabidopsis thaliana; identical to SEQ ID NO: 88383
  peptide (1)..(754): Ceres Seq. ID no. 12708603
  misc_feature (1)..(162): Pfam Name: DEAD/DEAH box helicase Pfam Description: DEAD/DEAH box helicase
  misc_feature (1)..(428): Homolog of NCBI NO: 15223812 NR Description: DEAD/DEAH box RNA helicase, putative; protein id:
  misc_feature (1)..(751): Homolog of NCBI NO: 37573051 NR Description: putative ATP-dependent RNA-helicase [Oryza sativa
  misc_feature (1)..(683): Homolog of NCBI NO: 28076989 NR Description: RIKEN cDNA 2410015A15 [Mus musculus]
  misc_feature (1)..(683): Homolog of NCBI NO: 26327389 NR Description: unnamed protein product [Mus musculus]
  misc_feature (1)..(683): Homolog of NCBI NO: 27545287 NR Description: ATP-dependent RNA helicase homolog [Danio rerio]
  misc_feature (1)..(682): Homolog of NCBI NO: 26327531 NR Description: unnamed protein product [Mus musculus]
  misc_feature (159)..(734): Homolog of NCBI NO: 25148614 NR Description: DEAD/DEAH box RNA helicase family member elegans] >gi|14574507|gb|AAF60892.2| Hypothetical protein
  misc_feature (1)..(180): Homolog of NCBI NO: 25148614 NR Description: DEAD/DEAH box RNA helicase family member elegans] >gi|14574507|gb|AAF60892.2| Hypothetical protein
  misc_feature (712)..(752): Homolog of NCBI NO: 25148614 NR Description: DEAD/DEAH box RNA helicase family member elegans] >gi|14574507|gb|AAF60892.2| Hypothetical protein
  misc_feature (721)..(753): Homolog of NCBI NO: 25148614 NR Description: DEAD/DEAH box RNA helicase family member elegans] >gi|14574507|gb|AAF60892.2| Hypothetical protein

SEQ ID NO: 92140 - DNA, 1140 bp, Arabidopsis thaliana; identical to SEQ ID NO: 88384
  misc_feature (1)..(1140): Ceres Seq. ID no. 12708635
  misc_feature: MA Experiment ID: 20000307 Result: Down-regulated in Transcription
  misc_feature: MA Experiment 20000307 PARAMETER Experiment Name: At_Germinating_Seeds_Sub_P Parameter: Age (hr) Value: 24 vs. 0
  misc_feature: MA Experiment 20000307 PARAMETER Experiment Name: At_Germinating_Seeds_Sub_P Parameter: Organism Value: A. thaliana
  misc_feature: MA Experiment 20000307 PARAMETER Experiment Name: At_Germinating_Seeds_Sub_P Parameter: Plant Line Value: WS
  misc_feature: MA Experiment 20000307 PARAMETER Experiment Name: At_Germinating_Seeds_Sub_P Parameter: Tissue Value: Germinating Seeds
  misc_feature: MA Experiment ID: 20000315 Result: Down-regulated in Transcription
  misc_feature: MA Experiment 20000315 PARAMETER Experiment Name: At_14day_Shoots-Roots_Sub_P Parameter: Age (day) Value: 14
  misc_feature: MA Experiment 20000315 PARAMETER Experiment Name: At_14day_Shoots-Roots_Sub_P Parameter: Organism Value: A. thaliana
  misc_feature: MA Experiment 20000315 PARAMETER Experiment Name: At_14day_Shoots-Roots_Sub_P Parameter: Plant Line Value: WS
  misc_feature: MA Experiment 20000315 PARAMETER Experiment Name: At_14day_Shoots-Roots_Sub_P Parameter: Tissue Value: Shoots vs. Whole Plant
  misc_feature: MA Experiment ID: 20000328 Result: Down-regulated in Transcription
  misc_feature: MA Experiment 20000328 PARAMETER Experiment Name: At_42deg_Heat_Sub_P Parameter: Age (day) Value: 14
  misc_feature: MA Experiment 20000328 PARAMETER Experiment Name: At_42deg_Heat_Sub_P Parameter: Organism Value: A. thaliana
  misc_feature: MA Experiment 20000328 PARAMETER Experiment Name: At_42deg_Heat_Sub_P Parameter: Plant Line Value: WS
  misc_feature: MA Experiment 20000328 PARAMETER Experiment Name: At_42deg_Heat_Sub_P Parameter: Temperature (deg C) Value: 42 vs. 22
  misc_feature: MA Experiment 20000328 PARAMETER Experiment Name: At_42deg_Heat_Sub_P Parameter: Timepoint (hr) Value: 6
  misc_feature: MA Experiment 20000328 PARAMETER Experiment Name: At_42deg_Heat_Sub_P Parameter: Tissue Value: Aerial

SEQ ID NO: 92141 - protein, 379 aa, Arabidopsis thaliana; identical to SEQ ID NO: 73041
  peptide (1)..(379): Ceres Seq. ID no. 12708636
  misc_feature (271)..(304): Pfam Name: PPR repeat Pfam Description: PPR repeat
  misc_feature (1)..(379): Homolog of NCBI NO: 15223858 NR Description: hypothetical protein; protein id: At1g77170.1
  misc_feature (1)..(373): Homolog of NCBI NO: 7486979 NR Description: hypothetical protein T13K14.230 - Arabidopsis
  misc_feature (12)..(373): Homolog of NCBI NO: 8778758 NR Description: T30E16.32 [Arabidopsis thaliana]
  misc_feature (12)..(373): Homolog of NCBI NO: 25346319 NR Description: hypothetical protein F23H11.3 [imported] - thaliana >gi|5080805|gb|AAD39314.1|AC007258_3 Hypothetical
  misc_feature (12)..(373): Homolog of NCBI NO: 15218900 NR Description: hypothetical protein; protein id: At1g59720.1
  misc_feature (2)..(373): Homolog of NCBI NO: 15226299 NR Description: hypothetical protein; protein id: At2g01510.1
  misc_feature (4)..(368): Homolog of NCBI NO: 9279581 NR Description: emb|CAB66100.1~gene_id:MLN21.12~strong similarity
  misc_feature (4)..(368): Homolog of NCBI NO: 15231831 NR Description: hypothetical protein; protein id: At3g14330.1
  misc_feature (2)..(373): Homolog of NCBI NO: 15227067 NR Description: hypothetical protein; protein id: At2g02980.1
  misc_feature (4)..(373): Homolog of NCBI NO: 34394298 NR Description: putative pentatricopeptide (PPR)

SEQ ID NO: 92142 - protein, 360 aa, Arabidopsis thaliana; identical to SEQ ID NO: 73042
  peptide (1)..(360): Ceres Seq. ID no. 12708637
  misc_feature (252)..(285): Pfam Name: PPR repeat Pfam Description: PPR repeat
  misc_feature (1)..(360): Homolog of NCBI NO: 15223858 NR Description: hypothetical protein; protein id: At1g77170.1
  misc_feature (1)..(354): Homolog of NCBI NO: 7486979 NR Description: hypothetical protein T13K14.230 - Arabidopsis
  misc_feature (1)..(354): Homolog of NCBI NO: 8778758 NR Description: T30E16.32 [Arabidopsis thaliana]
  misc_feature (1)..(354): Homolog of NCBI NO: 25346319 NR Description: hypothetical protein F23H11.3 [imported] - thaliana >gi|5080805|gb|AAD39314.1|AC007258_3 Hypothetical
  misc_feature (1)..(354): Homolog of NCBI NO: 15218900 NR Description: hypothetical protein; protein id: At1g59720.1
  misc_feature (1)..(354): Homolog of NCBI NO: 15226299 NR Description: hypothetical protein; protein id: At2g01510.1
  misc_feature (1)..(349): Homolog of NCBI NO: 9279581 NR Description: emb|CAB66100.1~gene_id:MLN21.12~strong similarity
  misc_feature (1)..(349): Homolog of NCBI NO: 15231831 NR Description: hypothetical protein; protein id: At3g14330.1
  misc_feature (1)..(354): Homolog of NCBI NO: 15227067 NR Description: hypothetical protein; protein id: At2g02980.1
  misc_feature (1)..(354): Homolog of NCBI NO: 34394298 NR Description: putative pentatricopeptide (PPR)

SEQ ID NO: 92143 - protein, 263 aa, Arabidopsis thaliana; identical to SEQ ID NO: 88387
  peptide (1)..(263): Ceres Seq. ID no. 12708638
  misc_feature (155)..(188): Pfam Name: PPR repeat Pfam Description: PPR repeat
  misc_feature (1)..(263): Homolog of NCBI NO: 15223858 NR Description: hypothetical protein; protein id: At1g77170.1
  misc_feature (1)..(257): Homolog of NCBI NO: 7486979 NR Description: hypothetical protein T13K14.230 - Arabidopsis
  misc_feature (1)..(257): Homolog of NCBI NO: 8778758 NR Description: T30E16.32 [Arabidopsis thaliana]
  misc_feature (1)..(257): Homolog of NCBI NO: 25346319 NR Description: hypothetical protein F23H11.3 [imported] - thaliana >gi|5080805|gb|AAD39314.1|AC007258_3 Hypothetical
  misc_feature (1)..(257): Homolog of NCBI NO: 15218900 NR Description: hypothetical protein; protein id: At1g59720.1
  misc_feature (1)..(257): Homolog of NCBI NO: 15226299 NR Description: hypothetical protein; protein id: At2g01510.1
  misc_feature (1)..(252): Homolog of NCBI NO: 9279581 NR Description: emb|CAB66100.1~gene_id:MLN21.12~strong similarity
  misc_feature (1)..(252): Homolog of NCBI NO: 15231831 NR Description: hypothetical protein; protein id: At3g14330.1
  misc_feature (1)..(257): Homolog of NCBI NO: 15227067 NR Description: hypothetical protein; protein id: At2g02980.1
  misc_feature (1)..(257): Homolog of NCBI NO: 34394298 NR Description: putative pentatricopeptide (PPR)

SEQ ID NO: 92144 - DNA, 2262 bp, Arabidopsis thaliana; identical to SEQ ID NO: 88388
  misc_feature (1)..(2262): Ceres Seq. ID no. 12708641
  misc_feature: MA Experiment ID: 20000314 Result: Up-regulated in Transcription
  misc_feature: MA Experiment 20000314 PARAMETER Experiment Name: At_14day_Shoots-Roots_Sub_P Parameter: Age (day) Value: 14
  misc_feature: MA Experiment 20000314 PARAMETER Experiment Name: At_14day_Shoots-Roots_Sub_P Parameter: Organism Value: A. thaliana
  misc_feature: MA Experiment 20000314 PARAMETER Experiment Name: At_14day_Shoots-Roots_Sub_P Parameter: Plant Line Value: WS
  misc_feature: MA Experiment 20000314 PARAMETER Experiment Name: At_14day_Shoots-Roots_Sub_P Parameter: Tissue Value: Roots vs. Whole Plant
  misc_feature: MA Experiment ID: 20000348 Result: Up-regulated in Transcription
  misc_feature: MA Experiment 20000348 PARAMETER Experiment Name: At_100uM_ABA_Sub_P Parameter: Age (day) Value: 14
  misc_feature: MA Experiment 20000348 PARAMETER Experiment Name: At_100uM_ABA_Sub_P Parameter: Organism Value: A. thaliana
  misc_feature: MA Experiment 20000348 PARAMETER Experiment Name: At_100uM_ABA_Sub_P Parameter: Plant Line Value: WS
  misc_feature: MA Experiment 20000348 PARAMETER Experiment Name: At_100uM_ABA_Sub_P Parameter: Timepoint (hr) Value: 1
  misc_feature: MA Experiment 20000348 PARAMETER Experiment Name: At_100uM_ABA_Sub_P Parameter: Tissue Value: Aerial
  misc_feature: MA Experiment 20000348 PARAMETER Experiment Name: At_100uM_ABA_Sub_P Parameter: Treatment Value: 100uM ABA vs. No Treatment

SEQ ID NO: 92145 - protein, 753 aa, Arabidopsis thaliana; identical to SEQ ID NO: 88389
  peptide (1)..(753): Ceres Seq. ID no. 12708642
  misc_feature (18)..(152): Pfam Name: Universal stress protein family Pfam Description: Universal stress protein family
  misc_feature (9)..(753): Homolog of NCBI NO: 22329713 NR Description: hypothetical protein; protein id: At1g21590.1, by cDNA: gi_18086337 [Arabidopsis thaliana] At1g21590/F24J8_9 [Arabidopsis thaliana]
  misc_feature (9)..(406): Homolog of NCBI NO: 25518708 NR Description: hypothetical protein F24J8.18 - Arabidopsis >gi|9454581|gb|AAF87904.1|AC015447_14 Similar to protein kinases
  misc_feature (464)..(753): Homolog of NCBI NO: 25518708 NR Description: hypothetical protein F24J8.18 - Arabidopsis >gi|9454581|gb|AAF87904.1|AC015447_14 Similar to protein kinases
  misc_feature (241)..(753): Homolog of NCBI NO: 15237563 NR Description: putative protein; protein id: At5g63940.1, by cDNA: gi_20260317 [Arabidopsis thaliana] contains similarity to protein kinase~gene_id:MBM17.4
  misc_feature (3)..(162): Homolog of NCBI NO: 15237563 NR Description: putative protein; protein id: At5g63940.1, by cDNA: gi_20260317 [Arabidopsis thaliana] contains similarity to protein kinase~gene_id:MBM17.4
  misc_feature (277)..(753): Homolog of NCBI NO: 28376688 NR Description: putative serine/threonine kinase [Oryza sativa
  misc_feature (18)..(349): Homolog of NCBI NO: 28376688 NR Description: putative serine/threonine kinase [Oryza sativa
  misc_feature (390)..(734): Homolog of NCBI NO: 15227291 NR Description: putative protein kinase; protein id: At2g16750.1
  misc_feature (390)..(734): Homolog of NCBI NO: 15236248 NR Description: protein kinase - like; protein id: At4g35030.1
  misc_feature (347)..(681): Homolog of NCBI NO: 40253745 NR Description: SERK1 protein-like [Oryza sativa (japonica

SEQ ID NO: 92146 - protein, 481 aa, Arabidopsis thaliana; identical to SEQ ID NO: 88390
  peptide (1)..(481): Ceres Seq. ID no. 12708643
  misc_feature (1)..(481): Homolog of NCBI NO: 22329713 NR Description: hypothetical protein; protein id: At1g21590.1, by cDNA: gi_18086337 [Arabidopsis thaliana] At1g21590/F24J8_9 [Arabidopsis thaliana]
  misc_feature (1)..(134): Homolog of NCBI NO: 25518708 NR Description: hypothetical protein F24J8.18 - Arabidopsis >gi|9454581|gb|AAF87904.1|AC015447_14 Similar to protein kinases
  misc_feature (192)..(481): Homolog of NCBI NO: 25518708 NR Description: hypothetical protein F24J8.18 - Arabidopsis >gi|9454581|gb|AAF87904.1|AC015447_14 Similar to protein kinases
  misc_feature (1)..(481): Homolog of NCBI NO: 15237563 NR Description: putative protein; protein id: At5g63940.1, by cDNA: gi_20260317 [Arabidopsis thaliana] contains similarity to protein kinase~gene_id:MBM17.4
  misc_feature (5)..(481): Homolog of NCBI NO: 28376688 NR Description: putative serine/threonine kinase [Oryza sativa
  misc_feature (1)..(77): Homolog of NCBI NO: 28376688 NR Description: putative serine/threonine kinase [Oryza sativa
  misc_feature (118)..(462): Homolog of NCBI NO: 15227291 NR Description: putative protein kinase; protein id: At2g16750.1
  misc_feature (118)..(462): Homolog of NCBI NO: 15236248 NR Description: protein kinase - like; protein id: At4g35030.1
  misc_feature (75)..(409): Homolog of NCBI NO: 40253745 NR Description: SERK1 protein-like [Oryza sativa (japonica
  misc_feature (85)..(453): Homolog of NCBI NO: 15240345 NR Description: protein kinase - like protein; protein id: supported by cDNA: 105458. [Arabidopsis thaliana]

SEQ ID NO: 92147 - protein, 464 aa, Arabidopsis thaliana; identical to SEQ ID NO: 88391
  peptide (1)..(464): Ceres Seq. ID no. 12708644
  misc_feature (1)..(464): Homolog of NCBI NO: 22329713 NR Description: hypothetical protein; protein id: At1g21590.1, by cDNA: gi_18086337 [Arabidopsis thaliana] At1g21590/F24J8_9 [Arabidopsis thaliana]
  misc_feature (1)..(117): Homolog of NCBI NO: 25518708 NR Description: hypothetical protein F24J8.18 - Arabidopsis >gi|9454581|gb|AAF87904.1|AC015447_14 Similar to protein kinases
  misc_feature (175)..(464): Homolog of NCBI NO: 25518708 NR Description: hypothetical protein F24J8.18 - Arabidopsis >gi|9454581|gb|AAF87904.1|AC015447_14 Similar to protein kinases
  misc_feature (1)..(464): Homolog of NCBI NO: 15237563 NR Description: putative protein; protein id: At5g63940.1, by cDNA: gi_20260317 [Arabidopsis thaliana] contains similarity to protein kinase~gene_id:MBM17.4
  misc_feature (1)..(464): Homolog of NCBI NO: 28376688 NR Description: putative serine/threonine kinase [Oryza sativa
  misc_feature (1)..(60): Homolog of NCBI NO: 28376688 NR Description: putative serine/threonine kinase [Oryza sativa
  misc_feature (101)..(445): Homolog of NCBI NO: 15227291 NR Description: putative protein kinase; protein id: At2g16750.1
  misc_feature (101)..(445): Homolog of NCBI NO: 15236248 NR Description: protein kinase - like; protein id: At4g35030.1
  misc_feature (58)..(392): Homolog of NCBI NO: 40253745 NR Description: SERK1 protein-like [Oryza sativa (japonica
  misc_feature (68)..(436): Homolog of NCBI NO: 15240345 NR Description: protein kinase - like protein; protein id: supported by cDNA: 105458. [Arabidopsis thaliana]

SEQ ID NO: 92148 - DNA, 2157 bp, Arabidopsis thaliana; identical to SEQ ID NO: 88392
  misc_feature (1)..(2157): Ceres Seq. ID no. 12708652
  misc_feature: MA Experiment ID: 20000180 Result: Down-regulated in Transcription
  misc_feature: MA Experiment 20000180 PARAMETER Experiment Name: At_Germinating_Seeds_P Parameter: Age (hr) Value: 24 vs. 0
  misc_feature: MA Experiment 20000180 PARAMETER Experiment Name: At_Germinating_Seeds_P Parameter: Tissue Value: Germinating Seeds

SEQ ID NO: 92149 - protein, 718 aa, Arabidopsis thaliana; identical to SEQ ID NO: 88393
  peptide (1)..(718): Ceres Seq. ID no. 12708653
  misc_feature (116)..(718): Homolog of NCBI NO: 15223894 NR Description: unknown protein; protein id: At1g77310.1
  misc_feature (1)..(517): Homolog of NCBI NO: 7486999 NR Description: hypothetical protein T14N5.16 - Arabidopsis >gi|3540209|gb|AAC34359.1| Hypothetical protein [Arabidopsis
  misc_feature (1)..(413): Homolog of NCBI NO: 15223894 NR Description: unknown protein; protein id: At1g77310.1
  misc_feature (12)..(718): Homolog of NCBI NO: 25361037 NR Description: F8K7.2 protein - Arabidopsis thaliana ESTs gb|T42839 and gb|AA395192 come from this gene. [Arabidopsis
  misc_feature (519)..(718): Homolog of NCBI NO: 4106388 NR Description: unknown [Arabidopsis thaliana]
  misc_feature (217)..(718): Homolog of NCBI NO: 22329715 NR Description: unknown protein; protein id: At1g21610.1, by cDNA: gi_19699099 [Arabidopsis thaliana] At1g21610/F24J8_11 [Arabidopsis thaliana]
  misc_feature (344)..(668): Homolog of NCBI NO: 20161447 NR Description: B1065E10.22 [Oryza sativa (japonica
  misc_feature (31)..(285): Homolog of NCBI NO: 20161447 NR Description: B1065E10.22 [Oryza sativa (japonica
  misc_feature (12)..(342): Homolog of NCBI NO: 22329715 NR Description: unknown protein; protein id: At1g21610.1, by cDNA: gi_19699099 [Arabidopsis thaliana] At1g21610/F24J8_11 [Arabidopsis thaliana]
  misc_feature (347)..(448): Homolog of NCBI NO: 16506638 NR Description: wound-responsive protein 14.05 [Castanea sativa]

SEQ ID NO: 92150 - protein, 667 aa, Arabidopsis thaliana; identical to SEQ ID NO: 88394
  peptide (1)..(667): Ceres Seq. ID no. 12708654
  misc_feature (65)..(667): Homolog of NCBI NO: 15223894 NR Description: unknown protein; protein id: At1g77310.1
  misc_feature (1)..(466): Homolog of NCBI NO: 7486999 NR Description: hypothetical protein T14N5.16 - Arabidopsis >gi|3540209|gb|AAC34359.1| Hypothetical protein [Arabidopsis
  misc_feature (1)..(362): Homolog of NCBI NO: 15223894 NR Description: unknown protein; protein id: At1g77310.1
  misc_feature (1)..(667): Homolog of NCBI NO: 25361037 NR Description: F8K7.2 protein - Arabidopsis thaliana ESTs gb|T42839 and gb|AA395192 come from this gene. [Arabidopsis
  misc_feature (468)..(667): Homolog of NCBI NO: 4106388 NR Description: unknown [Arabidopsis thaliana]
  misc_feature (166)..(667): Homolog of NCBI NO: 22329715 NR Description: unknown protein; protein id: At1g21610.1, by cDNA: gi_19699099 [Arabidopsis thaliana] At1g21610/F24J8_11 [Arabidopsis thaliana]
  misc_feature (293)..(617): Homolog of NCBI NO: 20161447 NR Description: B1065E10.22 [Oryza sativa (japonica
  misc_feature (1)..(234): Homolog of NCBI NO: 20161447 NR Description: B1065E10.22 [Oryza sativa (japonica
  misc_feature (1)..(291): Homolog of NCBI NO: 22329715 NR Description: unknown protein; protein id: At1g21610.1, by cDNA: gi_19699099 [Arabidopsis thaliana] At1g21610/F24J8_11 [Arabidopsis thaliana]
  misc_feature (296)..(397): Homolog of NCBI NO: 16506638 NR Description: wound-responsive protein 14.05 [Castanea sativa]

SEQ ID NO: 92151 - protein, 628 aa, Arabidopsis thaliana; identical to SEQ ID NO: 88395
  peptide (1)..(628): Ceres Seq. ID no. 12708655
  misc_feature (26)..(628): Homolog of NCBI NO: 15223894 NR Description: unknown protein; protein id: At1g77310.1
  misc_feature (1)..(427): Homolog of NCBI NO: 7486999 NR Description: hypothetical protein T14N5.16 - Arabidopsis >gi|3540209|gb|AAC34359.1| Hypothetical protein [Arabidopsis
  misc_feature (1)..(323): Homolog of NCBI NO: 15223894 NR Description: unknown protein; protein id: At1g77310.1
  misc_feature (1)..(628): Homolog of NCBI NO: 25361037 NR Description: F8K7.2 protein - Arabidopsis thaliana ESTs gb|T42839 and gb|AA395192 come from this gene. [Arabidopsis
  misc_feature (429)..(628): Homolog of NCBI NO: 4106388 NR Description: unknown [Arabidopsis thaliana]
  misc_feature (127)..(628): Homolog of NCBI NO: 22329715 NR Description: unknown protein; protein id: At1g21610.1, by cDNA: gi_19699099 [Arabidopsis thaliana] At1g21610/F24J8_11 [Arabidopsis thaliana]
  misc_feature (254)..(578): Homolog of NCBI NO: 20161447 NR Description: B1065E10.22 [Oryza sativa (japonica
  misc_feature (1)..(195): Homolog of NCBI NO: 20161447 NR Description: B1065E10.22 [Oryza sativa (japonica
  misc_feature (1)..(252): Homolog of NCBI NO: 22329715 NR Description: unknown protein; protein id: At1g21610.1, by cDNA: gi_19699099 [Arabidopsis thaliana] At1g21610/F24J8_11 [Arabidopsis thaliana]
  misc_feature (257)..(358): Homolog of NCBI NO: 16506638 NR Description: wound-responsive protein 14.05 [Castanea sativa]

SEQ ID NO: 92152 - DNA, 1237 bp, Arabidopsis thaliana; identical to SEQ ID NO: 88396
  misc_feature (1)..(1237): Ceres Seq. ID no. 12708664
  misc_feature: MA Experiment ID: 108434 Result: Up-regulated in Transcription
  misc_feature: MA Experiment 108434 PARAMETER Experiment Name: At_Root_Tips_cDNA_P Parameter: Tissue Value: Root Tips
  misc_feature: MA Experiment ID: 108461 Result: Up-regulated in Transcription
  misc_feature: MA Experiment 108461 PARAMETER Experiment Name: At_Germinating_Seeds_cDNA_P Parameter: Age (day) Value: 1 vs. 0
  misc_feature: MA Experiment 108461 PARAMETER Experiment Name: At_Germinating_Seeds_cDNA_P Parameter: Tissue Value: Germinating Seeds
  misc_feature: MA Experiment ID: 108462 Result: Up-regulated in Transcription
  misc_feature: MA Experiment 108462 PARAMETER Experiment Name: At_Germinating_Seeds_cDNA_P Parameter: Age (day) Value: 2 vs. 0
  misc_feature: MA Experiment 108462 PARAMETER Experiment Name: At_Germinating_Seeds_cDNA_P Parameter: Tissue Value: Germinating Seeds
  misc_feature: MA Experiment ID: 108463 Result: Up-regulated in Transcription
  misc_feature: MA Experiment 108463 PARAMETER Experiment Name: At_Germinating_Seeds_cDNA_P Parameter: Age (day) Value: 3 vs. 0
  misc_feature: MA Experiment 108463 PARAMETER Experiment Name: At_Germinating_Seeds_cDNA_P Parameter: Tissue Value: Germinating Seeds
  misc_feature: MA Experiment ID: 108464 Result: Up-regulated in Transcription
  misc_feature: MA Experiment 108464 PARAMETER Experiment Name: At_Germinating_Seeds_cDNA_P Parameter: Age (day) Value: 4 vs. 0
  misc_feature: MA Experiment 108464 PARAMETER Experiment Name: At_Germinating_Seeds_cDNA_P Parameter: Tissue Value: Germinating Seeds
  misc_feature: MA Experiment ID: 108576 Result: Up-regulated in Transcription
  misc_feature: MA Experiment 108576 PARAMETER Experiment Name: At_42deg_Heat_cDNA_P Parameter: Temperature (deg C) Value: 42 vs. 22
  misc_feature: MA Experiment 108576 PARAMETER Experiment Name: At_42deg_Heat_cDNA_P Parameter: Timepoint (hr) Value: 1
  misc_feature: MA Experiment 108576 PARAMETER Experiment Name: At_42deg_Heat_cDNA_P Parameter: Tissue Value: Aerial
  misc_feature: MA Experiment ID: 20000030 Result: Down-regulated in Transcription
  misc_feature: MA Experiment 20000030 PARAMETER Experiment Name: At_CS6630_Roots_cDNA_P Parameter: Plant Line Value: CS6630 vs. WS
  misc_feature: MA Experiment 20000030 PARAMETER Experiment Name: At_CS6630_Roots_cDNA_P Parameter: Tissue Value: Roots
  misc_feature: MA Experiment ID: 20000179 Result: Up-regulated in Transcription
  misc_feature: MA Experiment 20000179 PARAMETER Experiment Name: At_Germinating_Seeds_P Parameter: Age (hr) Value: 6 vs. 0
  misc_feature: MA Experiment 20000179 PARAMETER Experiment Name: At_Germinating_Seeds_P Parameter: Tissue Value: Germinating Seeds
  misc_feature: MA Experiment ID: 20000180 Result: Up-regulated in Transcription
  misc_feature: MA Experiment 20000180 PARAMETER Experiment Name: At_Germinating_Seeds_P Parameter: Age (hr) Value: 24 vs. 0
  misc_feature: MA Experiment 20000180 PARAMETER Experiment Name: At_Germinating_Seeds_P Parameter: Tissue Value: Germinating Seeds
  misc_feature: MA Experiment ID: 20000185 Result: Up-regulated in Transcription
  misc_feature: MA Experiment 20000185 PARAMETER Experiment Name: At_Roots__P Parameter: Age (day) Value: 7 vs. 21
  misc_feature: MA Experiment 20000185 PARAMETER Experiment Name: At_Roots__P Parameter: Organism Value: A. thaliana
  misc_feature: MA Experiment 20000185 PARAMETER Experiment Name: At_Roots__P Parameter: Tissue Value: Roots vs. Whole Plant
  misc_feature: MA Experiment ID: 20000224 Result: Down-regulated in Transcription
  misc_feature: MA Experiment ID: 20000227 Result: Up-regulated in Transcription
  misc_feature: MA Experiment 20000227 PARAMETER Experiment Name: At_Root-Tips-vs-Tops_P Parameter: Tissue Value: Root Tips vs. Root Tops
  misc_feature: MA Experiment ID: 20000264 Result: Down-regulated in Transcription
  misc_feature: MA Experiment 20000264 PARAMETER Experiment Name: At_Open_Flower_P Parameter: Age (day) Value: 21
  misc_feature: MA Experiment 20000264 PARAMETER Experiment Name: At_Open_Flower_P Parameter: Plant Line Value: WS
  misc_feature: MA Experiment 20000264 PARAMETER Experiment Name: At_Open_Flower_P Parameter: Tissue Value: Open Flower vs. Whole Plant
  misc_feature: MA Experiment ID: 20000265 Result: Down-regulated in Transcription
  misc_feature: MA Experiment 20000265 PARAMETER Experiment Name: At_Open_Flower_P Parameter: Age (day) Value: 21
  misc_feature: MA Experiment 20000265 PARAMETER Experiment Name: At_Open_Flower_P Parameter: Plant Line Value: WS
  misc_feature: MA Experiment 20000265 PARAMETER Experiment Name: At_Open_Flower_P Parameter: Tissue Value: Closed Flower vs. Whole Plant
  misc_feature: MA Experiment ID: 20000267 Result: Down-regulated in Transcription
  misc_feature: MA Experiment 20000267 PARAMETER Experiment Name: At_Drought_P Parameter: Age (day) Value: 7
  misc_feature: MA Experiment 20000267 PARAMETER Experiment Name: At_Drought_P Parameter: Organism Value: A. thaliana
  misc_feature: MA Experiment 20000267 PARAMETER Experiment Name: At_Drought_P Parameter: Plant Line Value: WS
  misc_feature: MA Experiment 20000267 PARAMETER Experiment Name: At_Drought_P Parameter: Timepoint (hr) Value: 6
  misc_feature: MA Experiment 20000267 PARAMETER Experiment Name: At_Drought_P Parameter: Tissue Value: Whole Plant
  misc_feature: MA Experiment 20000267 PARAMETER Experiment Name: At_Drought_P Parameter: Treatment Value: Drought vs. No Drought
  misc_feature: MA Experiment ID: 20000436 Result: Down-regulated in Transcription
  misc_feature: MA Experiment 20000436 PARAMETER Experiment Name: At_Drought_P Parameter: Age (day) Value: 7
  misc_feature: MA Experiment 20000436 PARAMETER Experiment Name: At_Drought_P Parameter: Organism Value: A. thaliana
  misc_feature: MA Experiment 20000436 PARAMETER Experiment Name: At_Drought_P Parameter: Plant Line Value: WS
  misc_feature: MA Experiment 20000436 PARAMETER Experiment Name: At_Drought_P Parameter: Timepoint (hr) Value: 12
  misc_feature: MA Experiment 20000436 PARAMETER Experiment Name: At_Drought_P Parameter: Tissue Value: Whole Plant
  misc_feature: MA Experiment 20000436 PARAMETER Experiment Name: At_Drought_P Parameter: Treatment Value: Drought vs. No Drought
  misc_feature: MA Experiment ID: 20000437 Result: Down-regulated in Transcription
  misc_feature: MA Experiment 20000437 PARAMETER Experiment Name: At_Drought_P Parameter: Age (day) Value: 8
  misc_feature: MA Experiment 20000437 PARAMETER Experiment Name: At_Drought_P Parameter: Organism Value: A. thaliana
  misc_feature: MA Experiment 20000437 PARAMETER Experiment Name: At_Drought_P Parameter: Plant Line Value: WS
  misc_feature: MA Experiment 20000437 PARAMETER Experiment Name: At_Drought_P Parameter: Timepoint (hr) Value: 24
  misc_feature: MA Experiment 20000437 PARAMETER Experiment Name: At_Drought_P Parameter: Tissue Value: Whole Plant
  misc_feature: MA Experiment 20000437 PARAMETER Experiment Name: At_Drought_P Parameter: Treatment Value: Drought vs. No Drought
  misc_feature: MA Experiment ID: 20000439 Result: Up-regulated in Transcription
  misc_feature: MA Experiment 20000439 PARAMETER Experiment Name: At_Roots__P Parameter: Age (day) Value: 14 vs. 21
  misc_feature: MA Experiment 20000439 PARAMETER Experiment Name: At_Roots__P Parameter: Organism Value: A. thaliana
  misc_feature: MA Experiment 20000439 PARAMETER Experiment Name: At_Roots__P Parameter: Tissue Value: Roots vs. Whole Plant
  misc_feature: MA Experiment ID: 20000451 Result: Down-regulated in Transcription
  misc_feature: MA Experiment 20000451 PARAMETER Experiment Name: At_CS6879_Shoots-Roots_P Parameter: Age (day) Value: 14
  misc_feature: MA Experiment 20000451 PARAMETER Experiment Name: At_CS6879_Shoots-Roots_P Parameter: Organism Value: A. thaliana
  misc_feature: MA Experiment 20000451 PARAMETER Experiment Name: At_CS6879_Shoots-Roots_P Parameter: Plant Line Value: CS6879 vs. WS
  misc_feature: MA Experiment 20000451 PARAMETER Experiment Name: At_CS6879_Shoots-Roots_P Parameter: Tissue Value: Roots
  misc_feature: MA Experiment ID: 20000573 Result: Down-regulated in Transcription
  misc_feature: MA Experiment 20000573 PARAMETER Experiment Name: At_100uM_ABA_Mutants__P Parameter: Organism Value: A. thaliana
  misc_feature: MA Experiment 20000573 PARAMETER Experiment Name: At_100uM_ABA_Mutants__P Parameter: Plant Line Value: CS22 vs. Ler wt
  misc_feature: MA Experiment 20000573 PARAMETER Experiment Name: At_100uM_ABA_Mutants__P Parameter: Timepoint (hr) Value: N/A
  misc_feature: MA Experiment 20000573 PARAMETER Experiment Name: At_100uM_ABA_Mutants__P Parameter: Tissue Value: Whole Plant
  misc_feature: MA Experiment 20000573 PARAMETER Experiment Name: At_100uM_ABA_Mutants__P Parameter: Treatment Value: None
  misc_feature: MA Experiment ID: 20000794 Result: Down-regulated in Transcription
  misc_feature: MA Experiment 20000794 PARAMETER Experiment Name: At_Petals_P Parameter: Age (day) Value: 23-25 days
  misc_feature: MA Experiment 20000794 PARAMETER Experiment Name: At_Petals_P Parameter: Plant Line Value: WS
  misc_feature: MA Experiment 20000794 PARAMETER Experiment Name: At_Petals_P Parameter: Tissue Value: Petals vs. Whole plant
  misc_feature: MA Experiment ID: 20001247 Result: Down-regulated in Transcription
  misc_feature: MA Experiment 20001247 PARAMETER Experiment Name: At_Far-red-induction_P Parameter: Age (day) Value: 7
  misc_feature: MA Experiment 20001247 PARAMETER Experiment Name: At_Far-red-induction_P Parameter: Light Value: Far-red vs. White
  misc_feature: MA Experiment 20001247 PARAMETER Experiment Name: At_Far-red-induction_P Parameter: Organism Value: A. thaliana
  misc_feature: MA Experiment 20001247 PARAMETER Experiment Name: At_Far-red-induction_P Parameter: Plant Line Value: Columbia
  misc_feature: MA Experiment 20001247 PARAMETER Experiment Name: At_Far-red-induction_P Parameter: Timepoint (hr) Value: 1
  misc_feature: MA Experiment 20001247 PARAMETER Experiment Name: At_Far-red-induction_P Parameter: Tissue Value: Whole Plant
  misc_feature: MA Experiment ID: 20001450 Result: Down-regulated in Transcription
  misc_feature: MA Experiment 20001450 PARAMETER Experiment Name: At_Far-red-induction_P Parameter: Age (day) Value: 7
  misc_feature: MA Experiment 20001450 PARAMETER Experiment Name: At_Far-red-induction_P Parameter: Light Value: Far-red vs. White
  misc_feature: MA Experiment 20001450 PARAMETER Experiment Name: At_Far-red-induction_P Parameter: Organism Value: A. thaliana
  misc_feature: MA Experiment 20001450 PARAMETER Experiment Name: At_Far-red-induction_P Parameter: Plant Line Value: Columbia
  misc_feature: MA Experiment 20001450 PARAMETER Experiment Name: At_Far-red-induction_P Parameter: Timepoint (hr) Value: 8
  misc_feature: MA Experiment 20001450 PARAMETER Experiment Name: At_Far-red-induction_P Parameter: Tissue Value: Whole Plant

SEQ ID NO: 92153 - protein, 307 aa, Arabidopsis thaliana; identical to SEQ ID NO: 88397
  peptide (1)..(307): Ceres Seq. ID no. 12708665
  misc_feature (156)..(256): Pfam Name: 2OG-Fe(II) oxygenase superfamily Pfam Description: 2OG-Fe(II) oxygenase superfamily
  misc_feature (1)..(307): Homolog of NCBI NO: 18411485 NR Description: 1-aminocyclopropane-1-carboxylate oxidase, protein id: At1g77330.1, supported by cDNA: 269582. [Arabidopsis
  misc_feature (1)..(307): Homolog of NCBI NO: 21555054 NR Description: 1-aminocyclopropane-1-carboxylate oxidase,
  misc_feature (1)..(307): Homolog of NCBI NO: 25285689 NR Description: hypothetical protein F2P24.4 [imported] -
  misc_feature (1)..(307): Homolog of NCBI NO: 28949891 NR Description: 1-aminocyclopropane-1-carboxylic acid oxidase
  misc_feature (1)..(307): Homolog of NCBI NO: 27371996 NR Description: 1-aminocyclopropane-1-carboxylic acid oxidase
  misc_feature (1)..(307): Homolog of NCBI NO: 12001828 NR Description: 1-aminocyclopropane-1-carboxylate oxidase; ACC
  misc_feature (1)..(307): Homolog of NCBI NO: 25452792 NR Description: 1-aminocyclopropane-1-carboxylate oxidase (ACC
  misc_feature (1)..(306): Homolog of NCBI NO: 7433217 NR Description: 1-aminocyclopropane-1-carboxylate oxidase (EC
  misc_feature (1)..(306): Homolog of NCBI NO: 15220770 NR Description: ACC oxidase, putative; protein id: At1g62380.1, by cDNA: gi_15028038, supported by cDNA: gi_17065217, supported
  misc_feature (1)..(306): Homolog of NCBI NO: 25285704 NR Description: 1-aminocyclopropane-1-carboxylate oxidase (EC

SEQ ID NO: 92154 - protein, 196 aa, Arabidopsis thaliana; identical to SEQ ID NO: 88398
  peptide (1)..(196): Ceres Seq. ID no. 12708666
  misc_feature (45)..(145): Pfam Name: 2OG-Fe(II) oxygenase superfamily Pfam Description: 2OG-Fe(II) oxygenase superfamily
  misc_feature (1)..(196): Homolog of NCBI NO: 18411485 NR Description: 1-aminocyclopropane-1-carboxylate oxidase, protein id: At1g77330.1, supported by cDNA: 269582. [Arabidopsis
  misc_feature (1)..(196): Homolog of NCBI NO: 21555054 NR Description: 1-aminocyclopropane-1-carboxylate oxidase,
  misc_feature (1)..(196): Homolog of NCBI NO: 25285689 NR Description: hypothetical protein F2P24.4 [imported] -
  misc_feature (1)..(196): Homolog of NCBI NO: 28949891 NR Description: 1-aminocyclopropane-1-carboxylic acid oxidase
  misc_feature (1)..(196): Homolog of NCBI NO: 27371996 NR Description: 1-aminocyclopropane-1-carboxylic acid oxidase
  misc_feature (1)..(196): Homolog of NCBI NO: 12001828 NR Description: 1-aminocyclopropane-1-carboxylate oxidase; ACC
  misc_feature (1)..(196): Homolog of NCBI NO: 25452792 NR Description: 1-aminocyclopropane-1-carboxylate oxidase (ACC
  misc_feature (1)..(195): Homolog of NCBI NO: 7433217 NR Description: 1-aminocyclopropane-1-carboxylate oxidase (EC
  misc_feature (1)..(195): Homolog of NCBI NO: 15220770 NR Description: ACC oxidase, putative; protein id: At1g62380.1, by cDNA: gi_15028038, supported by cDNA: gi_17065217, supported
  misc_feature (1)..(195): Homolog of NCBI NO: 25285704 NR Description: 1-aminocyclopropane-1-carboxylate oxidase (EC

SEQ ID NO: 92155 - protein, 182 aa, Arabidopsis thaliana; identical to SEQ ID NO: 88399
  peptide (1)..(182): Ceres Seq. ID no. 12708667
  misc_feature (31)..(131): Pfam Name: 2OG-Fe(II) oxygenase superfamily Pfam Description: 2OG-Fe(II) oxygenase superfamily
  misc_feature (1)..(182): Homolog of NCBI NO: 18411485 NR Description: 1-aminocyclopropane-1-carboxylate oxidase, protein id: At1g77330.1, supported by cDNA: 269582. [Arabidopsis
  misc_feature (1)..(182): Homolog of NCBI NO: 21555054 NR Description: 1-aminocyclopropane-1-carboxylate oxidase,
  misc_feature (1)..(182): Homolog of NCBI NO: 25285689 NR Description: hypothetical protein F2P24.4 [imported] -
  misc_feature (1)..(182): Homolog of NCBI NO: 28949891 NR Description: 1-aminocyclopropane-1-carboxylic acid oxidase
  misc_feature (1)..(182): Homolog of NCBI NO: 27371996 NR Description: 1-aminocyclopropane-1-carboxylic acid oxidase
  misc_feature (1)..(182): Homolog of NCBI NO: 12001828 NR Description: 1-aminocyclopropane-1-carboxylate oxidase; ACC
  misc_feature (1)..(182): Homolog of NCBI NO: 25452792 NR Description: 1-aminocyclopropane-1-carboxylate oxidase (ACC
  misc_feature (1)..(181): Homolog of NCBI NO: 7433217 NR Description: 1-aminocyclopropane-1-carboxylate oxidase (EC
  misc_feature (1)..(181): Homolog of NCBI NO: 15220770 NR Description: ACC oxidase, putative; protein id: At1g62380.1, by cDNA: gi_15028038, supported by cDNA: gi_17065217, supported
  misc_feature (1)..(181): Homolog of NCBI NO: 25285704 NR Description: 1-aminocyclopropane-1-carboxylate oxidase (EC

SEQ ID NO: 92156 - DNA, 1092 bp, Arabidopsis thaliana; identical to SEQ ID NO: 88400
  misc_feature (1)..(1092): Ceres Seq. ID no. 12708743
  misc_feature: MA Experiment ID: 20000184 Result: Down-regulated in Transcription
  misc_feature: MA Experiment 20000184 PARAMETER Experiment Name: At_Shoots__P Parameter: Age (day) Value: 7
  misc_feature: MA Experiment 20000184 PARAMETER Experiment Name: At_Shoots__P Parameter: Tissue Value: Shoots vs. Whole Plant
  misc_feature: MA Experiment ID: 20001557 Result: Down-regulated in Transcription
  misc_feature: MA Experiment 20001557 PARAMETER Experiment Name: At_Drought_Soil_Dry_P Parameter: Age (day) Value: 27
  misc_feature: MA Experiment 20001557 PARAMETER Experiment Name: At_Drought_Soil_Dry_P Parameter: Organism Value: A. thaliana
  misc_feature: MA Experiment 20001557 PARAMETER Experiment Name: At_Drought_Soil_Dry_P Parameter: Plant Line Value: WS
  misc_feature: MA Experiment 20001557 PARAMETER Experiment Name: At_Drought_Soil_Dry_P Parameter: Post Timepoint (hr) Value: 3
  misc_feature: MA Experiment 20001557 PARAMETER Experiment Name: At_Drought_Soil_Dry_P Parameter: Post-Treatment Value: Re-Water vs. No Drought
  misc_feature: MA Experiment 20001557 PARAMETER Experiment Name: At_Drought_Soil_Dry_P Parameter: Timepoint (day) Value: 13
  misc_feature: MA Experiment 20001557 PARAMETER Experiment Name: At_Drought_Soil_Dry_P Parameter: Treatment Value: Drought vs. No Drought

SEQ ID NO: 92157 - protein, 363 aa, Arabidopsis thaliana; identical to SEQ ID NO: 88401
  peptide (1)..(363): Ceres Seq. ID no. 12708744
  misc_feature (1)..(218): Homolog of NCBI NO: 30680842 NR Description: expressed protein [Arabidopsis thaliana]
  misc_feature (1)..(218): Homolog of NCBI NO: 10176735 NR Description: gene_id:K18I23.3~unknown protein [Arabidopsis
  misc_feature (18)..(363): Homolog of NCBI NO: 30688352 NR Description: expressed protein [Arabidopsis thaliana]
  misc_feature (50)..(363): Homolog of NCBI NO: 28876015 NR Description: hypothetical protein [Oryza sativa (japonica
  misc_feature (18)..(363): Homolog of NCBI NO: 27413505 NR Description: hypothetical protein [Arabidopsis thaliana]
  misc_feature (18)..(323): Homolog of NCBI NO: 30688358 NR Description: expressed protein [Arabidopsis thaliana]
  misc_feature (181)..(348): Homolog of NCBI NO: 30685540 NR Description: expressed protein [Arabidopsis thaliana]
  misc_feature (154)..(348): Homolog of NCBI NO: 11994201 NR Description: gb|AAF35943.1~gene_id:MPN9.14~similar to unknown
  misc_feature (181)..(267): Homolog of NCBI NO: 20453175 NR Description: At3g19895 [Arabidopsis thaliana]

SEQ ID NO: 92158 - protein, 348 aa, Arabidopsis thaliana; identical to SEQ ID NO: 88402
  peptide (1)..(348): Ceres Seq. ID no. 12708745
  misc_feature (1)..(203): Homolog of NCBI NO: 30680842 NR Description: expressed protein [Arabidopsis thaliana]
  misc_feature (1)..(203): Homolog of NCBI NO: 10176735 NR Description: gene_id:K18I23.3~unknown protein [Arabidopsis
  misc_feature (3)..(348): Homolog of NCBI NO: 30688352 NR Description: expressed protein [Arabidopsis thaliana]
  misc_feature (35)..(348): Homolog of NCBI NO: 28876015 NR Description: hypothetical protein [Oryza sativa (japonica
  misc_feature (3)..(348): Homolog of NCBI NO: 27413505 NR Description: hypothetical protein [Arabidopsis thaliana]
  misc_feature (3)..(308): Homolog of NCBI NO: 30688358 NR Description: expressed protein [Arabidopsis thaliana]
  misc_feature (166)..(333): Homolog of NCBI NO: 30685540 NR Description: expressed protein [Arabidopsis thaliana]
  misc_feature (139)..(333): Homolog of NCBI NO: 11994201 NR Description: gb|AAF35943.1~gene_id:MPN9.14~similar to unknown
  misc_feature (166)..(252): Homolog of NCBI NO: 20453175 NR Description: At3g19895 [Arabidopsis thaliana]

SEQ ID NO: 92159 - protein, 252 aa, Arabidopsis thaliana; identical to SEQ ID NO: 88403
  peptide (1)..(252): Ceres Seq. ID no. 12708746
  misc_feature (1)..(107): Homolog of NCBI NO: 30680842 NR Description: expressed protein [Arabidopsis thaliana]
  misc_feature (1)..(107): Homolog of NCBI NO: 10176735 NR Description: gene_id:K18I23.3~unknown protein [Arabidopsis
  misc_feature (1)..(252): Homolog of NCBI NO: 30688352 NR Description: expressed protein [Arabidopsis thaliana]
  misc_feature (1)..(252): Homolog of NCBI NO: 28876015 NR Description: hypothetical protein [Oryza sativa (japonica
  misc_feature (1)..(252): Homolog of NCBI NO: 27413505 NR Description: hypothetical protein [Arabidopsis thaliana]
  misc_feature (1)..(212): Homolog of NCBI NO: 30688358 NR Description: expressed protein [Arabidopsis thaliana]
  misc_feature (70)..(237): Homolog of NCBI NO: 30685540 NR Description: expressed protein [Arabidopsis thaliana]
  misc_feature (43)..(237): Homolog of NCBI NO: 11994201 NR Description: gb|AAF35943.1~gene_id:MPN9.14~similar to unknown
  misc_feature (70)..(156): Homolog of NCBI NO: 20453175 NR Description: At3g19895 [Arabidopsis thaliana]

SEQ ID NO: 92160 - DNA, 5322 bp, Arabidopsis thaliana; identical to SEQ ID NO: 88404
  misc_feature (1)..(5322): Ceres Seq. ID no. 12708788
  misc_feature: MA Experiment ID: 20000173 Result: Down-regulated in Transcription
  misc_feature: MA Experiment 20000173 PARAMETER Experiment Name: At_42deg_Heat_P Parameter: Age (day) Value: 14
  misc_feature: MA Experiment 20000173 PARAMETER Experiment Name: At_42deg_Heat_P Parameter: Organism Value: A. thaliana
  misc_feature: MA Experiment 20000173 PARAMETER Experiment Name: At_42deg_Heat_P Parameter: Plant Line Value: WS
  misc_feature: MA Experiment 20000173 PARAMETER Experiment Name: At_42deg_Heat_P Parameter: Temperature (deg C) Value: 42 vs. 22
  misc_feature: MA Experiment 20000173 PARAMETER Experiment Name: At_42deg_Heat_P Parameter: Timepoint (hr) Value: 6
  misc_feature: MA Experiment 20000173 PARAMETER Experiment Name: At_42deg_Heat_P Parameter: Tissue Value: Aerial
  misc_feature: MA Experiment ID: 20000180 Result: Down-regulated in Transcription
  misc_feature: MA Experiment 20000180 PARAMETER Experiment Name: At_Germinating_Seeds_P Parameter: Age (hr) Value: 24 vs. 0
  misc_feature: MA Experiment 20000180 PARAMETER Experiment Name: At_Germinating_Seeds_P Parameter: Tissue Value: Germinating Seeds
  misc_feature: MA Experiment ID: 20000265 Result: Up-regulated in Transcription
  misc_feature: MA Experiment 20000265 PARAMETER Experiment Name: At_Open_Flower_P Parameter: Age (day) Value: 21
  misc_feature: MA Experiment 20000265 PARAMETER Experiment Name: At_Open_Flower_P Parameter: Plant Line Value: WS
  misc_feature: MA Experiment 20000265 PARAMETER Experiment Name: At_Open_Flower_P Parameter: Tissue Value: Closed Flower vs. Whole Plant
  misc_feature: MA Experiment ID: 20000286 Result: Up-regulated in Transcription
  misc_feature: MA Experiment 20000286 PARAMETER Experiment Name: At_Open_Flower_P Parameter: Age (day) Value: 21
  misc_feature: MA Experiment 20000286 PARAMETER Experiment Name: At_Open_Flower_P Parameter: Plant Line Value: WS
  misc_feature: MA Experiment 20000286 PARAMETER Experiment Name: At_Open_Flower_P Parameter: Tissue Value: Half Open vs. Whole Plant
  misc_feature: MA Experiment ID: 20001247 Result: Down-regulated in Transcription
  misc_feature: MA Experiment 20001247 PARAMETER Experiment Name: At_Far-red-induction_P Parameter: Age (day) Value: 7
  misc_feature: MA Experiment 20001247 PARAMETER Experiment Name: At_Far-red-induction_P Parameter: Light Value: Far-red vs. White
  misc_feature: MA Experiment 20001247 PARAMETER Experiment Name: At_Far-red-induction_P Parameter: Organism Value: A. thaliana
  misc_feature: MA Experiment 20001247 PARAMETER Experiment Name: At_Far-red-induction_P Parameter: Plant Line Value: Columbia
  misc_feature: MA Experiment 20001247 PARAMETER Experiment Name: At_Far-red-induction_P Parameter: Timepoint (hr) Value: 1
  misc_feature: MA Experiment 20001247 PARAMETER Experiment Name: At_Far-red-induction_P Parameter: Tissue Value: Whole Plant
  misc_feature: MA Experiment ID: 20001451 Result: Down-regulated in Transcription
  misc_feature: MA Experiment 20001451 PARAMETER Experiment Name: At_Far-red-induction_P Parameter: Age (day) Value: 7
  misc_feature: MA Experiment 20001451 PARAMETER Experiment Name: At_Far-red-induction_P Parameter: Light Value: Far-red vs. White
  misc_feature: MA Experiment 20001451 PARAMETER Experiment Name: At_Far-red-induction_P Parameter: Organism Value: A. thaliana
  misc_feature: MA Experiment 20001451 PARAMETER Experiment Name: At_Far-red-induction_P Parameter: Plant Line Value: Columbia
  misc_feature: MA Experiment 20001451 PARAMETER Experiment Name: At_Far-red-induction_P Parameter: Timepoint (hr) Value: 24
  misc_feature: MA Experiment 20001451 PARAMETER Experiment Name: At_Far-red-induction_P Parameter: Tissue Value: Whole Plant
  misc_feature: MA Experiment ID: 20001556 Result: Up-regulated in Transcription
  misc_feature: MA Experiment 20001556 PARAMETER Experiment Name: At_Drought_Soil_Dry_P Parameter: Age (day) Value: 26
  misc_feature: MA Experiment 20001556 PARAMETER Experiment Name: At_Drought_Soil_Dry_P Parameter: Organism Value: A. thaliana
  misc_feature: MA Experiment 20001556 PARAMETER Experiment Name: At_Drought_Soil_Dry_P Parameter: Plant Line Value: WS
  misc_feature: MA Experiment 20001556 PARAMETER Experiment Name: At_Drought_Soil_Dry_P Parameter: Post Timepoint (hr) Value: None
  misc_feature: MA Experiment 20001556 PARAMETER Experiment Name: At_Drought_Soil_Dry_P Parameter: Post-Treatment Value: None
  misc_feature: MA Experiment 20001556 PARAMETER Experiment Name: At_Drought_Soil_Dry_P Parameter: Timepoint (day) Value: 12
  misc_feature: MA Experiment 20001556 PARAMETER Experiment Name: At_Drought_Soil_Dry_P Parameter: Treatment Value: Drought vs. No Drought

SEQ ID NO: 92161 - protein, 1773 aa, Arabidopsis thaliana; identical to SEQ ID NO: 88405
  peptide (1)..(1773): Ceres Seq. ID no. 12708789
  misc_feature (1353)..(1385): Pfam Name: Proteasome/cyclosome repeat Pfam Description: Proteasome/cyclosome repeat
  misc_feature (845)..(1726): Homolog of NCBI NO: 12056971 NR Description: anaphase-promoting complex 1 (meiotic checkpoint [Homo sapiens] >gi|11967711|emb|CAC19484.1| Tsg24 protein [Homo
  misc_feature (506)..(699): Homolog of NCBI NO: 12056971 NR Description: anaphase-promoting complex 1 (meiotic checkpoint [Homo sapiens] >gi|11967711|emb|CAC19484.1| Tsg24 protein [Homo
  misc_feature (79)..(176): Homolog of NCBI NO: 12056971 NR Description: anaphase-promoting complex 1 (meiotic checkpoint [Homo sapiens] >gi|11967711|emb|CAC19484.1| Tsg24 protein [Homo
  misc_feature (650)..(783): Homolog of NCBI NO: 12056971 NR Description: anaphase-promoting complex 1 (meiotic checkpoint [Homo sapiens] >gi|11967711|emb|CAC19484.1| Tsg24 protein [Homo
  misc_feature (845)..(1726): Homolog of NCBI NO: 34859181 NR Description: similar to tsg24 [Rattus norvegicus]
  misc_feature (515)..(689): Homolog of NCBI NO: 34859181 NR Description: similar to tsg24 [Rattus norvegicus]
  misc_feature (845)..(1726): Homolog of NCBI NO: 6678834 NR Description: meiotic check point regulator [Mus musculus]
  misc_feature (515)..(689): Homolog of NCBI NO: 6678834 NR Description: meiotic check point regulator [Mus musculus]
  misc_feature (650)..(783): Homolog of NCBI NO: 34859181 NR Description: similar to tsg24 [Rattus norvegicus]
  misc_feature (845)..(1726): Homolog of NCBI NO: 10435855 NR Description: unnamed protein product [Homo sapiens]

SEQ ID NO: 92162 - protein, 1646 aa, Arabidopsis thaliana; identical to SEQ ID NO: 88406
  peptide (1)..(1646): Ceres Seq. ID no. 12708790
  misc_feature (1226)..(1258): Pfam Name: Proteasome/cyclosome repeat Pfam Description: Proteasome/cyclosome repeat
  misc_feature (718)..(1599): Homolog of NCBI NO: 12056971 NR Description: anaphase-promoting complex 1 (meiotic checkpoint [Homo sapiens] >gi|11967711|emb|CAC19484.1| Tsg24 protein [Homo
  misc_feature (379)..(572): Homolog of NCBI NO: 12056971 NR Description: anaphase-promoting complex 1 (meiotic checkpoint [Homo sapiens] >gi|11967711|emb|CAC19484.1| Tsg24 protein [Homo
  misc_feature (1)..(49): Homolog of NCBI NO: 12056971 NR Description: anaphase-promoting complex 1 (meiotic checkpoint [Homo sapiens] >gi|11967711|emb|CAC19484.1| Tsg24 protein [Homo
  misc_feature (523)..(656): Homolog of NCBI NO: 12056971 NR Description: anaphase-promoting complex 1 (meiotic checkpoint [Homo sapiens] >gi|11967711|emb|CAC19484.1| Tsg24 protein [Homo
  misc_feature (718)..(1599): Homolog of NCBI NO: 34859181 NR Description: similar to tsg24 [Rattus norvegicus]
  misc_feature (388)..(562): Homolog of NCBI NO: 34859181 NR Description: similar to tsg24 [Rattus norvegicus]
  misc_feature (718)..(1599): Homolog of NCBI NO: 6678834 NR Description: meiotic check point regulator [Mus musculus]
  misc_feature (388)..(562): Homolog of NCBI NO: 6678834 NR Description: meiotic check point regulator [Mus musculus]
  misc_feature (523)..(656): Homolog of NCBI NO: 34859181 NR Description: similar to tsg24 [Rattus norvegicus]
  misc_feature (718)..(1599): Homolog of NCBI NO: 10435855 NR Description: unnamed protein product [Homo sapiens]

SEQ ID NO: 92163 - protein, 1605 aa, Arabidopsis thaliana; identical to SEQ ID NO: 88407
  peptide (1)..(1605): Ceres Seq. ID no. 12708791
  misc_feature (1185)..(1217): Pfam Name: Proteasome/cyclosome repeat Pfam Description: Proteasome/cyclosome repeat
  misc_feature (677)..(1558): Homolog of NCBI NO: 12056971 NR Description: anaphase-promoting complex 1 (meiotic checkpoint [Homo sapiens] >gi|11967711|emb|CAC19484.1| Tsg24 protein [Homo
  misc_feature (338)..(531): Homolog of NCBI NO: 12056971 NR Description: anaphase-promoting complex 1 (meiotic checkpoint [Homo sapiens] >gi|11967711|emb|CAC19484.1| Tsg24 protein [Homo
  misc_feature (482)..(615): Homolog of NCBI NO: 12056971 NR Description: anaphase-promoting complex 1 (meiotic checkpoint [Homo sapiens] >gi|11967711|emb|CAC19484.1| Tsg24 protein [Homo
  misc_feature (677)..(1558): Homolog of NCBI NO: 34859181 NR Description: similar to tsg24 [Rattus norvegicus]
  misc_feature (347)..(521): Homolog of NCBI NO: 34859181 NR Description: similar to tsg24 [Rattus norvegicus]
  misc_feature (677)..(1558): Homolog of NCBI NO: 6678834 NR Description: meiotic check point regulator [Mus musculus]
  misc_feature (347)..(521): Homolog of NCBI NO: 6678834 NR Description: meiotic check point regulator [Mus musculus]
  misc_feature (482)..(615): Homolog of NCBI NO: 34859181 NR Description: similar to tsg24 [Rattus norvegicus]
  misc_feature (677)..(1558): Homolog of NCBI NO: 10435855 NR Description: unnamed protein product [Homo sapiens]
  misc_feature (338)..(531): Homolog of NCBI NO: 10435855 NR Description: unnamed protein product [Homo sapiens]

SEQ ID NO: 92164 - DNA, 3261 bp, Arabidopsis thaliana; identical to SEQ ID NO: 88408
  misc_feature (1)..(3261): Ceres Seq. ID no. 12708796
  misc_feature: MA Experiment ID: 20000180 Result: Up-regulated in Transcription
  misc_feature: MA Experiment 20000180 PARAMETER Experiment Name: At_Germinating_Seeds_P Parameter: Age (hr) Value: 24 vs. 0
  misc_feature: MA Experiment 20000180 PARAMETER Experiment Name: At_Germinating_Seeds_P Parameter: Tissue Value: Germinating Seeds
  misc_feature: MA Experiment ID: 20000185 Result: Up-regulated in Transcription
  misc_feature: MA Experiment 20000185 PARAMETER Experiment Name: At_Roots__P Parameter: Age (day) Value: 7 vs. 21
  misc_feature: MA Experiment 20000185 PARAMETER Experiment Name: At_Roots__P Parameter: Organism Value: A. thaliana
  misc_feature: MA Experiment 20000185 PARAMETER Experiment Name: At_Roots__P Parameter: Tissue Value: Roots vs. Whole Plant
  misc_feature: MA Experiment ID: 20000794 Result: Up-regulated in Transcription
  misc_feature: MA Experiment 20000794 PARAMETER Experiment Name: At_Petals_P Parameter: Age (day) Value: 23-25 days
  misc_feature: MA Experiment 20000794 PARAMETER Experiment Name: At_Petals_P Parameter: Plant Line Value: WS
  misc_feature: MA Experiment 20000794 PARAMETER Experiment Name: At_Petals_P Parameter: Tissue Value: Petals vs. Whole plant

SEQ ID NO: 92165 - protein, 1086 aa, Arabidopsis thaliana; identical to SEQ ID NO: 88409
  peptide (1)..(1086): Ceres Seq. ID no. 12708797
  misc_feature (1021)..(1078): Pfam Name: Synaptobrevin Pfam Description: Synaptobrevin
  misc_feature (955)..(1086): Homolog of NCBI NO: 15239173 NR Description: putative protein; protein id: At5g05570.1 thaliana] >gi|10178134|dbj|BAB11546.1|
  misc_feature (135)..(671): Homolog of NCBI NO: 34898238 NR Description: P0034A04.30 [Oryza sativa (japonica >gi|29837189|dbj|BAC75571.1| hypothetical protein [Oryza sativa
  misc_feature (693)..(1086): Homolog of NCBI NO: 34898238 NR Description: P0034A04.30 [Oryza sativa (japonica >gi|29837189|dbj|BAC75571.1| hypothetical protein [Oryza sativa
  misc_feature (33)..(117): Homolog of NCBI NO: 34898238 NR Description: P0034A04.30 [Oryza sativa (japonica >gi|29837189|dbj|BAC75571.1| hypothetical protein [Oryza sativa
  misc_feature (753)..(1082): Homolog of NCBI NO: 38345401 NR Description: OSJNBa0017B10.7 [Oryza sativa (japonica
  misc_feature (456)..(605): Homolog of NCBI NO: 38345401 NR Description: OSJNBa0017B10.7 [Oryza sativa (japonica
  misc_feature (194)..(319): Homolog of NCBI NO: 38345401 NR Description: OSJNBa0017B10.7 [Oryza sativa (japonica
  misc_feature (1)..(112): Homolog of NCBI NO: 38345401 NR Description: OSJNBa0017B10.7 [Oryza sativa (japonica
  misc_feature (198)..(706): Homolog of NCBI NO: 15237037 NR Description: hypothetical protein; protein id: At4g35560.1
  misc_feature (361)..(489): Homolog of NCBI NO: 21703874 NR Description: lethal giant larvae-like protein 2 [Mus musculus]

SEQ ID NO: 92166 - protein, 1058 aa, Arabidopsis thaliana; identical to SEQ ID NO: 88410
  peptide (1)..(1058): Ceres Seq. ID no. 12708798
  misc_feature (993)..(1050): Pfam Name: Synaptobrevin Pfam Description: Synaptobrevin
  misc_feature (927)..(1058): Homolog of NCBI NO: 15239173 NR Description: putative protein; protein id: At5g05570.1 thaliana] >gi|10178134|dbj|BAB11546.1|
  misc_feature (107)..(643): Homolog of NCBI NO: 34898238 NR Description: P0034A04.30 [Oryza sativa (japonica >gi|29837189|dbj|BAC75571.1| hypothetical protein [Oryza sativa
  misc_feature (665)..(1058): Homolog of NCBI NO: 34898238 NR Description: P0034A04.30 [Oryza sativa (japonica >gi|29837189|dbj|BAC75571.1| hypothetical protein [Oryza sativa
  misc_feature (5)..(89): Homolog of NCBI NO: 34898238 NR Description: P0034A04.30 [Oryza sativa (japonica >gi|29837189|dbj|BAC75571.1| hypothetical protein [Oryza sativa
  misc_feature (725)..(1054): Homolog of NCBI NO: 38345401 NR Description: OSJNBa0017B10.7 [Oryza sativa (japonica
  misc_feature (428)..(577): Homolog of NCBI NO: 38345401 NR Description: OSJNBa0017B10.7 [Oryza sativa (japonica
  misc_feature (166)..(291): Homolog of NCBI NO: 38345401 NR Description: OSJNBa0017B10.7 [Oryza sativa (japonica
  misc_feature (1)..(84): Homolog of NCBI NO: 38345401 NR Description: OSJNBa0017B10.7 [Oryza sativa (japonica
  misc_feature (170)..(678): Homolog of NCBI NO: 15237037 NR Description: hypothetical protein; protein id: At4g35560.1
  misc_feature (333)..(461): Homolog of NCBI NO: 21703874 NR Description: lethal giant larvae-like protein 2 [Mus musculus]

SEQ ID NO: 92167 - protein, 993 aa, Arabidopsis thaliana; identical to SEQ ID NO: 88411
  peptide (1)..(993): Ceres Seq. ID no. 12708799
  misc_feature (928)..(985): Pfam Name: Synaptobrevin Pfam Description: Synaptobrevin
  misc_feature (862)..(993): Homolog of NCBI NO: 15239173 NR Description: putative protein; protein id: At5g05570.1 thaliana] >gi|10178134|dbj|BAB11546.1|
  misc_feature (42)..(578): Homolog of NCBI NO: 34898238 NR Description: P0034A04.30 [Oryza sativa (japonica >gi|29837189|dbj|BAC75571.1| hypothetical protein [Oryza sativa
  misc_feature (600)..(993): Homolog of NCBI NO: 34898238 NR Description: P0034A04.30 [Oryza sativa (japonica >gi|29837189|dbj|BAC75571.1| hypothetical protein [Oryza sativa
  misc_feature (1)..(24): Homolog of NCBI NO: 34898238 NR Description: P0034A04.30 [Oryza sativa (japonica >gi|29837189|dbj|BAC75571.1| hypothetical protein [Oryza sativa
  misc_feature (660)..(989): Homolog of NCBI NO: 38345401 NR Description: OSJNBa0017B10.7 [Oryza sativa (japonica
  misc_feature (363)..(512): Homolog of NCBI NO: 38345401 NR Description: OSJNBa0017B10.7 [Oryza sativa (japonica
  misc_feature (101)..(226): Homolog of NCBI NO: 38345401 NR Description: OSJNBa0017B10.7 [Oryza sativa (japonica
  misc_feature (1)..(19): Homolog of NCBI NO: 38345401 NR Description: OSJNBa0017B10.7 [Oryza sativa (japonica
  misc_feature (105)..(613): Homolog of NCBI NO: 15237037 NR Description: hypothetical protein; protein id: At4g35560.1
  misc_feature (268)..(396): Homolog of NCBI NO: 21703874 NR Description: lethal giant larvae-like protein 2 [Mus musculus]

SEQ ID NO: 92168 - DNA, 1305 bp, Arabidopsis thaliana; identical to SEQ ID NO: 88412
  misc_feature (1)..(1305): Ceres Seq. ID no. 12708839
  misc_feature: MA Experiment ID: 20000306 Result: Up-regulated in Transcription
  misc_feature: MA Experiment 20000306 PARAMETER Experiment Name: At_Germinating_Seeds_Sub_P Parameter: Age (hr) Value: 6 vs. 0
  misc_feature: MA Experiment 20000306 PARAMETER Experiment Name: At_Germinating_Seeds_Sub_P Parameter: Organism Value: A. thaliana
  misc_feature: MA Experiment 20000306 PARAMETER Experiment Name: At_Germinating_Seeds_Sub_P Parameter: Plant Line Value: WS
  misc_feature: MA Experiment 20000306 PARAMETER Experiment Name: At_Germinating_Seeds_Sub_P Parameter: Tissue Value: Germinating Seeds
  misc_feature: MA Experiment ID: 20000307 Result: Up-regulated in Transcription
  misc_feature: MA Experiment 20000307 PARAMETER Experiment Name: At_Germinating_Seeds_Sub_P Parameter: Age (hr) Value: 24 vs. 0
  misc_feature: MA Experiment 20000307 PARAMETER Experiment Name: At_Germinating_Seeds_Sub_P Parameter: Organism Value: A. thaliana
  misc_feature: MA Experiment 20000307 PARAMETER Experiment Name: At_Germinating_Seeds_Sub_P Parameter: Plant Line Value: WS
  misc_feature: MA Experiment 20000307 PARAMETER Experiment Name: At_Germinating_Seeds_Sub_P Parameter: Tissue Value: Germinating Seeds
  misc_feature: MA Experiment ID: 20000314 Result: Up-regulated in Transcription
  misc_feature: MA Experiment 20000314 PARAMETER Experiment Name: At_14day_Shoots-Roots_Sub_P Parameter: Age (day) Value: 14
  misc_feature: MA Experiment 20000314 PARAMETER Experiment Name: At_14day_Shoots-Roots_Sub_P Parameter: Organism Value: A. thaliana
  misc_feature: MA Experiment 20000314 PARAMETER Experiment Name: At_14day_Shoots-Roots_Sub_P Parameter: Plant Line Value: WS
  misc_feature: MA Experiment 20000314 PARAMETER Experiment Name: At_14day_Shoots-Roots_Sub_P Parameter: Tissue Value: Roots vs. Whole Plant
